(19) United States
(12) Patent Application Publication
(10) Pub. No.: US 2004/0219528 A1
(43) Pub. Date: Nov. 4, 2004

(54) Novel therapeutic targets in cancer

(76) Inventors: David W. Morris, Davis, CA (US); Marc S. Malandro, Davis, CA (US)

Correspondence Address: MORRISON & FOERSTER LLP, 755 PAGE MILL RD, PALO ALTO, CA, 94304-1018, US

(21) Appl. No.: 10/417,375

(22) Filed: Apr. 15, 2003

(51) Int. Cl. C12Q 1/68; G01N 33/574; C07H 21/04; C07K 14/47

(52) U.S. Cl. 435/6; 435/7.23; 435/69.3; 435/320.1; 435/325; 530/350; 536/23.2

(57) ABSTRACT

The present invention relates to novel sequences for use in detection, diagnosis and treatment of cancers, especially lymphomas. The invention provides cancer-associated (CA) polynucleotide sequences whose expression is associated with cancer. The present invention provides CA polypeptides associated with cancer that are present on the cell surface and present novel therapeutic targets against cancer. The present invention further provides diagnostic compositions and methods for the detection of cancer. The present invention provides monoclonal and polyclonal antibodies specific for the CA polypeptides. The present invention also provides diagnostic tools and therapeutic compositions and methods for screening, prevention and treatment of cancer.

### CROSS-REFERENCE TO RELATED APPLICATIONS

[0001] This application is related to the following U.S. applications: U.S. Ser. No. 10/034,650, filed Dec. 20, 2001; U.S. Ser. No. 10/035,832, filed Dec. 26, 2001; U.S. Ser. No. 10/004,113, filed Oct. 23, 2001; U.S. Ser. No. 09/997,722, filed Nov. 30, 2001; U.S. Ser. No. 10/085,117, filed Feb. 27, 2002; U.S. Ser. No. 10/087,192, filed Mar. 1, 2002; U.S. Ser. No. 10/322,281, filed Dec. 17, 2002; U.S. Ser. No. 10/322,696, filed Dec. 17, 2002, U.S. Ser. No. 10/331,053, filed Dec. 26, 2002; U.S. Ser. No. 10/330,773, filed Dec. 27, 2002; U.S. Ser. No. 10/367,094, filed Feb. 14, 2003; and U.S. Ser. No. 10/388.838, filed Mar. 14, 2003, all of which are expressly incorporated herein by reference in their entirety.

### DESCRIPTION OF ACCOMPANYING CD-ROMS

[0002] Tables 1-18 are filed herewith in CD-ROM in accordance with 37 C.F.R. §§ 1.52 and 1.58. Two identical copies (marked “Copy 1” and “Copy 2”) of this CD-ROM are submitted.

[0003] Contents of the CD-ROM disks submitted herewith are hereby incorporated by reference into the Specification.

### TECHNICAL FIELD OF THE INVENTION

[0004] This invention relates generally to the field of cancer-associated genes. Specifically, it relates to novel sequences for use in diagnosis and treatment of cancer and tumors, as well as the use of the novel compositions in screening methods. The present invention provides methods of using cancer associated polynucleotides, their corresponding gene products and antibodies specific for the gene products in the detection, diagnosis, prevention and/or treatment of associated cancers.

### BACKGROUND OF THE INVENTION

[0005] Oncogenes are genes that can cause cancer. Carcinogenesis can occur by a wide variety of mechanisms, including infection of cells by viruses containing oncogenes, activation of protooncogenes in the host genome, and mutations of protooncogenes and tumor suppressor genes. Carcinogenesis is fundamentally driven by somatic cell evolution (i.e. mutation and natural selection of variants with progressive loss of growth control). The genes that serve as targets for these somatic mutations are classified as either protooncogenes or tumor suppressor genes, depending on whether their mutant phenotypes are dominant or recessive, respectively.

[0006] There are a number of viruses known to be involved in human cancer as well as in animal cancer. Of particular interest here are viruses that do not contain oncogenes themselves; these are slow-transforming retroviruses. They induce tumors by integrating into the host genome and affecting neighboring protooncogenes in a variety of ways. Provirus insertion mutation is a normal consequence of the retroviral life cycle. In infected cells, a DNA copy of the retrovirus genome (called a provirus) is integrated into the host genome. A newly integrated provirus can affect gene expression in cis at or near the integration site by one of two mechanisms. Type I insertion mutations up-regulate transcription of proximal genes as a consequence of regulatory sequences (enhancers and/or promoters) within the proviral long terminal repeats (LTRs). Type II insertion mutations cause truncation of coding regions due to either integration directly within an open reading frame or integration within an intron flanked on both sides by coding sequences. The analysis of sequences at or near the insertion sites has led to the identification of a number of new protooncogenes.

[0007] With respect to lymphoma and leukemia, retroviruses such as AKV murine leukemia virus (MLV) or SL3-3 MLV, are potent inducers of tumors when inoculated into susceptible newborn mice, or when carried in the germline. A number of sequences have been identified as relevant in the induction of lymphoma and leukemia by analyzing the insertion sites; see Sorensen et al., J. of Virology 74:2161 (2000); Hansen et al., Genome Res. 10(2):237-43 (2000); Sorensen et al., J. Virology 70:4063 (1996); Sorensen et al., J. Virology 67:7118 (1993); Joosten et al., Virology 268:308 (2000); and Li et al., Nature Genetics 23:348 (1999); all of which are expressly incorporated by reference herein. With respect to cancers, especially breast cancer, prostate cancer and cancers with epithelial origin, the mammalian retrovirus, mouse mammary tumor virus (MMTV) is a potent inducer of tumors when inoculated into susceptible newborn mice, or when carried in the germ line. Mammary Tumors in the Mouse, edited by J. Hilgers and M. Sluyser; Elsevier/North-Holland Biomedical Press; New York, N.Y.

[0008] The pattern of gene expression in a particular living cell is characteristic of its current state. Nearly all differences in the state or type of a cell are reflected in the differences in RNA levels of one or more genes. Comparing expression patterns of uncharacterized genes may provide clues to their function. High throughput analysis of expression of hundreds or thousands of genes can help in (a) identification of complex genetic diseases, (b) analysis of differential gene expression over time, between tissues and disease states, and (c) drug discovery and toxicology studies. Increase or decrease in the levels of expression of certain genes correlate with cancer biology. For example, oncogenes are positive regulators of tumorigenesis, while tumor suppressor genes are negative regulators of tumorigenesis. (Marshall, Cell, 64: 313-326 (1991); Weinberg, Science, 254: 1138-1146 (1991)).

[0009] Accordingly, it is an object of the invention to provide polynucleotide and polypeptide sequences involved in cancer and, in particular, in oncogenesis.

[0010] Immunotherapy, or the use of antibodies for therapeutic purposes has been used in recent years to treat cancer. Passive immunotherapy involves the use of monoclonal antibodies in cancer treatments. See for example, Cancer: Principles and Practice of Oncology, 6^{th} Edition (2001) Chapt. 20 pp. 495-508. Inherent therapeutic biological activity of these antibodies include direct inhibition of tumor cell growth or survival, and the ability to recruit the natural cell killing activity of the body's immune system. These agents are administered alone or in conjunction with radiation or chemotherapeutic agents. Rituxang and Herceptin®, approved for treatment of lymphoma and breast cancer, respectively, are two examples of such therapeutics. Alternatively, antibodies are used to make antibody conjugates where the antibody is linked to a toxic agent and directs that agent to the tumor by specifically binding to the tumor. Mylotarg® is an example of an approved antibody conjugate used for the treatment of leukemia.

[0011] Accordingly, it is another object of this invention to provide antigens (cancer-associated polypeptides) associated with a variety of cancers as targets for diagnostic and/or therapeutic antibodies. These antigens are also useful for drug discovery (e.g., small molecules) and for further characterization of cellular regulation, growth, and differentiation.

### SUMMARY OF THE INVENTION

[0012] In accordance with the objects outlined above, the present invention provides methods for screening for compositions that modulate cancer, especially lymphoma and leukemia. The present invention also provides methods for screening for compositions which modulate carcinomas,) especially mammary adenocarcinomas. Also provided herein are methods of inhibiting proliferation of a cell, preferably a lymphoma cell or a breast cancer cell. Methods of treatment of cancer, including diagnosis, are also provided herein.

[0013] In one aspect, a method of screening drug candidates comprises providing a cell that expresses a cancer-associated (CA) gene or fragments thereof. Preferred embodiments of CA genes are genes that are differentially expressed in cancer cells, preferably lymphatic, breast, prostate or epithelial cells, compared to other cells. Preferred embodiments of CA genes used in the methods herein include, but are not limited to the nucleic acids selected from Tables 1-18 (human genomic sequences of SEQ ID NOS: 4, 12, 18, 30, 36, 44, 58, 66, 76, 82, 94, 108, 128, 138, 146, 154, 160 and 170, and sequences of SEQ ID NOS: 5, 7, 13, 19, 21, 23, 25, 31, 37, 39, 45, 47, 49, 51, 53, 59, 61, 67, 69, 71, 77, 83, 85, 87, 89, 95, 97, 99, 101, 103, 109, 111, 113, 115, 117, 119, 121, 123, 129, 131, 133, 139, 141, 147, 149, 155, 161, 163, 165, 171, 173 and 175 corresponding to the human mRNAs generated therefrom). The methods further include adding a drug candidate to the cell and determining the effect of the drug candidate on the expression of the CA gene.

[0014] In one embodiment, the method of screening drug candidates includes comparing the level of expression in the absence of the drug candidate to the level of expression in the presence of the drug candidate.

[0015] Also provided herein is a method of screening for a bioactive agent capable of binding to a CA protein (CAP), the method comprising combining the CAP and a candidate bioactive agent, and determining the binding of the candidate agent to the CAP.

[0016] Further provided herein is a method for screening for a bioactive agent capable of modulating the activity of a CAP. In one embodiment, the method comprises combining the CAP and a candidate bioactive agent, and determining the effect of the candidate agent on the bioactivity of the CAP.

[0017] Also provided is a method of evaluating the effect of a candidate cancer drug comprising administering the drug to a patient and removing a cell sample from the patient. The expression profile of the cell is then determined. This method may further comprise comparing the expression profile of the patient to an expression profile of a healthy individual.

[0018] In a further aspect, a method for inhibiting the activity of a CA protein is provided. In one embodiment, the method comprises administering to a patient an inhibitor of a CA protein preferably selected from the group consisting of the sequences outlined in Tables 1-18 (SEQ ID NOS: 6, 8, 14, 20, 22, 24, 26, 32, 38, 40, 46, 48, 50, 52, 54, 60, 62, 68, 70, 72, 78, 84, 86, 88, 90, 96, 98, 100, 102, 104, 110, 112, 114, 116, 118, 120, 122, 124, 130, 132, 134, 140, 142, 148, 150, 156, 162, 164, 166, 172, 174 and 176).

[0019] A method of neutralizing the effect of a CA protein, preferably a protein encoded by a nucleic acid selected from the group of sequences outlined in Tables 1-18 (human genomic sequences of SEQ ID NOS: 4, 12, 18, 30, 36, 44, 58, 66, 76, 82, 94, 108, 128, 138, 146, 154, 160 and 170, and sequences of SEQ ID NOS: 5, 7, 13, 19, 21, 23, 25, 31, 37, 39, 45, 47, 49, 51, 53, 59, 61, 67, 69, 71, 77, 83, 85, 87, 89, 95, 97, 99, 101, 103, 109, 111, 113, 115, 117, 119, 121, 123, 129, 131, 133, 139, 141, 147, 149, 155, 161, 163, 165, 171, 173 and 175 corresponding to the human mRNAs generated therefrom), is also provided. Preferably, the method comprises contacting an agent specific for said protein with said protein in an amount sufficient to effect neutralization.

[0020] Moreover, provided herein is a biochip comprising a nucleic acid segment which encodes a CA protein, preferably selected from the sequences outlined in Tables 1-18 (SEQ ID NOS: 5, 7, 13, 19, 21, 23, 25, 31, 37, 39, 45, 47, 49, 51, 53, 59, 61, 67, 69, 71, 77, 83, 85, 87, 89, 95, 97, 99, 101, 103, 109, 111, 113, 115, 117, 119, 121, 123, 129, 131, 133, 139, 141, 147, 149, 155, 161, 163, 165, 171, 173 and 175).

[0021] Also provided herein is a method for diagnosing or determining the propensity to cancers, especially lymphoma or leukemia or carcinoma by sequencing at least one carcinoma or lymphoma gene of an individual. In yet another aspect of the invention, a method is provided for determining cancer including lymphoma and leukemia gene copy numbers in an individual.

[0022] The invention provides an isolated nucleic acid comprising at least 10, 12, 15, 20 or 30 contiguous nucleotides of a sequence selected from the group consisting of the polynucleotide sequences SEQ ID NOS: 5, 7, 13, 19, 21, 23, 25, 31, 37, 39, 45, 47, 49, 51, 53, 59, 61, 67, 69, 71, 77, 83, 85, 87, 89, 95, 97, 99, 101, 103, 109, 111, 113, 115, 117, 119, 121, 123, 129, 131, 133, 139, 141, 147, 149, 155, 161, 163, 165, 171, 173 and 175 shown in Tables 1-18, or its complement, or an expression vector comprising the isolated nucleic acids and host cells comprising them.

[0023] In some embodiments, the polynucleotide, or its complement or a fragment thereof, further comprises a detectable label, is attached to a solid support, is prepared at least in part by chemical synthesis, is an antisense fragment, is single stranded, is double stranded or comprises a microarray.

[0024] The invention provides an isolated polypeptide, encoded within an open reading frame of a CA sequence selected from the group consisting of the polynucleotide sequences of SEQ ID NOS: 4, 12, 18, 30, 36, 44, 58, 66, 76, 82, 94, 108, 128, 138, 146, 154, 160 and 170 shown in Tables 1-18, or its complement. The invention provides an isolated polypeptide, wherein said polypeptide comprises the amino acid sequence encoded by a polynucleotide selected from the group consisting of SEQ ID NOS: 5, 7, 13, 19, 21, 23, 25, 31, 37, 39, 45, 47, 49, 51, 53, 59, 61, 67, 69, 71, 77, 83, 85, 87, 89, 95, 97, 99, 101, 103, 109, 111, 113, 115, 117, 119, 121, 123, 129, 131,133, 139, 141, 147, 149, 155, 161, 163, 165, 171, 173 and 175 shown in Tables 1-18. The invention provides an isolated polypeptide, wherein said polypeptide comprises the amino acid sequence encoded by a polypeptide selected from the group consisting of SEQ ID NOS: 6, 8, 14, 20, 22, 24, 26, 32, 38, 40, 46, 48, 50, 52, 54, 60, 62, 68, 70, 72, 78, 84, 86, 88, 90, 96, 98, 100, 102, 104, 110, 112, 114, 116, 118, 120, 122, 124, 130, 132, 134, 140, 142, 148, 150, 156, 162, 164, 166, 172, 174 and 176 shown in Tables 1-18.

[0025] The invention further provides an isolated polypeptide, comprising the amino acid sequence of an epitope of the amino acid sequence of a CA polypeptide selected from the group consisting of SEQ ID NOS: 6, 8, 14, 20, 22, 24, 26, 32, 38, 40, 46, 48, 50, 52, 54, 60, 62, 68, 70, 72, 78, 84, 86, 88, 90, 96, 98, 100, 102, 104, 110, 112, 114, 116, 118, 120, 122, 124, 130, 132, 134, 140, 142, 148, 150, 156, 162, 164, 166, 172, 174 and 176 shown in Tables 1-18, wherein the polypeptide or fragment thereof may be attached to a solid support. In one embodiment the invention provides an isolated antibody (monoclonal or polyclonal) or antigen binding fragment thereof, that binds to such a polypeptide. The isolated antibody or antigen binding fragment thereof may be attached to a solid support, or further comprises a detectable label.

[0026] In one embodiment, the invention provides a kit for diagnosing the presence of cancer in a test sample, said kit comprising at least one polynucleotide that selectively hybridizes to a CA polynucleotide sequence shown in Tables 1-18, or its complement. In another embodiment. the invention provides an electronic library comprising a CA polynucleotide, a CA polypeptide, or fragment thereof, shown in Tables 1-18.

[0027] In one embodiment, the invention provides a method of screening for anticancer activity comprising: (a) providing a cell that expresses a cancer associated (CA) gene encoded by a nucleic acid sequence selected from the group consisting of the CA sequences shown in Tables 1-18, or fragment thereof; (b) contacting a tissue sample derived from a cancer cell with an anticancer drug candidate; (c) monitoring an effect of the anticancer drug candidate on an expression of the CA polynucleotide in the tissue sample, and optionally (d) comparing the level of expression in the absence of said drug candidate to the level of expression in the presence of the drug candidate. The drug candidate may be an inhibitor of transcription, a G-protein coupled receptor antagonist, a growth factor antagonist, a serine-threonine kinase antagonist, a tyrosine kinase antagonist.

[0028] In one embodiment, the invention provides a method for detecting cancer associated with expression of a polypeptide in a test cell sample, comprising the steps of: (i) detecting a level of expression of at least one polypeptide selected from the group consisting of SEQ ID NOS: 6, 8, 14, 20, 22, 24, 26, 32, 38, 40, 46, 48, 50, 52, 54, 60, 62, 68, 70, 72, 78, 84, 86, 88, 90, 96, 98, 100, 102, 104, 110, 112, 114, 116, 118, 120, 122, 124, 130, 132, 134, 140, 142, 148, 150, 156, 162, 164, 166, 172, 174 and 176 shown in Tables 1-18, or a fragment thereof; and (ii) comparing the level of expression of the polypeptide in the test sample with a level of expression of polypeptide in a normal cell sample, wherein an altered level of expression of the polypeptide in the test cell sample relative to the level of polypeptide expression in the normal cell sample is indicative of the presence of cancer in the test cell sample.

[0029] In another embodiment, the invention provides a method for detecting cancer associated with expression of a polypeptide in a test cell sample, comprising the steps of: (i) detecting a level of activity of at least one polypeptide selected from the group consisting of SEQ ID NOS: 6, 8, 14, 20, 22, 24, 26, 32, 38, 40, 46, 48, 50, 52, 54, 60, 62, 68, 70, 72, 78, 84, 86, 88, 90, 96, 98, 100, 102, 104, 110, 112, 114, 116, 118, 120, 122, 124, 130, 132, 134, 140, 142, 148, 150, 156, 162, 164, 166, 172, 174 and 176 shown in Tables 1-18, or a fragment thereof, wherein said activity corresponds to at least one activity for the polypeptide listed in Table 20; and (ii) comparing the level of activity of the polypeptide in the test sample with a level of activity of polypeptide in a normal cell sample, wherein an altered level of activity of the polypeptide in the test cell sample relative to the level of polypeptide activity in the normal cell sample is indicative of the presence of cancer in the test cell sample.

[0030] In another embodiment, the invention provides a method for detecting cancer associated with the presence of an antibody in a test serum sample, comprising the steps of: (i) detecting a level of an antibody against an antigenic polypeptide selected from the group consisting of SEQ ID NOS: 6, 8, 14, 20, 22, 24, 26, 32, 38, 40, 46, 48, 50, 52, 54, 60, 62, 68, 70, 72, 78, 84, 86, 88, 90, 96, 98, 100, 102, 104, 110, 112, 114, 116, 118, 120, 122, 124, 130, 132, 134, 140, 142, 148, 150, 156, 162, 164, 166, 172, 174 and 176 shown in Tables 1-18, or antigenic fragment thereof; and (ii) comparing said level of said antibody in the test sample with a level of said antibody in the control sample, wherein an altered level of antibody in said test sample relative to the level of antibody in the control sample is indicative of the presence of cancer in the test serum sample.

[0031] The invention provides a method for screening for a bioactive agent capable of modulating the activity of a CA protein (CAP), wherein said CAP is encoded by a nucleic acid comprising a nucleic acid sequence selected from the group consisting of the polynucleotide sequences SEQ ID NOS: 5, 7, 13, 19, 21, 23, 25, 31, 37, 39, 45, 47, 49, 51, 53, 59, 61, 67, 69, 71, 77, 83, 85, 87, 89, 95, 97, 99, 101, 103, 109, 111, 113, 115, 117, 119, 121, 123, 129, 131, 133, 139, 141, 147, 149, 155, 161, 163, 165, 171, 173 and 175 shown in Tables 1-18, said method comprising: a) combining said CAP and a candidate bioactive agent; and b) determining the effect of the candidate agent on the bioactivity of said CAP. According to the method the bioactive agent: affects the expression of the CA protein (CAP); affects the activity of the CA protein (CAP), wherein such activity is selected from the activities listed in Table 20.

[0032] In one embodiment, the invention provides a method for diagnosing cancer comprising: a) determining the expression of one or more genes comprising a nucleic acid sequence selected from the group consisting of the human genomic and mRNA sequences outlined in Tables 1-18, in a first tissue type of a first individual; and b) comparing said expression of said gene(s) from a second normal tissue type from said first individual or a second unaffected individual; wherein a difference in said expression indicates that the first individual has cancer.

[0033] In another embodiment the invention provides a method for treating cancers comprising administering to a patient a bioactive agent modulating the activity of a CA protein (CAP), wherein said CAP is encoded by a nucleic acid comprising a nucleic acid sequence selected from the group consisting of the human nucleic acid sequences in Tables 1-18 and further wherein the bioactive agent: binds to the CA protein; is a ATP binding protein wherein the CAP sequence is selected from the group consisting of SEQ ID NOS: 38, 72, 98, 100, 102 and 104 shown in Tables 1-18; is a transport protein wherein the CAP sequence is selected from the group consisting of SEQ ID NOS: 68, 70, 72, 84, 86, 88, 90, 130, 132, 134, 162, 164, 166, 172, 174 and 176 shown in Tables 1-18; is a protein kinase wherein the CAP sequence is selected from the group consisting of SEQ ID NOS: 102, 104, 110, 124, 140, 142, 148, 162 and 164 shown in Tables 1-18; is a lysozyme wherein the CAP sequence is selected from the group consisting of SEQ ID NOS: 20, 22, 24 and 26 shown in Tables 1-18; is a G-protein coupled receptor wherein the CAP sequence is selected from the group consisting of SEQ ID NOS: 130, 132 and 134 shown in Tables 1-18; is an adipophilin-related protein wherein the CAP sequence is selected from the group consisting of SEQ ID NOS: 46, 48, 50, 52 and 54 shown in Tables 1-18; is involved in protein metabolism wherein the CAP sequence is selected from the group consisting of SEQ ID NOS: 46, 52, 54, 96 and 98 shown in Tables 1-18; is involved in signalling/signal transduction wherein the CAP sequence is selected from the group consisting of SEQ ID NOS: 60, 62, 98, 100, 102, 104 and 156 shown in Tables 1-18; is a cell adhesion molecule wherein the CAP sequence is selected from the group consisting of SEQ ID NOS: 6, 8, 78, 110, 116, 120, 122, 124, 148 and 156.

[0034] The invention provides monoclonal antibodies that preferentially binds to a CA protein (CAP) that is expressed on a cell surface, wherein the CA protein selected from the group consisting of SEQ ID NOS: 6, 8, 14, 20, 22, 24, 26, 32, 38, 40, 46, 48, 50, 52, 54, 60, 62, 68, 70, 72, 78, 84, 86, 88, 90, 96, 98, 100, 102, 104, 110, 112, 114, 116, 118, 120, 122, 124, 130, 132, 134, 140, 142, 148, 150, 156, 162, 164, 166, 172, 174 and 176; preferably to the extracellular domain of the CA protein; preferably to a CA protein differentially expressed on a cancer cell surface relative to a normal cell surface or preferably to at least one human cancer cell line; preferably linked to a therapeutic agent; or preferably humanized. Kits and pharmaceutical compositions for detecting a presence or an absence of cancer cells in an individual, and comprising such antibodies are also provided.

[0035] The invention also provides a method for detecting a presence or an absence of cancer cells in an individual, the method comprising: contacting cells from the individual with the antibody according to the invention; and detecting a complex of a CAP from the cancer cells and the antibody, wherein detection of the complex correlates with the presence of cancer cells in the individual. In one embodiment the invention provides a method for inhibiting growth of cancer cells in an individual, the method comprising: administering to the individual an effective amount of a pharmaceutical composition according to the invention. In another embodiment the invention provides a method for delivering a therapeutic agent to cancer cells in an individual, the method comprising: administering to the individual an effective amount of a pharmaceutical composition according to according to the invention.

[0036] Novel sequences associated with cancer are also provided herein. Other aspects of the invention will become apparent to the skilled artisan by the following description of the invention.

### BRIEF DESCRIPTION OF THE FIGURES

[0037] FIG. 1 depicts PCR amplification of host-provirus junction fragments.

[0038] FIG. 2 shows an example of average threshold cycle (C_{T}) values for a housekeeper gene and target gene.

[0039] FIG. 3 shows an example of the calculated difference (ΔΔC_{T}) between the C_{T} values of target and housekeeper genes (ΔC_{T}) for various samples.

[0040] FIG. 4 shows the ΔΔC_{T} and comparative expression level for each sample from FIG. 3.

### DETAILED DESCRIPTION OF PREFERRED EMBODIMENTS

[0041] The present invention is directed to a number of sequences associated with cancers, especially lymphoma, breast cancer or prostate cancer. The relatively tight linkage between clonally-integrated proviruses and protooncogenes forms “provirus tagging”, in which slow-transforming retroviruses that act by an insertion mutation mechanism are used to isolate protooncogenes. In some models, uninfected animals have low cancer rates, and infected animals have high cancer rates. It is known that many of the retroviruses involved do not carry transduced host protooncogenes or pathogenic trans-acting viral genes, and thus the cancer incidence must therefore be a direct consequence of proviral integration effects into host protooncogenes. Since proviral integration is random, rare integrants will “activate” host protooncogenes that provide a selective growth advantage, and these rare events result in new proviruses at clonal stoichiometries in tumors. In contrast to mutations caused by chemicals, radiation, or spontaneous errors, protooncogene insertion mutations can be easily located by virtue of the fact that a convenient-sized genetic marker of known sequence (the provirus) is present at the site of mutation. Host sequences that flank clonally integrated proviruses can be cloned using a variety of strategies. Once these sequences are in hand, the tagged protooncogenes can be subsequently identified. The presence of provirus at the same locus in two or more independent tumors is primafacie evidence that a protooncogene is present at or very near the provirus integration sites. This is because the genome is too large for random integrations to result in observable clustering. Any clustering that is detected is unequivocal evidence for biological selection (i.e. the tumor phenotype). Moreover, the pattern of proviral integrants (including orientations) provides compelling positional information that makes localization of the target gene at each cluster relatively simple. The three mammalian retroviruses that are known to cause cancer by an insertion mutation mechanism are FeLV (leukemia/lymphoma in cats), MLV (leukemia/lymphoma in mice and rats), and MMTV (mammary cancer in mice).

[0042] Thus, the use of oncogenic retroviruses, whose sequences insert into the genome of the host organism resulting in cancer, allows the identification of host sequences involved in cancer. These sequences may then be used in a number of different ways, including diagnosis, prognosis, screening for modulators (including both agonists and antagonists), antibody generation (for immunotherapy and imaging), etc. However, as will be appreciated by those in the art, oncogenes that are identified in one type of cancer such as lymphoma or leukemia have a strong likelihood of being involved in other types of cancers as well. Thus, while the sequences outlined herein are initially identified as correlated with lymphoma, they can also be found in other types of cancers as well, outlined below.

[0043] Definitions

[0044] Accordingly, the present invention provides nucleic acid and protein sequences that are associated with cancer, herein termed “cancer associated” or “CA” sequences. In one embodiment, the present invention provides nucleic acid and protein sequences that are associated with cancers that originate in lymphatic tissue, herein termed “lymphoma associated,” “leukemia associated” or “LA” sequences. In another embodiment, the present invention provides nucleic acid and protein sequences that are associated with carcinomas which originate in breast tissue, herein termed “breast cancer associated” or “BC” sequences.

[0045] Suitable cancers that can be diagnosed or screened for using the methods of the present invention include cancers classified by site or by histological type. Cancers classified by site include cancer of the oral cavity and pharynx (lip, tongue, salivary gland, floor of mouth, gum and other mouth, nasopharynx, tonsil, oropharynx, hypopharynx, other oral/pharynx); cancers of the digestive system (esophagus; stomach; small intestine; colon and rectum; anus, anal canal, and anorectum; liver; intrahepatic bile duct; gallbladder; other biliary; pancreas; retroperitoneum; peritoneum, omentum, and mesentery; other digestive); cancers of the respiratory system (nasal cavity, middle ear, and sinuses; larynx; lung and bronchus; pleura; trachea, mediastinum, and other respiratory); cancers of the mesothelioma; bones and joints; and soft tissue, including heart; skin cancers, including melanomas and other non-epithelial skin cancers; Kaposi's sarcoma and breast cancer; cancer of the female genital system (cervix uteri; corpus uteri; uterus, nos; ovary; vagina; vulva; and other female genital); cancers of the male genital system (prostate gland; testis; penis; and other male genital); cancers of the urinary system (urinary bladder; kidney and renal pelvis; ureter; and other urinary); cancers of the eye and orbit; cancers of the brain and nervous system (brain; and other nervous system); cancers of the endocrine system (thyroid gland and other endocrine, including thymus); lymphomas (Hodgkin's disease and non-Hodgkin's lymphoma), multiple myeloma, and leukemias (lymphocytic leukemia; myeloid leukemia; monocytic leukemia; and other leukemias).

[0046] Other cancers, classified by histological type, that may be associated with the sequences of the invention include, but are not limited to, Neoplasm, malignant; Carcinoma, NOS; Carcinoma, undifferentiated, NOS; Giant and spindle cell carcinoma; Small cell carcinoma, NOS; Papillary carcinoma, NOS; Squamous cell carcinoma, NOS; Lymphoepithelial carcinoma; Basal cell carcinoma, NOS; Pilomatrix carcinoma; Transitional cell carcinoma, NOS; Papillary transitional cell carcinoma; Adenocarcinoma, NOS; Gastrinoma, malignant; Cholangiocarcinoma; Hepatocellular carcinoma, NOS; Combined hepatocellular carcinoma and cholangiocarcinoma; Trabecular adenocarcinoma; Adenoid cystic carcinoma; Adenocarcinoma in adenomatous polyp; Adenocarcinoma, familial polyposis coli; Solid carcinoma, NOS; Carcinoid tumor, malignant; Bronchiolo-alveolar adenocarcinoma; Papillary adenocarcinoma, NOS; Chromophobe carcinoma; Acidophil carcinoma; Oxyphilic adenocarcinoma; Basophil carcinoma; Clear cell adenocarcinoma, NOS; Granular cell carcinoma; Follicular adenocarcinoma, NOS; Papillary and follicular adenocarcinoma; Nonencapsulating sclerosing carcinoma; Adrenal cortical carcinoma; Endometroid carcinoma; Skin appendage carcinoma; Apocrine adenocarcinoma; Sebaceous adenocarcinoma; Ceruminous adenocarcinoma; Mucoepidermoid carcinoma; Cystadenocarcinoma, NOS; Papillary cystadenocarcinoma, NOS; Papillary serous cystadenocarcinoma; Mucinous cystadenocarcinoma, NOS; Mucinous adenocarcinoma; Signet ring cell carcinoma; Infiltrating duct carcinoma; Medullary carcinoma, NOS; Lobular carcinoma; Inflammatory carcinoma; Paget's disease, mammary; Acinar cell carcinoma; Adenosquamous carcinoma; Adenocarcinoma w/squamous metaplasia; Thymoma, malignant; Ovarian stromal tumor, malignant; Thecoma, malignant; Granulosa cell tumor, malignant; Androblastoma, malignant; Sertoli cell carcinoma; Leydig cell tumor, malignant; Lipid cell tumor, malignant; Paraganglioma, malignant; Extra-mammary paraganglioma, malignant; Pheochromocytoma; Glomangiosarcoma; Malignant melanoma, NOS; Amelanotic melanoma; Superficial spreading melanoma; Malig melanoma in giant pigmented nevus; Epithelioid cell melanoma; Blue nevus, malignant; Sarcoma, NOS; Fibrosarcoma, NOS; Fibrous histiocytoma, malignant; Myxosarcoma; Liposarcoma, NOS; Leiomyosarcoma, NOS; Rhabdomyosarcoma, NOS; Embryonal rhabdomyosarcoma; Alveolar rhabdomyosarcoma; Stromal sarcoma, NOS; Mixed tumor, malignant, NOS; Mullerian mixed tumor; Nephroblastoma; Hepatoblastoma; Carcinosarcoma, NOS; Mesenchymoma, malignant; Brenner tumor, malignant; Phyllodes tumor, malignant; Synovial sarcoma, NOS; Mesothelioma, malignant; Dysgerminoma; Embryonal carcinoma, NOS; Teratoma, malignant, NOS; Struma ovarii, malignant; Choriocarcinoma; Mesonephroma, malignant; Hemangiosarcoma; Hemangioendothelioma, malignant; Kaposi's sarcoma; Hemangiopericytoma, malignant; Lymphangiosarcoma; Osteosarcoma, NOS; Juxtacortical osteosarcoma; Chondrosarcoma, NOS; Chondroblastoma, malignant; Mesenchymal chondrosarcoma; Giant cell tumor of bone; Ewing's sarcoma; Odontogenic tumor, malignant; Ameloblastic odontosarcoma; Ameloblastoma, malignant; Ameloblastic fibrosarcoma; Pinealoma, malignant; Chordoma; Glioma, malignant; Ependymoma, NOS; Astrocytoma, NOS; Protoplasmic astrocytoma; Fibrillary astrocytoma; Astroblastoma; Glioblastoma, NOS; Oligodendroglioma, NOS; Oligodendroblastoma; Primitive neuroectodermal; Cerebellar sarcoma, NOS; Ganglioneuroblastoma; Neuroblastoma, NOS; Retinoblastoma, NOS; Olfactory neurogenic tumor; Meningioma, malignant; Neurofibrosarcoma; Neurilemmoma, malignant; Granular cell tumor, malignant; Malignant lymphoma, NOS; Hodgkin's disease, NOS; Hodgkin's; paragranuloma, NOS; Malignant lymphoma, small lymphocytic; Malignant lymphoma, large cell, diffuse; Malignant lymphoma, follicular, NOS; Mycosis fungoides; Other specified non-Hodgkin's lymphomas; Malignant histiocytosis; Multiple myeloma; Mast cell sarcoma; Immunoproliferative small intestinal disease; Leukemia, NOS; Lymphoid leukemia, NOS; Plasma cell leukemia; Erythroleukemia; Lymphosarcoma cell leukemia; Myeloid leukemia, NOS; Basophilic leukemia; Eosinophilic leukemia; Monocytic leukemia, NOS; Mast cell leukemia; Megakaryoblastic leukemia; Myeloid sarcoma; and Hairy cell leukemia.

[0047] In addition, the CA genes may be involved in other diseases such as, but not limited to, diseases associated with aging or neurodegeneration.

[0048] “Association” in this context means that the nucleotide or protein sequences are either differentially expressed, activated, inactivated or altered in cancers as compared to normal tissue. As outlined below, CA sequences include those that are up-regulated (i.e. expressed at a higher level), as well as those that are down-regulated (i.e. expressed at a lower level), in cancers. CA sequences also include sequences that have been altered (i.e., truncated sequences or sequences with substitutions, deletions or insertions, including point mutations) and show either the same expression profile or an altered profile. In a preferred embodiment, the CA sequences are from humans; however, as will be appreciated by those in the art, CA sequences from other organisms may be useful in animal models of disease and drug evaluation; thus, other CA sequences are provided, from vertebrates, including mammals, including rodents (rats, mice, hamsters, guinea pigs, etc.), primates, and farm animals (including sheep, goats, pigs, cows, horses, etc). In some cases, prokaryotic CA sequences may be useful. CA sequences from other organisms may be obtained using the techniques outlined below.

[0049] CA sequences include both nucleic acid and amino acid sequences. In a preferred embodiment, the CA sequences are recombinant nucleic acids. By the term “recombinant nucleic acid” herein is meant nucleic acid, originally formed in vitro, in general, by the manipulation of nucleic acid by polymerases and endonucleases, in a form not normally found in nature. Thus a recombinant nucleic acid is also an isolated nucleic acid, in a linear form, or cloned in a vector formed in vitro by ligating DNA molecules that are not normally joined, are both considered recombinant for the purposes of this invention. It is understood that once a recombinant nucleic acid is made and reintroduced into a host cell or organism, it will replicate using the in vivo cellular machinery of the host cell rather than in vitro manipulations; however, such nucleic acids, once produced recombinantly, although subsequently replicated in vivo, are still considered recombinant or isolated for the purposes of the invention. As used herein a “polynucleotide” or “nucleic acid” is a polymeric form of nucleotides of any length, either ribonucleotides or deoxyribonucleotides. This term refers only to the primary structure of the molecule. Thus, this term includes double- and single-stranded DNA and RNA. It also includes known types of modifications, for example, labels which are known in the art, methylation, “caps”, substitution of one or more of the naturally occurring nucleotides with an analog, intemucleotide modifications such as, for example, those with uncharged linkages (e.g., phosphorothioates, phosphorodithioates, etc.), those containing pendant moieties, such as, for example proteins (including e.g., nucleases, toxins, antibodies, signal peptides, poly-L-lysine, etc.),those with intercalators (e.g., acridine, psoralen, etc.), those containing chelators (e.g., metals, radioactive metals, etc.), those containing alkylators, those with modified linkages (e.g., alpha anomeric nucleic acids, etc.), as well as unmodified forms of the polynucleotide.

[0050] As used herein, a polynucleotide “derived from” a designated sequence refers to a polynucleotide sequence which is comprised of a sequence of approximately at least about 6 nucleotides, preferably at least about 8 nucleotides, more preferably at least about 10-12 nucleotides, and even more preferably at least about 15-20 nucleotides corresponding to a region of the designated nucleotide sequence. “Corresponding” means homologous to or complementary to the designated sequence. Preferably, the sequence of the region from which the polynucleotide is derived is homologous to or complementary to a sequence that is unique to a CA gene.

[0051] Similarly, a “recombinant protein” is a protein made using recombinant techniques, i.e. through the expression of a recombinant nucleic acid as depicted above. A recombinant protein is distinguished from naturally occurring protein by at least one or more characteristics. For example, the protein may be isolated or purified away from some or all of the proteins and compounds with which it is normally associated in its wild type host, and thus may be substantially pure. For example, an isolated protein is unaccompanied by at least some of the material with which it is normally associated in its natural state, preferably constituting at least about 0.5%, more preferably at least about 5% by weight of the total protein in a given sample. A substantially pure protein comprises about 50-75% by weight of the total protein, with about 80% being preferred, and about 90% being particularly preferred. The definition includes the production of a CA protein from one organism in a different organism or host cell. Alternatively, the protein may be made at a significantly higher concentration than is normally seen, through the use of an inducible promoter or high expression promoter, such that the protein is made at increased concentration levels. Alternatively, the protein may be in a form not normally found in nature, as in the addition of an epitope tag or amino acid substitutions, insertions and deletions, as discussed below.

[0052] In a preferred embodiment, the CA sequences are nucleic acids. As will be appreciated by those in the art and is more fully outlined below, CA sequences are useful in a variety of applications, including diagnostic applications, which will detect naturally occurring nucleic acids, as well as screening applications; for example, biochips comprising nucleic acid probes to the CA sequences can be generated. In the broadest sense, use of “nucleic acid,” “polynucleotide” or “oligonucleotide” or equivalents herein means at least two nucleotides covalently linked together. In some embodiments, an oligonucleotide is an oligomer of 6, 8, 10, 12, 20, 30 or up to 100 nucleotides. A “polynucleotide” or “oligonucleotide” may comprise DNA, RNA, PNA or a polymer of nucleotides linked by phosphodiester and/or any alternate bonds.

[0053] A nucleic acid of the present invention generally contains phosphodiester bonds, although in some cases, as outlined below (for example, in antisense applications or when a nucleic acid is a candidate drug agent), nucleic acid analogs may have alternate backbones, comprising, for example, phosphoramidate (Beaucage et al., Tetrahedron 49(10):1925 (1993) and references therein; Letsinger; J. Org. Chem. 35:3800 (1970); Sprinzl et al., Eur. J. Biochem. 81:579 (1977); Letsinger et al., Nucl. Acids Res. 14:3487 (1986); Sawai et al, Chem. Lett. 805 (1984), Letsinger et al., J. Am. Chem. Soc. 110:4470 (1988); and Pauwels et al., Chemica Scripta 26:141 91986)), phosphorothioate (Mag et al., Nucleic Acids Res. 19:1437 (1991); and U.S. Pat. No. 5,644,048), phosphorodithioate (Briu et al., J. Am. Chem. Soc. 111:2321 (1989), O-methylphosphoroamidite linkages (see Eckstein, Oligonucleotides and Analogues: A Practical Approach, Oxford University Press), and peptide nucleic acid backbones and linkages (see Egholm, J. Am. Chem. Soc. 114:1895 (1992); Meier et al., Chem. Int. Ed. Engl. 31:1008 (1992); Nielsen, Nature, 365:566 (1993); Carlsson et al., Nature 380:207 (1996), all of which are incorporated by reference). Other analog nucleic acids include those with positive backbones (Denpcy et al., Proc. Natl. Acad. Sci. USA 92:6097 (1995); non-ionic backbones (U.S. Pat. Nos. 5,386,023, 5,637,684, 5,602,240, 5,216,141 and 4,469,863; Kiedrowshi et al., Angew. Chem. Intl. Ed. English 30:423 (1991); Letsinger et al., J. Am. Chem. Soc. 110:4470 (1988); Letsinger et al., Nucleoside & Nucleotide 13:1597 (1994); Chapters 2 and 3, ASC Symposium Series 580, “Carbohydrate Modifications in Antisense Research”, Ed. Y. S. Sanghui and P. Dan Cook; Mesmaeker et al., Bioorganic & Medicinal Chem. Lett. 4:395 (1994); Jeffs et al., J. Biomolecular NMR 34:17 (1994); Tetrahedron Lett. 37:743 (1996)) and non-ribose backbones, including those described in U.S. Pat. Nos. 5,235,033 and 5,034,506, and Chapters 6 and 7, ASC Symposium Series 580, “Carbohydrate Modifications in Antisense Research”, Ed. Y. S. Sanghui and P. Dan Cook. Nucleic acids containing one or more carbocyclic sugars are also included within one definition of nucleic acids (see Jenkins et al., Chem. Soc. Rev. (1995) pp169-176). Several nucleic acid analogs are described in Rawls, C & E News Jun. 2, 1997 page 35. All of these references are hereby expressly incorporated by reference. These modifications of the ribose-phosphate backbone may be done for a variety of reasons, for example to increase the stability and half-life of such molecules in physiological environments for use in anti-sense applications or as probes on a biochip.

[0054] As will be appreciated by those in the art, all of these nucleic acid analogs may find use in the present invention. In addition, mixtures of naturally occurring nucleic acids and analogs can be made; alternatively, mixtures of different nucleic acid analogs, and mixtures of naturally occurring nucleic acids and analogs may be made.

[0055] The nucleic acids may be single stranded or double stranded, as specified, or contain portions of both double stranded or single stranded sequence. As will be appreciated by those in the art, the depiction of a single strand “Watson” also defines the sequence of the other strand “Crick”; thus the sequences described herein also includes the complement of the sequence. The nucleic acid may be DNA, both genomic and cDNA, RNA, or a hybrid, where the nucleic acid contains any combination of deoxyribo- and ribo-nucleotides, and any combination of bases, including uracil, adenine, thymine, cytosine, guanine, inosine, xanthine, hypoxanthine, isocytosine, isoguanine, etc. As used herein, the term “nucleoside” includes nucleotides and nucleoside and nucleotide analogs, and modified nucleosides such as amino modified nucleosides. In addition, “nucleoside” includes non-naturally occurring analog structures. Thus for example the individual units of a peptide nucleic acid, each containing a base, are referred to herein as a nucleoside.

[0056] As used herein, the term “tag,” “sequence tag” or “primer tag sequence” refers to an oligonucleotide with specific nucleic acid sequence that serves to identify a batch of polynucleotides bearing such tags therein. Polynucleotides from the same biological source are covalently tagged with a specific sequence tag so that in subsequent analysis the polynucleotide can be identified according to its source of origin. The sequence tags also serve as primers for nucleic acid amplification reactions.

[0057] A “microarray” is a linear or two-dimensional array of preferably discrete regions, each having a defined area, formed on the surface of a solid support. The density of the discrete regions on a microarray is determined by the total numbers of target polynucleotides to be detected on the surface of a single solid phase support, preferably at least about 50/cm², more preferably at least about 100/cm², even more preferably at least about 500/cm², and still more preferably at least about 1,000/cm². As used herein, a DNA microarray is an array of oligonucleotide primers placed on a chip or other surfaces used to amplify or clone target polynucleotides. Since the position of each particular group of primers in the array is known, the identities of the target polynucleotides can be determined based on their binding to a particular position in the microarray.

[0058] A “linker” is a synthetic oligodeoxyribonucleotide that contains a restriction site. A linker may be blunt end-ligated onto the ends of DNA fragments to create restriction sites that can be used in the subsequent cloning of the fragment into a vector molecule.

[0059] The term “label” refers to a composition capable of producing a detectable signal indicative of the presence of the target polynucleotide in an assay sample. Suitable labels include radioisotopes, nucleotide chromophores, enzymes, substrates, fluorescent molecules, chemiluminescent moieties, magnetic particles, bioluminescent moieties, and the like. As such, a label is any composition detectable by spectroscopic, photochemical, biochemical, immunochemical, electrical, optical, chemical, or any other appropriate means. The term “label” is used to refer to any chemical group or moiety having a detectable physical property or any compound capable of causing a chemical group or moiety to exhibit a detectable physical property, such as an enzyme that catalyzes conversion of a substrate into a detectable product. The term “label” also encompasses compounds that inhibit the expression of a particular physical property. The label may also be a compound that is a member of a binding pair, the other member of which bears a detectable physical property.

[0060] The term “support” refers to conventional supports such as beads, particles, dipsticks, fibers, filters, membranes, and silane or silicate supports such as glass slides.

[0061] The term “amplify” is used in the broad sense to mean creating an amplification product which may include, for example, additional target molecules, or target-like molecules or molecules complementary to the target molecule, which molecules are created by virtue of the presence of the target molecule in the sample. In the situation where the target is a nucleic acid, an amplification product can be made enzymatically with DNA or RNA polymerases or reverse transcriptases.

[0062] As used herein, a “biological sample” refers to a sample of tissue or fluid isolated from an individual, including but not limited to, for example, blood, plasma, serum, spinal fluid, lymph fluid, skin, respiratory, intestinal and genitourinary tracts, tears, saliva, milk, cells (including but not limited to blood cells), tumors, organs, and also samples of in vitro cell culture constituents.

[0063] The term “biological sources” as used herein refers to the sources from which the target polynucleotides are derived. The source can be of any form of “sample” as described above, including but not limited to, cell, tissue or fluid. “Different biological sources” can refer to different cells/tissues/organs of the same individual, or cells/tissues/organs from different individuals of the same species, or cells/tissues/organs from different species.

[0064] Cancer-Associated Sequences

[0065] The CA sequences of the invention were initially identified by infection of mice with a retrovirus such as murine leukemia virus (MLV) resulting in lymphoma. Retroviruses have a genome that is made out of RNA. After a retrovirus infects a host cell, a double stranded DNA copy of the retrovirus genome (a “provirus”) is inserted into the genomic DNA of the host cell. The integrated provirus may affect the expression of host genes at or near the site of integration—a phenomenon known as retroviral insertional mutagenesis. Possible changes in the expression of host cell genes include: (i) increased expression of genes near the site of integration resulting from the proximity of elements in the provirus that act as transcriptional promoters and enhancers, (ii) functional inactivation of a gene caused by the integration of a provirus into the gene itself thus preventing the synthesis of a functional gene product, or (iii) expression of a mutated protein that has a different activity to the normal protein. Typically such a protein would be prematurely truncated and lack a regulatory domain near the C terminus. Such a protein might be constitutively active, or act as a dominant negative inhibitor of the normal protein. For example, retrovirus enhancers, including that of SL3-3, are known to act on genes up to approximately 200 kilobases from the insertion site. Moreover, many of these sequences are also involved in other cancers and disease states. Sequences of mouse genes according to this invention, that are identified in this manner are shown as mDxx-yyy in Tables 1-18.

[0066] A CA sequence can be initially identified by substantial nucleic acid and/or amino acid sequence homology to the CA sequences outlined herein. Such homology can be based upon the overall nucleic acid or amino acid sequence, and is generally determined as outlined below, using either homology programs or hybridization conditions.

[0067] In one embodiment, CA sequences are those that are up-regulated in cancers; that is, the expression of these genes is higher in cancer tissue as compared to normal tissue of the same differentiation stage. “Up-regulation” as used herein means increased expression by about 50%, preferably about 100%, more preferably about 150% to about 200%, with up-regulation from 300% to 1000% being preferred.

[0068] In another embodiment, CA sequences are those that are down-regulated in cancers; that is, the expression of these genes is lower in cancer tissue as compared to normal tissue of the same differentiation stage. “Down-regulation” as used herein means decreased expression by about 50%, preferably about 100%, more preferably about 150% to about 200%, with down-regulation from 300% to 1000% to no expression being preferred.

[0069] In yet another embodiment, CA sequences are those that have altered sequences; but show either the same or an altered expression profile as compared to normial lymphoid tissue of the same differentiation stage. “Altered CA sequences” as used herein also refers to sequences that are truncated, contain insertions or contain point mutations.

[0070] CA proteins of the present invention may be classified as secreted proteins, transmembrane proteins or intracellular proteins. In a preferred embodiment the CA protein is an intracellular protein. Intracellular proteins may be found in the cytoplasm and/or in the nucleus. Intracellular proteins are involved in all aspects of cellular function and replication (including, for example, signaling pathways); aberrant expression of such proteins results in unregulated or disregulated cellular processes. For example, many intracellular proteins have enzymatic activity such as protein kinase activity, protein phosphatase activity, protease activity, nucleotide cyclase activity, polymerase activity and the like. Intracellular proteins also serve as docking proteins that are involved in organizing complexes of proteins, or targeting proteins to various subcellular localizations, and are involved in maintaining the structural integrity of organelles.

[0071] An increasingly appreciated concept in characterizing intracellular proteins is the presence in the proteins of one or more motifs for which defined functions have been attributed. In addition to the highly conserved sequences found in the enzymatic domain of proteins, highly conserved sequences have been identified in proteins that are involved in protein-protein interaction. For example, Src-homology-2 (SH2) domains bind tyrosine-phosphorylated targets in a sequence dependent manner. PTB domains, which are distinct from SH2 domains, also bind tyrosine phosphorylated targets. SH3 domains bind to proline-rich targets. In addition, PH domains, tetratricopeptide repeats and WD domains to name only a few, have been shown to mediate protein-protein interactions. Some of these may also be involved in binding to phospholipids or other second messengers. As will be appreciated by one of ordinary skill in the art, these motifs can be identified on the basis of primary sequence; thus, an analysis of the sequence of proteins may provide insight into both the enzymatic potential of the molecule and/or molecules with which the protein may associate.

[0072] In a preferred embodiment, the CA sequences are transmembrane proteins. Transmembrane proteins are molecules that span the phospholipid bilayer of a cell. They may have an intracellular domain, an extracellular domain, or both. The intracellular domains of such proteins may have a number of functions including those already described for intracellular proteins. For example, the intracellular domain may have enzymatic activity and/or may serve as a binding site for additional proteins. Frequently the intracellular domain of transmembrane proteins serves both roles. For example certain receptor tyrosine kinases have both protein kinase activity and SH2 domains. In addition, autophosphorylation of tyrosines on the receptor molecule itself creates binding sites for additional SH2 domain containing proteins.

[0073] Transmembrane proteins may contain from one to many transmembrane domains. For example, receptor tyrosine kinases, certain cytokine receptors, receptor guanylyl cyclases and receptor serine/threonine protein kinases contain a single transmembrane domain. However, various other proteins including channels and adenylyl cyclases contain numerous transmembrane domains. Many important cell surface receptors are classified as “seven transmembrane domain” proteins, as they contain 7 membrane spanning regions. Important transmembrane protein receptors include, but are not limited to insulin receptor, insulin-like growth factor receptor, human growth hormone receptor, glucose transporters, transferrin receptor, epidermal growth factor receptor, low density lipoprotein receptor, leptin receptor, interleukin receptors, e.g. IL-1 receptor, IL-2 receptor, etc. CA proteins may be derived from genes that regulate apoptosis (IL-3, GM-CSF and Bcl-x) or are shown to have a role in the regulation of apoptosis.

[0074] Characteristics of transmembrane domains include approximately 20 consecutive hydrophobic amino acids that may be followed by charged amino acids. Therefore, upon analysis of the amino acid sequence of a particular protein, the localization and number of transmembrane domains within the protein may be predicted.

[0075] The extracellular domains of transmembrane proteins are diverse; however, conserved motifs are found repeatedly among various extracellular domains. Conserved structure and/or functions have been ascribed to different extracellular motifs. For example, cytokine receptors are characterized by a cluster of cysteines and a WSXWS (W=tryptophan, S=serine, X=any amino acid) motif. Immunoglobulin-like domains are highly conserved. Mucin-like domains may be involved.in cell adhesion and leucine-rich repeats participate in protein-protein interactions.

[0076] Many extracellular domains are involved in binding to other molecules. In one aspect, extracellular domains are receptors. Factors that bind the receptor domain include circulating ligands, which may be peptides, proteins, or small molecules such as adenosine and the like. For example, growth factors such as EGF, FGF and PDGF are circulating growth factors that bind to their cognate receptors to initiate a variety of cellular responses. Other factors include cytokines, mitogenic factors, neurotrophic factors and the like. Extracellular domains also bind to cell-associated molecules. In this respect, they mediate cell-cell interactions. Cell-associated ligands can be tethered to the cell for example via a glycosylphosphatidylinositol (GPI) anchor, or may themselves be transmembrane proteins. Extracellular domains also associate with the extracellular matrix and contribute to the maintenance of the cell structure.

[0077] CA proteins that are transmembrane are particularly preferred in the present invention as they are good targets for immunotherapeutics, as are described herein. In addition, as outlined below, transmembranc proteins can be also useful in imaging modalities.

[0078] It will also be appreciated by those in the art that a transmembrane protein can be made soluble by removing transmembrane sequences, for example through recombinant methods. Furthermore, transmembrane proteins that have been made soluble can be made to be secreted through recombinant means by adding an appropriate signal sequence.

[0079] In a preferred embodiment, the CA proteins are secreted proteins; the secretion of which can be either constitutive or regulated. These proteins have a signal peptide or signal sequence that targets the molecule to the secretory pathway. Secreted proteins are involved in numerous physiological events; by virtue of their circulating nature, they serve to transmit signals to various other cell types. The secreted protein may function in an autocrine manner (acting on the cell that secreted the factor), a paracrine manner (acting on cells in close proximity to the cell that secreted the factor) or an endocrine manner (acting on cells at a distance). Thus secreted molecules find use in modulating or altering numerous aspects of physiology. CA proteins that are secreted proteins are particularly preferred in the present invention as they serve as good targets for diagnostic markers, for example for blood tests.

[0080] CA Sequences and Homologs

[0081] A CA sequence is initially identified by substantial nucleic acid andlor amino acid sequence homology to the CA sequences outlined herein. Such homology can be based upon the overall nucleic acid or amino acid sequence, and is generally determined as outlined below, using either homology programs or hybridization conditions.

[0082] As used herein, a nucleic acid is a “CA nucleic acid” if the overall homology of the nucleic acid sequence to one of the nucleic acids of Tables 1-18 is preferably greater than about 75%, more preferably greater than about 80%, even more preferably greater than about 85% and most preferably greater than 90%. In some embodiments the homology will be as high as about 93 to 95 or 98%. In a preferred embodiment, the sequences that are used to determine sequence identity or similarity are selected front those of the nucleic acids of Tables 1-18. In another embodiment, the sequences are naturally occurring allelic variants of the sequences of the nucleic acids of Tables 1-18. In another embodiment, the sequences are sequence variants as further described herein.

[0083] Homology in this context means sequence similarity or identity, with identity being preferred. A preferred comparison for homology purposes is to compare the sequence containing sequencing errors to the correct sequence. This homology will be determined using standard techniques known in the art, including, but not limited to, the local homology algorithm of Smith & Waterman, Adv. Appl. Math. 2:482 (1981), by the homology alignment algorithm of Needleman & Wunsch, J. Mol. Biol. 48:443 (1970), by the search for similarity method of Pearson & Lipman, PNAS USA 85:2444 (1988), by computerized implementations of these algorithms (GAP, BESTFIT, FASTA, and TFASTA in the Wisconsin Genetics Software Package, Genetics Computer Group, 575 Science Drive, Madison, Wis.), the Best Fit sequence program described by Devereux et al., Nucl. Acid Res. 12:387-395 (1984), preferably using the default settings, or by inspection.

[0084] One example of a useful algorithm is PILEUP. PILEUP creates a multiple sequence alignment from a group of related sequences using progressive, pairwise alignments. It can also plot a tree showing the clustering relationships used to create the alignment. PILEUP uses a simplification of the progressive alignment method of Feng & Doolittle, J. Mol. Evol. 35:351-360 (1987); the method is similar to that described by Higgins & Sharp CABIOS 5:151-153 (1989). Useful PILEUP parameters include a default gap weight of 3.00, a default gap length weight of 0.10, and weighted end gaps.

[0085] Another example of a useful algorithm is the BLAST (Basic Local Alignment Search Tool) algorithm, described in Altschul et al., J. Mol. Biol. 215, 403-410, (1990) and Karlin et al., PNAS USA 90:5873-5787 (1993). A particularly useful BLAST program is the WU-BLAST-2 program which was obtained from Altschul et al., Methods in Enzymology, 266: 460-480 (1996); http://blast.wustl.[edu/]. WU-BLAST-2 uses several search parameters, most of which are set to the default values. The adjustable parameters are set with the following values: overlap span=1, overlap fraction=0.125, word threshold (T)=11. The HSP S and HSP S2 parameters are dynamic values and are established by the program itself depending upon the composition of the particular sequence and composition of the particular database against which the sequence of interest is being searched; however, the values may be adjusted to increase sensitivity. A percent amino acid sequence identity value is determined by the number of matching identical residues divided by the total number of residues of the “longer” sequence in the aligned region. The “longer” sequence is the one having the most actual residues in the aligned region (gaps introduced by WU-Blast-2 to maximize the alignment score are ignored).

[0086] Thus, “percent (%) nucleic acid sequence identity” is defined as the percentage of nucleotide residues in a candidate sequence that are identical with the nucleotide residues of the nucleic acids of Tables 1-18. A preferred method utilizes the BLASTN module of WU-BLAST-2 set to the default parameters, with overlap span and overlap fraction set to 1 and 0.125, respectively.

[0087] The alignment may include the introduction of gaps in the sequences to be aligned. In addition, for sequences which contain either more or fewer nucleotides than those of the nucleic acids of Tables 1-18, it is understood that the percentage of homology will be determined based on the number of homologous nucleosides in relation to the total number of nucleosides. Thus homology of sequences shorter than those of the sequences identified herein will be determined using the number of nucleosides in the shorter sequence.

[0088] In another embodiment of the invention, polynucleotide compositions are provided that are capable of hybridizing under moderate to high stringency conditions to a polynucleotide sequence provided herein, or a fragment thereof, or a complementary sequence thereof. Hybridization techniques are well known in the art of molecular biology. For purposes of illustration, suitable moderately stringent conditions for testing the hybridization of a polynucleotide of this invention with other polynucleotides include prewashing in a solution of 5×SSC (“saline sodium citrate”; 9 mM NaCI, 0.9 mM sodium citrate), 0.5% SDS, 1.0 mM EDTA (pH 8.0); hybridizing at 50-60° C., 5×SSC, overnight; followed by washing twice at 65° C. for 20 minutes with each of 2×, 0.5× and 0.2×SSC containing 0.1% SDS. One skilled in the art will understand that the stringency of hybridization can be readily manipulated, such as by altering the salt content of the hybridization solution and/or the temperature at which the hybridization is performed. For example, in another embodiment, suitable highly stringent hybridization conditions include those described above, with the exception that the temperature of hybridization is increased, e.g., to 60-65° C., or 65-70° C. Stringent conditions may also be achieved with the addition of destabilizing agents such as formamide.

[0089] Thus nucleic acids that hybridize under high stringency to the nucleic acids identified in the figures, or their complements, are considered CA sequences. High stringency conditions are known in the art; see for example Maniatis et al., Molecular Cloning: A Laboratory Manual, 2d Edition, 1989, and Short Protocols in Molecular Biology, ed. Ausubel, et al., both of which are hereby incorporated by reference. Stringent conditions are sequence-dependent and will be different in different circumstances. Longer sequences hybridize specifically at higher temperatures. An extensive guide to the hybridization of nucleic acids is found in Tijssen, Techniques in Biochemistry and Molecular Biology—Hybridization with Nucleic Acid Probes, “Overview of principles of hybridization and the strategy of nucleic acid assays” (1993). Generally, stringent conditions are selected to be about 5-10° C. lower than the thermal melting point (Tₘ) for the specific sequence at a defined ionic strength pH. The Tₘ is the temperature (under defined ionic strength, pH and nucleic acid concentration) at which 50% of the probes complementary to the target hybridize to the target sequence at equilibrium (as the target sequences are present in excess, at Tₘ, 50% of the probes are occupied at equilibrium). Stringent conditions will be those in which the salt concentration is less than about 1.0 M sodium ion, typically about 0.01 to 1.0 M sodium ion concentration (or other salts) at pH 7.0 to 8.3 and the temperature is at least about 30° C. for short probes (e.g. 10 to 50 nucleotides) and at least about 60° C. for longer probes (e.g. greater than 50 nucleotides). In another embodiment, less stringent hybridization conditions are used; for example, moderate or low stringency conditions may be used, as are known in the art; see Maniatis and Ausubel, supra, and Tijssen, supra.

[0090] In addition, the CA nucleic acid sequences of the invention are fragments of larger genes, i.e. they are nucleic acid segments. Alternatively, the CA nucleic acid sequences can serve as indicators of oncogene position, for example, the CA sequence may be an enhancer that activates a protooncogene. “Genes” in this context includes coding regions, non-coding regions, and mixtures of coding and non-coding regions. Accordingly, as will be appreciated by those in the art, using the sequences provided herein, additional sequences of the CA genes can be obtained, using techniques well known in the art for cloning either longer sequences or the full-length sequences; see Maniatis et al., and Ausubel, et al., supra, hereby expressly incorporated by reference. In general, this is done using PCR, for example, kinetic PCR.

[0091] Detection of CA Expression

[0092] Once the CA nucleic acid is identified, it can be cloned and, if necessary, its constituent parts recombined to form the entire CA nucleic acid. Once isolated from its natural source, e.g., contained within a plasmid or other vector or excised therefrom as a linear nucleic acid segment, the recombinant CA nucleic acid can be further used as a probe to identify and isolate other CA nucleic acids, for example additional coding regions. It can also be used as a “precursor” nucleic acid to make modified or variant CA nucleic acids and proteins. In a preferred embodiment, once a CA gene is identified its nucleotide sequence is used to design probes specific for the CA gene.

[0093] The CA nucleic acids of the present invention are used in several ways. In a first embodiment, nucleic acid probes hybridizable to CA nucleic acids are made and attached to biochips to be used in screening and diagnostic methods, or for gene therapy and/or antisense applications. Alternatively, the CA nucleic acids that include coding regions of CA proteins can be put into expression vectors for the expression of CA proteins, again either for screening purposes or for administration to a patient.

[0094] Recent developments in DNA microarray technology make it possible to conduct a large scale assay of a plurality of target CA nucleic acid molecules on a single solid phase support. U.S. Pat. No. 5,837,832 (Chee et al.) and related patent applications describe immobilizing an array of oligonucleotide probes for hybridization and detection of specific nucleic acid sequences in a sample. Target polynucleotides of interest isolated from a tissue of interest are hybridized to the DNA chip and the specific sequences detected based on the target polynucleotides' preference and degree of hybridization at discrete probe locations. One important use of arrays is in the analysis of differential gene expression, where the profile of expression of genes in different cells, often a cell of interest and a control cell, is compared and any differences in gene expression among the respective cells are identified. Such information is useful for the identification of the types of genes expressed in a particular. cell or tissue type and diagnosis of cancer conditions based on the. expression profile.

[0095] Typically, RNA from the sample of interest is subjected to reverse transcription to obtain labeled cDNA. See U.S. Pat. No. 6,410,229 (Lockhart et al.) The cDNA is then hybridized to oligonucleotides or cDNAs of known sequence arrayed on a chip or other surface in a known order. The location of the oligonucleotide to which the labeled cDNA hybridizes provides sequence information on the cDNA, while the amount of labeled hybridized RNA or cDNA provides an estimate of the relative representation of the RNA or cDNA of interest. See Schena, et al Science 270:467-470 (1995). For example, use of a cDNA microarray to analyze gene expression patterns in human cancer is described by DeRisi, et al. (Nature Genetics 14:457-460 (1996)).

[0096] In a preferred embodiment, nucleic acid probes corresponding to CA nucleic acids (both the nucleic acid sequences outlined in the figures and/or the complements thereof) are made. Typically, these probes are synthesized based on the disclosed sequences of this invention. The nucleic acid probes attached to the biochip are designed to be substantially complementary to the CA nucleic acids, i.e. the target sequence (either the target sequence of the sample or to other probe sequences, for example in sandwich assays), such that specific hybridization of the target sequence and the probes of the present invention occurs. As outlined below, this complementarity need not be perfect, in that there may be any number of base pair mismatches that will interfere with hybridization between the target sequence and the single stranded nucleic acids of the present invention. It is expected that the overall homology of the genes at the nucleotide level probably will be about 40% or greater, probably about 60% or greater, and even more probably about 80% or greater; and in addition that there will be corresponding contiguous sequences of about 8-12 nucleotides or longer. However, if the number of mutations is so great that no hybridization can occur under even the least stringent of hybridization conditions, the sequence is not a complementary target sequence. Thus, by “substantially complementary” herein is meant that the probes are sufficiently complementary to the target sequences to hybridize under normal reaction conditions, particularly high stringency conditions, as outlined herein. Whether or not a sequence is; unique to a CA gene according to this invention can be determined by techniques known to those of skill in the art. For example, the sequence can be compared to sequences in databanks, e.g., GeneBank, to determine whether it is present in the uninfected host or other organisms. The sequence can also be compared to the known sequences of other viral agents, including those that are known to induce cancer.

[0097] A nucleic acid probe is generally single stranded but can be partly single and partly double stranded. The strandedness of the probe is dictated by the structure, composition, and properties of the target sequence. In general, the oligonucleotide probes range from about 6, 8, 10, 12, 15, 20, 30 to about 100 bases long, with from about 10 to about 80 bases being preferred, and from about 30 to about 50 bases being particularly preferred. That is, generally entire genes are rarely used as probes. In some embodiments, much longer nucleic acids can be used, up to hundreds of bases. The probes are sufficiently specific to hybridize to complementary template sequence under conditions known by those of skill in the art. The number of mismatches between the probes sequences and their complementary template (target) sequences to which they hybridize during hybridization generally do not exceed 15%, usually do not exceed 10% and preferably do not exceed 5%, as determined by FASTA (default settings).

[0098] Oligonucleotide probes can include the naturally-occurring heterocyclic bases normally found in nucleic acids (uracil, cytosine, thymine, adenine and guanine), as well as modified bases and base analogues. Any modified base or base analogue compatible with hybridization of the probe to a target sequence is useful in the practice of the invention. The sugar or glycoside portion of the probe can comprise deoxyribose, ribose, and/or modified fonns of these sugars, such as, for example, 2′-O-alkyl ribose. In a preferred embodiment, the sugar moiety is 2′-deoxyribose; however, any sugar moiety that is compatible with the ability of the probe to hybridize to a target sequence can be used.

[0099] In one embodiment, the nucleoside units of the probe are linked by a phosphodiester backbone, as is well known in the art. In additional embodiments, intemucleotide linkages can include any linkage known to one of skill in the art that is compatible with specific hybridization of the probe including, but not limited to phosphorothioate, methylphosphonate, sulfamate (e.g., U.S. Pat. No. 5,470,967) and polyamide (i.e., peptide nucleic acids). Peptide nucleic acids are described in Nielsen et al. (1991) Science 254: 1497-1500, U.S. Pat. No. 5,714,331, and Nielsen (1999) Curr. Opin. Biotechnol. 10:71-75.

[0100] In certain embodiments, the probe can be a chimeric molecule; i.e., can comprise more than one type of base or sugar subunit, and/or the linkages can be of more than one type within the same primer. The probe can comprise a moiety to facilitate hybridization to its target sequence, as are known in the art, for example, intercalators and/or minor groove binders. Variations of the bases, sugars, and intemucleoside backbone, as well as the presence of any pendant group on the probe, will be compatible with the ability of the probe to bind, in a sequence-specific fashion, with its target sequence. A large number of structural modifications, both known and to be developed, are possible within these bounds. Advantageously, the probes according to the present invention may have structural characteristics such that they allow the signal amplification, such structural characteristics being, for example, branched DNA probes as those described by Urdea et al. (Nucleic Acids Symp. Ser., 24:197-200 (1991)) or in the European Patent No. EP-0225,807. Moreover, synthetic methods for preparing the various heterocyclic bases, sugars, nucleosides and nucleotides that form the probe, and preparation of oligonucleotides of specific predetermined sequence, are well-developed and known in the art. A preferred method for oligonucleotide synthesis incorporates the teaching of U.S. Pat. No. 5,419,966.

[0101] Multiple probes may be designed for a particular target nucleic acid to account for polymorphism and/or secondary structure in the target nucleic acid, redundancy of data and the like. In some embodiments, where more than one probe per sequence is used, either overlapping probes or probes to different sections of a single target CA gene are used. That is, two, three, four or more probes, with three being preferred, are used to build in a redundancy for a particular target. The probes can be overlapping (i.e. have some sequence in common), or specific for distinct sequences of a CA gene. When multiple target polynucleotides are to be detected according to the present invention, each probe or probe group corresponding to a particular target polynucleotide is situated in a discrete area of the microarray.

[0102] Probes may be in solution, such as in wells or on the surface of a micro-array, or attached to a solid support. Examples of solid support materials that can be used include a plastic, a ceramic, a metal, a resin; a gel and a membrane. Useful types of solid supports include plates, beads, magnetic material, microbeads, hybridization chips, membranes, crystals, ceramics and self-assembling monolayers. A preferred embodiment comprises a two-dimensional or three-dimensional matrix, such as a gel or hybridization chip with multiple probe binding sites (Pevzner et al., J. Biomol. Struc. & Dyn. 9:399-410, 1991; Maskos and Southern, Nuc. Acids Res. 20:1679-84, 1992). Hybridization chips can be used to construct very large probe arrays that are subsequently hybridized with a target nucleic acid. Analysis of the hybridization pattern of the chip can assist in the identification of the target nucleotide sequence. Patterns can be manually or computer analyzed, but it is clear that positional sequencing by hybridization lends itself to computer analysis and automation. Algorithms and software, which have been developed for sequence reconstruction, are applicable to the methods described herein (R. Drmanac et al., J. Biomol. Struc. & Dyn. 5:1085-1102, 1991; P. A. Pevzner, J. Biomol. Struc. & Dyn. 7:63-73, 1989).

[0103] As will be appreciated by those in the art, nucleic acids can be attached or immobilized to a solid support in a wide variety of ways. By “immobilized” herein is meant the association or binding between the nucleic acid probe and the solid support is sufficient to be stable under the conditions of binding, washing, analysis, and removal as outlined below. The binding can be covalent or non-covalent. By “non-covalent binding” and grammatical equivalents herein is meant one or more of either electrostatic, hydrophilic, and hydrophobic interactions. Included in non-covalent binding is the covalent attachment of a molecule, such as streptavidin, to the support and the non-covalent binding of the biotinylated probe to the streptavidin. By “covalent binding” and grammatical equivalents herein is meant that the two moieties, the solid support and the probe, are attached by at least one bond, including sigma bonds, pi bonds and coordination bonds. Covalent bonds can be formed directly between the probe and the solid support or can be formed by a cross linker or by inclusion of a specific reactive group on either the solid support or the probe or both molecules. Immobilization may also involve a combination of covalent and non-covalent interactions.

[0104] Nucleic acid probes may be attached to the solid support by covalent binding such as by conjugation with a coupling agent or by, covalent or non-covalent binding such as electrostatic interactions, hydrogen bonds or antibody-antigen coupling, or by combinations thereof. Typical coupling agents include biotin/avidin, biotin/streptavidin, Staphylococcus aureus protein A/IgG antibody F_{c} fragment, and streptavidin/protein A chimeras (T. Sano and C. R. Cantor, Bio/Technology 9:1378-81 (1991)), or derivatives or combinations of these agents. Nucleic acids may be attached to the solid support by a photocleavable bond, an electrostatic bond, a disulfide bond, a peptide bond, a diester bond or a combination of these sorts of bonds. The array may also be attached to the solid support by a selectively releasable bond such as 4,4′-dimethoxytrityl or its derivative. Derivatives which have been found to be useful include 3 or 4 [bis-(4-methoxyphenyl)]-methyl-benzoic acid, N-succinimidyl-3 or 4 [bis-(4-methoxyphenyl)]-methyl-benzoic acid, N-succinimidyl-3 or 4 [bis-(4-methoxyphenyl)]-hydroxymethyl-benzoic acid, N-succinimidyl-3 or 4 [bis-(4-methoxyphenyl)]-chloromethyl-benzoic acid, and salts of these acids.

[0105] In general, the probes are attached to the biochip in a wide variety of ways, as will be appreciated by those in the art. As described herein, the nucleic acids can either be synthesized first, with subsequent attachment to the biochip, or can be directly synthesized on the biochip.

[0106] The biochip comprises a suitable solid substrate. By “substrate” or “solid support” or other grammatical equivalents herein is meant any material that can be modified to contain discrete individual sites appropriate for the attachment or association of the nucleic acid probes and is amenable to at least one detection method. The solid phase support of the present invention can be of any solid materials and structures suitable for supporting nucleotide hybridization and synthesis. Preferably, the solid phase support comprises at least one substantially rigid surface on which the primers can be immobilized and the reverse transcriptase reaction performed. The substrates with which the polynucleotide microarray elements are stably associated may be fabricated from a variety of materials, including plastics, ceramics, metals, acrylamide, cellulose, nitrocellulose, glass, polystyrene, polyethylene vinyl acetate, polypropylene, polymethacrylate, polyethylene, polyethylene oxide, polysilicates, polycarbonates, Teflon®, fluorocarbons, nylon, silicon rubber, polyanhydrides, polyglycolic acid, polylactic acid, polyorthoesters, polypropylfumerate, collagen, glycosaminoglycans, and polyamino acids. Substrates may be two-dimensional or three-dimensional in form, such as gels, membranes, thin films, glasses, plates, cylinders, beads, magnetic beads, optical fibers, woven fibers, etc. A preferred form of array is a three-dimensional array. A preferred three-dimensional array is a collection of tagged beads. Each tagged bead has different primers attached to it. Tags are detectable by signaling means such as color (Luminex, Illumina) and electromagnetic field (Pharmaseq) and signals on tagged beads can even be remotely detected (e.g., using optical fibers). The size of the solid support can be any of the standard microarray sizes, useful for DNA microarray technology, and the size may be tailored to fit the particular machine being used to conduct a reaction of the invention. In general, the substrates allow optical detection and do not appreciably fluoresce.

[0107] In a preferred embodiment, the surface of the biochip and the probe may be derivatized with chemical functional groups for subsequent attachment of the two. Thus, for example, the biochip is derivatized with a chemical functional group including, but not limited to, amino groups, carboxy groups, oxo groups and thiol groups, with amino groups being particularly preferred. Using these functional groups, the probes can be attached using functional groups on the probes. For example, nucleic acids containing amino groups can be attached to surfaces comprising amino groups, for example using linkers as are known in the art; for example, homo- or hetero-bifunctional linkers as are well known (see 1994 Pierce Chemical Company catalog, technical section on cross-linkers, pages 155-200, incorporated herein by reference). In addition, in some cases, additional linkers, such as alkyl groups (including substituted and heteroalkyl groups) may be used.

[0108] In this embodiment, the oligonucleotides are synthesized as is known in the art, and then attached to the surface of the solid support. As will be appreciated by those skilled in the art, either the 5′ or 3′ terminus may be attached to the solid support, or attachment may be via an internal nucleoside. In an additional embodiment, the immobilization to the solid support may be very strong, yet non-covalent. For example, biotinylated oligonucleotides can be made, which bind to surfaces covalently coated with streptavidin, resulting in attachment.

[0109] The arrays may be produced according to any convenient methodology, such as preforming the polynucleotide microarray elements and then stably associating them with the surface. Alternatively, the oligonucleotides may be synthesized on the surface, as is known in the art. A number of different array configurations and methods for their production are known to those of skill in the art and disclosed in WO 95/25116 and WO 95/35505 (photolithographic techniques), U.S. Pat. No. 5,445,934 (in situ synthesis by photolithography), U.S. Pat. No. 5,384,261 (in situ synthesis by mechanically directed flow paths); and U.S. Pat. No. 5,700,637 (synthesis by spotting, printing or coupling); the disclosure of which are herein incorporated in their entirety by reference. Another method for coupling DNA to beads uses specific ligands attached to the end of the DNA to link to ligand-binding molecules attached to a bead. Possible ligand-binding partner pairs include biotin-avidin/streptavidin, or various antibody/antigen pairs such as digoxygenin-antidigoxygenin antibody (Smith et al., “Direct Mechanical Measurements of the Elasticity of Single DNA Molecules by Using Magnetic Beads,” Science 258:1122-1126 (1992)). Covalent chemical attachment of DNA to the support can be accomplished by using standard coupling agents to link the 5′-phosphate on the DNA to coated microspheres through a phosphoamidate bond. Methods for immobilization of oligonucleotides to solid-state substrates are well established. See Pease et al., Proc. Natl. Acad. Sci. USA 91(11):5022-5026 (1994). A preferred method of attaching oligonucleotides to solid-state substrates is described by Guo et al., Nucleic Acids Res. 22:5456-5465 (1994). Immobilization can be accomplished either by in situ DNA synthesis (Maskos and Southern, Nucleic Acids Research, 20:1679-1684 (1992) or by covalent attachment of chemically synthesized oligonucleotides (Guo et al., supra) in combination with robotic arraying technologies.

[0110] In addition to the solid-phase technology represented by biochip arrays, gene expression can also be quantified using liquid-phase arrays. One such system is kinetic polymerase chain reaction (PCR). Kinetic PCR allows for the simultaneous amplification and quantification of specific nucleic acid sequences. The specificity is derived from synthetic oligonucleotide primers designed to preferentially adhere to single-stranded nucleic acid sequences bracketing the target site. This pair of oligonucleotide primers form specific, non-covalently bound complexes on each strand of the target sequence. These complexes facilitate in vitro transcription of double-stranded DNA in opposite orientations. Temperature cycling of the reaction mixture creates a continuous cycle of primer binding, transcription, and re-melting of the nucleic acid to individual strands. The result is an exponential increase of the target dsDNA product. This product can be quantified in real time either through the use of an intercalating dye or a sequence specific probe. SYBR® Greene I, is an example of an intercalating dye, that preferentially binds to dsDNA resulting in a concomitant increase in the fluorescent signal. Sequence specific probes, such as used with TaqMan® technology, consist of a fluorochrome and a quenching molecule covalently bound to opposite ends of an oligonucleotide. The probe is designed to selectively bind the target DNA sequence between the two primers. When the DNA strands are synthesized during the PCR reaction, the fluorochrome is cleaved from the probe by the exonuclease activity of the polymerase resulting in signal dequenching. The probe signaling method can be more specific than the intercalating dye method, but in each case, signal strength is proportional to the dsDNA product produced. Each type of quantification method can be used in multi-well liquid phase arrays with each well representing primers and/or probes specific to nucleic acid sequences of interest. When used with messenger RNA preparations of tissues or cell lines, an array of probe/primer reactions can simultaneously quantify the expression of multiple gene products of interest. See Gerner, S., et al., Genome Res. 10:258-266 (2000); Heid, C. A., et al., Genome Res. 6, 986-994 (1996).

[0111] Expression of CA Proteins

[0112] In a preferred embodiment, CA nucleic acids encoding CA proteins are used to make a variety of expression vectors to express CA proteins which can then be used in screening assays, as described below. The expression vectors may be either self-replicating extrachromosomal vectors or vectors which integrate into a host genome. Generally, these expression vectors include transcriptional and translational regulatory nucleic acid operably linked to the nucleic acid encoding the CA protein. The term “control sequences” refers to DNA sequences necessary for the expression of an operably linked coding sequence in a particular host organism. The control sequences that are suitable for prokaryotes, for example, include a promoter, optionally an operator sequence, and a ribosome binding site. Eukaryotic cells are known to utilize promoters, polyadenylation signals, and enhancers.

[0113] Nucleic acid is “operably linked” when it is placed into a functional relationship with another nucleic acid sequence. For example, DNA for a presequence or secretory leader is operably linked to DNA for a polypeptide if it is expressed as a preprotein that participates in the secretion of the polypeptide; a promoter or enhancer is operably linked to a coding sequence if it affects the transcription of the sequence; or a ribosome binding site is operably linked to a coding sequence if it is positioned so as to facilitate translation. Generally, “operably linked” means that the DNA sequences being linked are contiguous, and, in the case of a secretory leader, contiguous and in reading phase. However, enhancers do not have to be contiguous. Linking is accomplished by ligation at convenient restriction sites. If such sites do not exist, synthetic oligonucleotide adaptors or linkers are used in accordance with conventional practice. The transcriptional and translational regulatory nucleic acid will generally be appropriate to the host cell used to express the CA protein; for example, transcriptional and translational regulatory nucleic acid sequences from Bacillus are preferably used to express the CA protein in Bacillus. Numerous types of appropriate expression vectors, and suitable regulatory sequences are known in the art for a variety of host cells.

[0114] In general, the transcriptional and translational regulatory sequences may include, but are not limited to, promoter sequences, ribosomal binding sites, transcriptional start and stop sequences, translational start and stop sequences, and enhancer or activator sequences. In a preferred embodiment, the regulatory sequences include a promoter and transcriptional start and stop sequences.

[0115] Promoter sequences encode either constitutive or inducible promoters. The promoters may be either naturally occurring promoters or hybrid promoters. Hybrid promoters, which combine elements of more than one promoter, are also known in the art, and are useful in the present invention.

[0116] In addition, the expression vector may comprise additional elements. For example, the expression vector may have two replication systems, thus allowing it to be maintained in two organisms, for example in mammalian or insect cells for expression and in a prokaryotic host for cloning and amplification. Furthermore, for integrating expression vectors, the expression vector contains at least one sequence homologous to the host cell genome, and preferably two homologous sequences that flank the expression construct. The integrating vector may be directed to a specific locus in the host cell by selecting the appropriate homologous sequence for inclusion in the vector. Constructs for integrating vectors are well known in the art.

[0117] In addition, in a preferred embodiment, the expression vector contains a selectable marker gene to allow the selection of transformed host cells. Selection genes are well known in the art and will vary with the host cell used.

[0118] The CA proteins of the present invention are produced by culturing a host cell transformed with an expression vector containing nucleic acid encoding a CA protein, under the appropriate conditions to induce or cause expression of the CA protein. The conditions appropriate for CA protein expression will vary with the choice of the expression vector and the host cell, and will be easily ascertained by one skilled in the art through routine experimentation. For example, the use of constitutive promoters in the expression vector will require optimizing the growth and proliferation of the host cell, while the use of an inducible promoter requires the appropriate growth conditions for induction. In addition, in some embodiments, the timing of the harvest is important. For example, the baculoviral systems used in insect cell expression are lytic viruses, and thus harvest time selection can be crucial for product yield.

[0119] Appropriate host cells include yeast, bacteria, archaebacteria, fungi, and insect, plant and animal cells, including mammalian cells. Of particular interest are Drosophila melanogaster cells, Saccharomyces cerevisiae and other yeasts, E. coli, Bacillus subtilis, Sf9 cells, C129 cells, 293 cells, Neurospora, BHK, CHO, COS, HeLa cells, THP1 cell line (a macrophage cell line) and human cells and cell lines.

[0120] In a preferred embodiment, the CA proteins are expressed in mammalian cells. Mammalian expression systems are also known in the art, and include retroviral systems. A preferred expression vector system is a retroviral vector system such as is generally described in PCT/US97/01019 and PCT/US97/01048, both of which are hereby expressly incorporated by reference. Of particular use as mammalian promoters are the promoters from mammalian viral genes, since the viral genes are often highly expressed and have a broad host range. Examples include the SV40 early promoter, mouse mammary tumor virus LTR promoter, adenovirus major late promoter, herpes simplex virus promoter, and the CMV promoter. Typically, transcription termination and polyadenylation sequences recognized by mammalian cells are regulatory regions located 3′ to the translation stop codon and thus, together with the promoter elements, flank the coding sequence. Examples of transcription terminator and polyadenylation signals include those derived form SV40.

[0121] The methods of introducing exogenous nucleic acid into mammalian hosts, as well as other hosts, are well known in the art, and will vary with the host cell used. Techniques include dextran-mediated transfection, calcium phosphate precipitation, polybrene mediated transfection, protoplast fusion, electroporation, viral infection, encapsulation of the polynucleotide(s) in liposomes, and direct microinjection of the DNA into nuclei.

[0122] In a preferred embodiment, CA proteins are expressed in bacterial systems. Bacterial expression systems are well known in the art. Promoters from bacteriophage may also be used and are known in the art. In addition, synthetic promoters and hybrid promoters are also useful; for example, the tac promoter is a hybrid of the trp and lac promoter sequences. Furthermore, a bacterial promoter can include naturally occurring promoters of non-bacterial origin that have the ability to bind bacterial RNA polymerase and initiate transcription. In addition to a functioning promoter sequence, an efficient ribosome binding site is desirable. The expression vector may also include a signal peptide sequence that provides for secretion of the CA protein in bacteria. The protein is either secreted into the growth media (gram-positive bacteria) or into the periplasmic space, located between the inner and outer membrane of the cell (gram-negative bacteria). The bacterial expression vector may also include a selectable marker gene to allow for the selection of bacterial strains that have been transformed. Suitable selection genes include genes that render the bacteria resistant to drugs such as ampicillin, chloramphenicol, erythromycin, kanamycin, neomycin and tetracycline. Selectable markers also include biosynthetic genes, such as those in the histidine, tryptophan and leucine biosynthetic pathways. These components are assembled into expression vectors. Expression vectors for bacteria are well known in the art, and include vectors for Bacillus subtilis, E. coli, Streptococcus cremoris, and Streptococcus lividans, among others. The bacterial expression vectors are transformed into bacterial host cells using techniques well known in the art, such as calcium chloride treatment, electroporation, and others.

[0123] In one embodiment, CA proteins are produced in insect cells. Expression vectors for the transformation of insect cells, and in particular, baculovirus-based expression vectors, are well known in the art.

[0124] In a preferred embodiment, CA protein is produced in yeast cells. Yeast expression systems are well known in the art, and include expression vectors for Saccharomyces cerevisiae, Candida albicans and C. maltosa, Hansenula polymorpha, Kluyveromyces fragilis and K. lactis, Pichia guillerimondii and P. pastoris, Schizosaccharomyces pombe, and Yarrowia lipolytica.

[0125] The CA protein may also be made as a fusion protein, using techniques well known in the art. Thus, for example, for the creation of monoclonal antibodies. If the desired epitope is small, the CA protein may be fused to a carrier protein to form an immunogen. Alternatively, the CA protein may be made as a fusion protein to increase expression, or for other reasons. For example, when the CA protein is a CA peptide, the nucleic acid encoding the peptide may be linked to other nucleic acid for expression purposes.

[0126] In one embodiment, the CA nucleic acids, proteins and antibodies of the invention are labeled. By “labeled” herein is meant that a compound has at least one element, isotope or chemical compound attached to enable the detection of the compound. In general, labels fall into three classes: a) isotopic labels, which may be radioactive or heavy isotopes; b) immune labels, which may be antibodies or antigens; and c) colored or fluorescent dyes. The labels may be incorporated into the CA nucleic acids, proteins and antibodies at any position. For example, the label should be capable of producing, either directly or indirectly, a detectable signal. The detectable moiety may be a radioisotope, such as ³H, ¹⁴C, ³²P, ³⁵S, or ¹²⁵I, a fluorescent or chemiluminescent compound, such as fluorescein isothiocyanate, rhodamine, or luciferin, or an enzyme, such as alkaline phosphatase, beta-galactosidase or horseradish peroxidase. Any method known in the art for conjugating the antibody to the label may be employed, including those methods described by Hunter et al., Nature, 144:945 (1962); David et al., Biochemistry, 13:1014 (1974); Pain et al., J. Immunol. Meth., 40:219 (1981); and Nygren, J. Histochem. and Cytochem., 30:407 (1982).

[0127] Accordingly, the present invention also provides CA protein sequences. A CA protein of the present invention may be identified in several ways. “Protein” in this sense includes proteins, polypeptides, and peptides. As will be appreciated by those in the art, the nucleic acid sequences of the invention can.be used to generate protein sequences. There are a variety of ways to do this, including cloning the entire gene and verifying its frame and amino acid sequence, or by comparing it to known sequences to search for homology to provide a frame, assuming the CA protein has homology to some protein in the database being used. Generally, the nucleic acid sequences are input into a program that will search all three frames for homology. This is done in a preferred embodiment using the following NCBI Advanced BLAST parameters. The program is blastx or blastn. The database is nr. The input data is as “Sequence in FASTA format”. The organism list is “none”. The “expect” is 10; the filter is default. The “descriptions” is 500, the “alignments” is 500, and the “alignment view” is pairwise. The “query Genetic Codes” is standard (1). The matrix is BLOSUM 62; gap existence cost is 11, per residue gap cost is 1; and the lambda ratio is 0.85 default. This results in the generation of a putative protein sequence.

[0128] In general, the term “polypeptide” as used herein refers to both the full-length polypeptide encoded by the recited polynucleotide, the polypeptide encoded by the gene represented by the recited polynucleotide, as well as portions or fragments thereof. The present invention encompasses variants of the naturally occurring proteins, wherein such variants are homologous or substantially similar to the naturally occurring protein, and can be of an origin of the same or different species as the naturally occurring protein (e.g., human, murine, or some other species that naturally expresses the recited polypeptide, usually a mammalian species). In general, variant polypeptides have a sequence that has at least about 80%, at least about 81%, at least about 82%, at least about 83%, at least about 84%, at least about 85%, at least about 86%, at least about 87%, at least about 88%, at least about 89%, usually at least about 90%, at least 91%, at least 92%, at least 93%, at least 94%, at least 95%, at least 96%, at least 97%, at least 98% and more usually at least about 99% sequence identity with a differentially expressed polypeptide described herein, as determined by the Smith-Waterman homology search algorithm using an affine gap search with a gap open penalty of 12 and a gap extension penalty of 2, BLOSUM matrix of 62. The Smith-Waterman homology search algorithm is taught in Smith and Waterman, Adv. Appl. Math. (1981) 2: 482-489. The variant polypeptides can be naturally or non-naturally glycosylated, i.e., the polypeptide has a glycosylation pattern that differs from the glycosylation pattern found in the corresponding naturally occurring protein.

[0129] Also within the scope of the invention are variants. Variants of polypeptides include mutants, fragments, and fusions. Mutants can include amino acid substitutions, additions or deletions. The amino acid substitutions can be conservative amino acid substitutions or substitutions to eliminate non-essential amino acids, such as to alter a glycosylation site, a phosphorylation site or an acetylation site, or to minimize misfolding by substitution or deletion of one or more cysteine residues that are not necessary for function. Conservative amino acid substitutions are those that preserve the general charge, hydrophobicity/hydrophilicity, and/or steric bulk of the amino acid substituted. Variants can be designed so as to retain or have enhanced biological activity of a particular region of the protein (e.g., a functional domain and/or, where the polypeptide is a member of a protein family, a region associated with a consensus sequence). Selection of amino acid alterations for production of variants can be based upon the accessibility (interior vs. exterior) of the amino acid (see, e.g., Go et al, Int. J Peptide Protein Res. (1980) 15:211), the thermostability of the variant polypeptide (see, e.g., Querol et al., Prot. Eng. (1996) 9:265), desired glycosylation sites (see, e.g., Olsen and Thomsen, J. Gen. Microbiol. (1991) 137:579), desired disulfide bridges (see, e.g., Clarke et al., Biochemistry (1993) 32:4322; and Wakarchuk et al., Protein Eng. (1994) 7:1379), desired metal binding sites (see, e.g., Toma et al., Biochemistry (1991) 30:97, and Haezerbrouck et al., Protein Eng. (1993) 6:643), and desired substitutions within proline loops (see, e.g., Masul et al., Appl. Env. Microbiol. (1994) 60:3579). Cysteine-depleted muteins can be produced as disclosed in U.S. Pat. No. 4,959,314.

[0130] Variants also-include fragments of the polypeptides disclosed herein, particularly biologically active fragments and/or fragments corresponding to functional domains. Fragments of interest will typically be at least about 8 amino acids (aa) 10 aa, 15 aa, 20 aa, 25 aa, 30 aa, 35 aa, 40 aa, to at least about 45 aa in length, usually at least about 50 aa in length, at least about 75 aa, at least about 100 aa, at least about 125 aa, at least about 150 aa in length, at least about 200 aa, at least about 300 aa, at least about 400 aa and can be as long as 500 aa in length or longer, but will usually not exceed about 1000 aa in length, where the fragment will have a stretch of amino acids that is identical to a polypeptide encoded by a polynucleotide having a sequence of any one of the polynucleotide sequences provided herein, or a homolog thereof. The protein variants described herein are encoded by polynucleotides that are within the scope of the invention. The genetic code can be used to select the appropriate codons to construct the corresponding variants.

[0131] While altered expression of the polynucleotides associated with cancer is observed, altered levels of expression of the polypeptides encoded by these polynucleotides may likely play a role in cancers.

[0132] Also included within one embodiment of CA proteins are amino acid variants of the naturally occurring sequences, as determined herein. Preferably, the variants are preferably greater than about 75% homologous to the wild-type sequence, more preferably greater than about 80%, even more preferably greater than about 85% and most preferably greater than 90%. The present application is also directed to proteins containing polypeptides at least 80%, 85%, 90%, 95%, 96%, 97%, 98% or 99% identical to a CA polypeptide sequence set forth herein. As for nucleic acids, homology in this context means sequence similarity or identity, with identity being preferred. This homology will be determined using standard techniques known in the art as are outlined above for the nucleic acid homologies.

[0133] CA proteins of the present invention may be shorter or longer than the wild type amino acid sequences. Thus, in a preferred embodiment, included within the definition of CA proteins are portions or fragments of the wild type sequences herein. In addition, as outlined above, the CA nucleic acids of the invention may be used to obtain additional coding regions, and thus additional protein sequence, using techniques known in the art.

[0134] In a preferred embodiment, the CA proteins are derivative or variant CA proteins as compared to the wild-type sequence. That is, as outlined more fully below, the derivative CA peptide will contain at least one amino acid substitution, deletion or insertion, with amino acid substitutions being particularly preferred. The amino acid substitution, insertion or deletion may occur at any residue within the CA peptide.

[0135] Also included in an embodiment of CA proteins of the present invention are amino acid sequence variants. These variants fall into one or more of three classes: substitutional, insertional or deletional variants. These variants ordinarily are prepared by site-specific mutagenesis of nucleotides in the DNA encoding the CA protein, using cassette or PCR mutagenesis or other techniques well known in the art, to produce DNA encoding the variant, and thereafter expressing the DNA in recombinant cell culture as outlined above. However, variant CA protein fragments having up to about 100-150 residues may be prepared by in vitro synthesis using established techniques. Amino acid sequence variants are characterized by the predetermined nature of the variation, a feature that sets them apart from naturally occurring allelic or interspecies variation of the CA protein amino acid sequence. The variants typically exhibit the same qualitative biological activity as the naturally occurring analogue, although variants can also be selected which have modified characteristics as will be more fully outlined below.

[0136] While the site or region for introducing an amino acid sequence variation is predetermined, the mutation per se need not be predetermined. For example, in order to optimize the performance of a mutation at a given site, random mutagenesis may be conducted at the target codon or region and the expressed CA variants screened for the optimal combination of desired activity. Techniques for making substitution mutations at predetermined sites in DNA having a known sequence are well known, for example, M13 primer mutagenesis and LAR mutagenesis. Screening of the mutants is done using assays of CA protein activities.

[0137] Amino acid substitutions are typically of single residues; insertions usually will be on the order of from about 1 to 20 amino acids, although considerably larger insertions may be tolerated. Deletions range from about 1 to about 20 residues, although in some cases deletions may be much larger.

[0138] Substitutions, deletions, insertions or any combination thereof may be used to arrive at a final derivative. Generally these changes are done on a few amino acids to minimize the alteration of the molecule. However, larger changes may be tolerated in certain circumstances. When small alterations in the characteristics of the CA protein are desired, substitutions are generally made in accordance with the following chart:

CHART 1

| Original Residue | Exemplary Substitutions |
|---|---|
| Ala | Ser |
| Arg | Lys |
| Asn | Gln, His |
| Asp | Glu |
| Cys | Ser |
| Gln | Asn |
| Glu | Asp |
| Gly | Pro |
| His | Asn, Gln |
| Ile | Leu, Val |
| Leu | Ile, Val |
| Lys | Arg, Gln, Glu |
| Met | Leu, Ile |
| Phe | Met, Leu, Tyr |
| Ser | Thr |
| Thr | Ser |
| Trp | Tyr |
| Tyr | Trp, Phe |
| Val | Ile, Leu |

[0139] Substantial changes in function or immunological identity are made by selecting substitutions that are less conservative than those shown in Chart I. For example, substitutions may be made full length to more significantly affect one or more of the following: the structure of the polypeptide backbone in the area of the alteration (e.g., the alpha-helical or beta-sheet structure); the charge or hydrophobicity of the molecule at the target site; and the bulk of the side chain. The substitutions which in general are expected to produce the greatest changes in the polypeptide's properties are those in which (a) a hydrophilic residue, e.g. seryl or threonyl is substituted for (or by) a hydrophobic residue, e.g. leucyl, isoleucyl, phenylalanyl, valyl or alanyl; (b) a cysteine or proline is substituted for (or by) any other residue; (c) a residue having an electropositive side chain, e.g. lysyl, arginyl, or histidyl, is substituted for (or by) an electronegative residue, e.g. glutamyl or aspartyl; or (d) a residue having a bulky side chain, e.g. phenylalanine, is substituted for (or by) one not having a side chain, e.g. glycine.

[0140] The variants typically exhibit the same qualitative biological activity and will elicit the same immune response as the naturally-occurring analogue, although variants also are selected to modify the characteristics of the CA proteins as needed. Alternatively, the variant may be designed such that the biological activity of the CA protein is altered. For example, glycosylation sites may be altered or removed, dominant negative mutations created, etc.

[0141] Covalent modifications of CA polypeptides are included within the scope of this invention, for example for use in screening. One type of covalent modification includes reacting targeted amino acid residues of a CA polypeptide with an organic derivatizing agent that is capable of reacting with selected side chains or the N- or C-terninal residues of a CA polypeptide. Derivatization with bifunctional agents is useful, for instance, for crosslinking CA polypeptides to a water-insoluble support matrix or surface for use in the method for purifying anti-CA antibodies or screening assays, as is more fully described below. Commonly used crosslinking agents include, e.g., 1,1-bis(diazoacetyl)-2-phenylethane, glutaraldehyde, N-hydroxysuccinimide esters, for example, esters with 4-azidosalicylic acid, homobifunctional imidoesters, including disuccinimidyl esters such as 3,3′-dithiobis(succinimidylpropionate), bifunctional maleimides such as bis-N-maleimido-1,8-octane and agents such as methyl-3-[(p-azidophenyl)dithio]propioimidate.

[0142] Other modifications include deamidation of glutaminyl and asparaginyl residues to the corresponding glutamyl and aspartyl residues, respectively, hydroxylation of proline and lysine, phosphorylation of hydroxyl groups of seryl, threonyl or tyrosyl residues, methylation of the a-amino groups of lysine, arginine, and histidine side chains [T. E. Creighton, Proteins: Structure and Molecular Properties, W. H. Freeman & Co., San Francisco, pp. 79-86 (1983)], acetylation of the N-terninal amine, and amidation of any C-terminal carboxyl group.

[0143] Another type of covalent modification of the CA polypeptide included within the scope of this invention comprises altering the native glycosylation pattern of the polypeptide. “Altering the native glycosylation pattern” is intended for purposes herein to mean deleting one or more carbohydrate moieties found in native sequence CA polypeptide, and/or adding one or more glycosylation sites that are not present in the native sequence CA polypeptide.

[0144] Addition of glycosylation sites to CA polypeptides may be accomplished by altering the amino acid sequence thereof. The alteration may be made, for example, by the addition of, or substitution by, one or more serine or threonine residues to the native sequence CA polypeptide (for O-linked glycosylation sites). The CA amino acid sequence may optionally be altered through changes at the DNA level, particularly by mutating the DNA encoding the CA polyp eptide at preselected bases such that codons are generated that will translate into the desired amino acids.

[0145] Another means of increasing the number of carbohydrate moieties on the CA polypeptide is by chemical or enzymatic coupling of glycosides to the polypeptide. Such methods are described in the art, e.g., in WO 87/05330 published 11 Sep. 1987, and in Aplin and Wriston, LA Crit. Rev. Biochem., pp. 259-306 (1981).

[0146] Removal of carbohydrate moieties present on the CA polypeptide may be accomplished chemically or enzymatically or by mutational substitution of codons encoding for amino acid residues that serve as targets for glycosylation. Chemical deglycosylation techniques are known in the art and described, for instance, by Hakimuddin, et al., Arch. Biochem. Biophys., 259:52 (1987) and by Edge et al., Anal. Biochem., 118:131 (1981). Enzymatic cleavage of carbohydrate moieties on polypeptides can be achieved by the use of a variety of endo-and exo-glycosidases as described by Thotakura et al., Meth. Enzymol., 138:350 (1987).

[0147] Another type of covalent modification of CA comprises linking the CA polypeptide to one of a variety of nonproteinaceous polymers, e.g., polyethylene glycol, polypropylene glycol, or polyoxyalkylenes, in the manner set forth in U.S. Pat. Nos. 4,640,835; 4,496,689; 4,301,144; 4,670,417; 4,791,192 or 4,179,337.

[0148] CA polypeptides of the present invention may also be modified in a way to form chimeric molecules comprising a CA polypeptide fused to another, heterologous polypeptide or amino acid sequence. In one embodiment, such a chimeric molecule comprises a fusion of a CA polypeptide with a tag polypeptide that provides an epitope to which an anti-tag antibody can selectively bind. The epitope tag is generally placed at the amino- or carboxyl-terminus of the CA polypeptide, although internal fusions may also be tolerated in some instances. The presence of such epitope-tagged forms of a CA polypeptide can be detected using an. antibody against the tag polypeptide. Also, provision of the epitope tag enables the CA polypeptide to be readily purified by affinity purification using an anti-tag antibody or another type of affinity matrix that binds to the epitope tag. In an alternative embodiment, the chimeric molecule may comprise a fusion of a CA polypeptide with an immunoglobulin or a particular region of an immunoglobulin. For a bivalent form of the chimeric molecule, such a fusion could be to the Fc region of an IgG molecule.

[0149] Various tag polypeptides and their respective antibodies are well known in the art. Examples include poly-histidine (poly-his) or poly-histidine-glycine (poly-his-gly) tags; the flu HA tag polypeptide and its antibody 12CA5 [Field et al., Mol. Cell. Biol., 8:2159-2165 (1988)]; the c-myc tag and the 8F9, 3C7, 6E10, G4, B7 and 9E10 antibodies thereto [Evan et al., Molecular and Cellular Biology, 5:3610-3616 (1985)]; and the Herpes Simplex virus glycoprotein D (gD) tag and its antibody [Paborsky et al., Protein Engineering, 3(6):547-553 (1990)]. Other tag polypeptides include the Flag-peptide [Hopp et al., BioTechnology, 6:1204-1210 (1988)]; the KT3 epitope peptide [Martin et al., Science, 255:192-194 (1992)]; tubulin epitope peptide [Skinner et al., J. Biol. Chem., 266:15163-15166 (1991)]; and the T7 gene 10 protein peptide tag [Lutz-Freyermuth et al., Proc. Natl. Acad. Sci. USA, 87:6393-6397 (1990)].

[0150] Also included with the definition of CA protein in one embodiment are other CA proteins of the CA family, and CA proteins from other organisms, which are cloned and expressed as outlined below. Thus, probe or degenerate polymerase chain reaction (PCR) primer sequences may be used to find other related CA proteins from humans or other organisms. As will be appreciated by those in the art, particularly useful probe and/or PCR primer sequences include the unique areas of the CA nucleic acid sequence. As is generally known in the art, preferred PCR primers are from about 15 to about 35 nucleotides in length, with from about 20 to about 30 being preferred, and may contain inosine as needed. The conditions for the PCR reaction are well known in the art.

[0151] In addition, as is outlined herein, CA proteins can be made that are longer than those encoded by the nucleic acids of the figures, for example, by the elucidation of additional sequences, the addition of epitope or purification tags, the addition of other fusion sequences, etc.

[0152] CA proteins may also be identified as being encoded by CA nucleic acids. Thus, CA proteins are encoded by nucleic acids that will hybridize to the sequences of the sequence listings, or their complements, as outlined herein.

[0153] CA Antigens and Antibodies Thereto

[0154] In one embodiment, the invention provides CA specific antibodies. In a preferred embodiment, when the CA protein is to be used to generate antibodies, for example for immunotherapy, the CA protein should share at least one epitope or determinant with the full-length protein. By “epitope” or “determinant” herein is meant a portion of a protein that will generate and/or bind an antibody or T-cell receptor in the context of MHC. Thus, in most instances, antibodies made to a smaller CA protein will be able to bind to the full-length protein. In a preferred embodiment, the epitope is unique; that is, antibodies generated to a unique epitope show little or no cross-reactivity.

[0155] Any polypeptide sequence encoded by the CA polynucleotide sequences may be analyzed to determine certain preferred regions of the polypeptide. Regions of high antigenicity are determined from data by DNASTAR analysis by choosing values that represent regions of the polypeptide that are likely to be exposed on the surface of the polypeptide in an environment in which antigen recognition may occur in the process of initiation of an immune response. For example, the amino acid sequence of a polypeptide encoded by a CA polynucleotide sequence may be analyzed using the default parameters of the DNASTAR computer algorithm (DNASTAR, Inc., Madison, Wis.; http://www.dnastar.com/).

[0156] Polypeptide features that may be routinely obtained using the DNASTAR computer algorithm include, but are not limited to, Garnier-Robson alpha-regions, beta-regions, turn-regions, and coil-regions (Gamier et al. J. Mol. Biol., 120: 97 (1978)); Chou-Fasman alpha-regions, beta-regions, and tum-regions (Adv. in Enzymol., 47:45-148 (1978)); Kyte-Doolittle hydrophilic regions and hydrophobic regions (J. Mol. Biol., 157:105-132 (1982)); Eisenberg alpha- and beta-amphipathic regions; Karplus-Schulz flexible regions; Emini surface-forming regions (J Virol., 55(3):836-839 (1985)); and Jameson-Wolf regions of high antigenic index (CABIOS, 4(1):181-186 (1988)). Kyte-Doolittle hydrophilic regions and hydrophobic regions, Emini surface-forming regions, and Jameson-Wolf regions of high antigenic index (i.e., containing four or more contiguous amino acids having an antigenic index of greater than or equal to 1.5, as identified using the default parameters of the Jameson-Wolf program) can routinely be used to determine polypeptide regions that exhibit a high degree of potential for antigenicity. One approach for preparing antibodies to a protein is the selection and preparation of an amino acid sequence of all or part of the protein, chemically synthesizing the sequence and injecting it into an appropriate animal, typically a rabbit, hamster or a mouse. Oligopeptides can be selected as candidates for the production of an antibody to the CA protein based upon the oligopeptides lying in hydrophilic regions, which are thus likely to be exposed in the mature protein. Additional oligopeptides can be determined using, for example, the Antigenicity Index, Welling, G.W. et al., FEBS Lett. 188:215-218 (1985), incorporated herein by reference.

[0157] In one embodiment, the term “antibody” includes antibody fragments, as are known in the art, including Fab, Fab₂, single chain antibodies (Fv for example), chimeric antibodies, etc., either produced by the modification of whole antibodies or those synthesized de novo using recombinant DNA technologies.

[0158] Methods of preparing polyclonal antibodies are known to the skilled artisan. Polyclonal antibodies can be raised in a mammal, for example, by one or more injections of an immunizing agent and, if desired, an adjuvant. Typically, the immunizing agent and/or adjuvant will be injected in the mammal by multiple subcutaneous or intraperitoneal injections. The immunizing agent may include a protein encoded by a nucleic acid of the figures or fragment thereof or a fusion protein thereof. It may be useful to conjugate the immunizing agent to a protein known to be immunogenic in the mammal being immunized. Examples of such immunogenic proteins include but are not limited to keyhole limpet hemocyanin, serum albumin, bovine thyroglobulin, and soybean trypsin inhibitor. Examples of adjuvants that may be employed include Freund's complete adjuvant and MPL-TDM adjuvant (monophosphoryl Lipid A, synthetic trehalose dicorynomycolate). The immunization protocol may be selected by one skilled in the art without undue experimentation.

[0159] The antibodies may, alternatively, be monoclonal antibodies. Monoclonal antibodies may be prepared using hybridoma methods, such as those described by Kohler and Milstein, Nature, 256:495 (1975). In a hybridoma method, a mouse, hamster, or other appropriate host animal, is typically immunized with an immunizing agent to elicit lymphocytes that produce or are capable of producing antibodies that will specifically bind to the immunizing agent. Alternatively, the lymphocytes may be immunized in vitro. The immunizing agent will typically include a polypeptide encoded by a nucleic acid of Tables 1-18, or fragment thereof or a fusion protein thereof. Generally, either peripheral blood lymphocytes (“PBLs”) are used if cells of human origin are desired, or spleen cells or lymph node cells are used if non-human mammalian sources are desired. The lymphocytes are then fused with an immortalized cell line using a suitable fusing agent, such as polyethylene glycol, to form a hybridoma cell (Goding, Monoclonal Antibodies: Principles and Practice, Academic Press, (1986) pp. 59-103). Immortalized cell lines are usually transformed mammalian cells, particularly myeloma cells of rodent, bovine and human origin. Usually, rat or mouse myeloma cell lines are employed. The hybridoma cells may be cultured in a suitable culture medium that preferably contains one or more substances that inhibit the growth or survival of the unfused, immortalized cells. For example, if the parental cells lack the enzyme hypoxanthine guanine phosphoribosyl transferase (HGPRT or HPRT), the culture medium for the hybridomas typically will include hypoxanthine, aminopterin, and thymidine (“HAT medium”), which substances prevent the growth of HGPRT-deficient cells.

[0160] Monoclonal antibody technology is used in implementing research, diagnosis and therapy. Monoclonal antibodies are used in radioimmunoassays, enzyme-linked immunosorbent assays, immunocytopathology, and flow cytometry for in vitro diagnosis, and in vivo for diagnosis and immunotherapy of human disease. Waldmann, T. A. (1991) Science 252:1657-1662. In particular, monoclonal antibodies have been widely applied to the diagnosis and therapy of cancer, wherein it is desirable to target malignant lesions while avoiding normal tissue. See, e.g., U.S. Pat. No. 4,753,894 to Frankel, et al.; U.S. Pat. No. 4,938,948 to Ring et al.; and U.S. Pat. No. 4,956,453 to Bjorn et al.

[0161] In one embodiment, the antibodies are bispecific antibodies. Bispecific antibodies are monoclonal, preferably human or humanized, antibodies that have binding specificities for at least two different antigens. A number of “humanized” antibody molecules comprising an antigen-binding site derived from a non-human immunoglobulin have been described, including chimeric antibodies having rodent V regions and their associated CDRs fused to human constant domains (Winter et al. (1991) Nature 349:293-299; Lobuglio et al. (1989) Proc. Nat. Acad. Sci. USA 86:4220-4224; Shaw et al. (1987) J Immunol. 138:4534-4538; and Brown et al. (1987) Cancer Res. 47:3577-3583), rodent CDRs grafted into a human supporting FR prior to fusion with an appropriate human antibody constant domain (Riechmann et al. (1988) Nature 332:323-327; Verhoeyen et al. (1988) Science 239:1534-1536; and Jones et al. (1986) Nature 321:522-525), and rodent CDRs supported by recombinantly veneered rodent FRs (European Patent Publication No. 519,596, published Dec. 23, 1992). These “humanized” molecules are designed to minimize unwanted immunological response toward rodent antihuman antibody molecules which limits the duration and effectiveness of therapeutic applications of those moieties in human recipients. In the present case, one of the binding specificities is for a protein encoded by a nucleic acid of Tables 1-18, or a fragment thereof, the other one is for any other antigen, and preferably for a cell-surface protein or receptor or receptor subunit, preferably one that is tumor specific.

[0162] In a preferred embodiment, the antibodies to CA are capable of reducing or eliminating the biological function of CA, as is described below. That is, the addition of anti-CA antibodies (either polyclonal or preferably monoclonal) to CA (or cells containing CA) may reduce or eliminate the CA activity. Generally, at least a 25% decrease in activity is preferred, with at least about 50% being particularly preferred and about a 95-100% decrease being especially preferred.

[0163] In a preferred embodiment the antibodies to the CA proteins are humanized antibodies. “Humanized” antibodies refer to a molecule having an antigen binding site that is substantially derived from an immunoglobulin from a non-human species and the remaining immunoglobulin structure of the molecule based upon the structure and/or sequence of a human immunoglobulin. The antigen binding site may comprise either complete variable domains fused onto constant domains or only the complementarity determining regions (CDRs) grafted onto appropriate framework regions in the variable domains. Antigen binding sites may be wild type or modified by one or more amino acid substitutions, e.g., modified to resemble human immunoglobulin more closely. Alternatively, a humanized antibody may be derived from a chimeric antibody that retains or substantially retains the antigen-binding properties of the parental, non-human, antibody but which exhibits diminished immunogenicity as compared to the parental antibody when administered to humans. The phrase “chimeric antibody,” as used herein, refers to an antibody containing sequence derived from two different antibodies (see, e.g., U.S. Pat. No. 4,816,567) that typically originate from different species. Typically, in these chimeric antibodies, the variable region of both light and heavy chains mimics the variable regions of antibodies derived from one species of mammals, while the constant portions are homologous to the sequences in antibodies derived from another. Most typically, chimeric antibodies comprise human and murine antibody fragments, generally human constant and mouse variable regions. Humanized antibodies include human immunoglobulins (recipient antibody) in which residues form a complementary determining region (CDR) of the recipient are replaced by residues from a CDR of a non-human species (donor antibody) such as mouse, rat or rabbit having the desired specificity, affinity and capacity. In some instances, Fv framework residues of the human immunoglobulin are replaced by corresponding non-human residues. Humanized antibodies may also comprise residues that are found neither in the recipient antibody nor in the imported CDR or framework sequences. In general, the humanized antibody will comprise substantially all of at least one, and typically two, variable domains, in which all or substantially all of the CDR regions correspond to those of a non-human immunoglobulin and all or substantially all of the framework residues (FR) regions are those of a human immunoglobulin consensus sequence. The humanized antibody optimally also will comprise at least a portion of an immunoglobulin constant region (Fe), typically that of a human immunoglobulin (Jones et al., Nature, 321:522-525 (1986); Riechmann et al., Nature, 332:323-329 (1988); and Presta, Curr. Op. Struct. Biol., 2:593-596 (1992)). One clear advantage to such chimeric forms is that, for example, the variable regions can conveniently be derived from presently known sources using readily available hybridomas or B cells from non human host organisms in combination with constant regions derived from, for example, human cell preparations. While the variable region has the advantage of ease of preparation, and the specificity is not affected by its source, the constant region being human, is less likely to elicit an immune response from a human subject when the antibodies are injected than would the constant region from a non-human source. However, the definition is not limited to this particular example.

[0164] Because humanized antibodies are far less immunogenic in humans than the parental mouse monoclonal antibodies, they can be used for the treatment of humans with far less risk of anaphylaxis. Thus, these antibodies may be preferred in therapeutic applications that involve in vivo administration to a human such as, e.g., use as radiation sensitizers for the treatment of neoplastic disease or use in methods to reduce the side effects of, e.g., cancer therapy. Methods for humanizing non-human antibodies are well known in the art. Generally, a humanized antibody has one or more amino acid residues introduced into it from a source that is non-human. These non-human amino acid residues are often referred to as import residues, which are typically taken from an import variable domain. Humanization can be essentially performed following the method of Winter and co-workers (Jones et al., Nature 321:522-525 (1986); Riechmann et al., Nature 332:323-327 (1988); Verhoeyen et al., Science 239:1534-1536 (1988)), by substituting rodent CDRs or CDR sequences for the corresponding sequences of a human antibody. Accordingly, such humanized antibodies are chimeric antibodies (U.S. Pat. No. 4,816,567), wherein substantially less than an intact human variable domain has been substituted by the corresponding sequence from a non-human species. In practice, humanized antibodies are typically human antibodies in which some CDR residues and possibly some FR residues are substituted by residues from analogous sites in rodent antibodies.

[0165] Human antibodies can also be produced using various techniques known in the art, including phage display libraries [Hoogenboom and Winter, J. Mol. Biol., 227:381 (1991); Marks et al., J. Mol. Biol., 222:581 (1991)]. The techniques of Cole et al. and Boemer et al. are also available for the preparation of human monoclonal antibodies [Cole et al., Monoclonal Antibodies and Cancer Therapy, Alan R. Liss, p. 77 (1985) and Boemer et al., J. Immunol., 147(1):86-95 (1991)]. Humanized antibodies may be achieved by a variety of methods including, for example: (1) grafting the non-human complementarity determining regions (CDRs) onto a human framework and constant region (a process referred to in the art as “humanizing”), or, alternatively, (2) transplanting the entire non-human variable domains, but “cloaking” them with a human-like surface by replacement of surface residues (a process referred to in the art as “veneering”). In the present invention, humanized antibodies will include both “humanized” and “veneered” antibodies. Similarly, human antibodies can be made by introducing human immunoglobulin loci into transgenic animals, e.g., mice in which the endogenous immunoglobulin genes have been partially or completely inactivated. Upon challenge, human antibody production is observed, which closely resembles that seen in humans in all respects, including gene rearrangement, assembly, and antibody repertoire. This approach is described, for example, in U.S. Pat. Nos. 5,545,807; 5,545,806; 5,569,825; 5,625,126; 5,633,425; 5,661,016, and in the following scientific publications: Marks et al. Bio/Technology 10, 779-783 (1992); Lonberg et al., Nature 368 856-859 (1994); Morrison, Nature 368, 812-13 (1994); Fishwild et al., Nature Biotechnology 14, 845-51 (1996); Neuberger, Nature Biotechnology 14, 826 (1996); Lonberg and Huszar, Intern. Rev. Immunol. 13 65-93 (1995); Jones et al., Nature 321:522-525 (1986); Morrison et al., Proc. Natl. Acad. Sci, US.A., 81:6851-6855 (1984); Morrison and Oi, Adv. Immunol., 44:65-92 (1988); Verhoeyer et al., Science 239:1534-1536 (1988); Padlan, Molec. Immun. 28:489-498 (1991); Padlan, Molec. Immunol. 31(3):169-217 (1994); and Kettleborough, C. A. et al., Protein Eng. 4(7):773-83 (1991) each of which is incorporated herein by reference.

[0166] The phrase “complementarity determining region” refers to amino acid sequences which together define the binding affinity and specificity of the natural Fv region of a native immunoglobulin binding site. See, e.g., Chothia et al., J. Mol. Biol. 196:901-917 (1987); Kabat et al., U.S. Dept. of Health and Human Services NIH Publication No. 91-3242 (1991). The phrase “constant region” refers to the portion of the antibody molecule that confers effector functions. In the present invention, mouse constant regions are substituted by human constant regions. The constant regions of the subject humanized antibodies are derived from human immunoglobulins. The heavy chain constant region can be selected from any of the five isotypes: alpha, delta, epsilon, gamma or mu. One method of humanizing antibodies comprises aligning the non-human heavy and light chain sequences to human heavy and light chain sequences, selecting and replacing the non-human framework with a human framework based on such alignment, molecular modeling to predict the conformation of the humanized sequence and comparing to the conformation of the parent antibody. This process is followed by repeated back mutation of residues in the CDR region that disturb the structure of the CDRs until the predicted conformation of the humanized sequence model closely approximates the conformation of the non-human CDRs of the parent non-human antibody. Such humanized antibodies may be further derivatized to facilitate uptake and clearance, e.g, via Ashwell receptors. See, e.g., U.S. Pat. Nos. 5,530,101 and 5,585,089 which are incorporated herein by reference.

[0167] Humanized antibodies to CA polypeptides can also be produced using transgenic animals that are engineered to contain human immunoglobulin loci. For example, WO 98/24893 discloses transgenic animals having a human Ig locus wherein the animals do. not produce functional endogenous immunoglobulins due to the inactivation of endogenous heavy and light chain loci. WO 91/10741 also discloses transgenic non-primate mammalian hosts capable of mounting an immune response to an immunogen, wherein the antibodies have primate constant and/or variable regions, and wherein the endogenous immunoglobulin-encoding loci are substituted or inactivated. WO 96/30498 discloses the use of the Cre/Lox system to modify the immunoglobulin locus in a mammal, such as to replace all or a portion of the constant or variable region to form a modified antibody molecule. WO 94/02602 discloses non-human mammalian hosts having inactivated endogenous Ig loci and functional human Ig loci. U.S. Pat. No. 5,939,598 discloses methods of making transgenic mice in which the mice lack endogenous heavy chains, and express an exogenous immunoglobulin locus comprising one or more xenogeneic constant regions.

[0168] Using a transgenic animal described above, an immune response can be produced to a selected antigenic molecule, and antibody-producing cells can be removed from the animal and used to produce hybridomas that secrete human monoclonal antibodies. Immunization protocols, adjuvants, and the like are known in the art, and are used in immunization of, for example, a transgenic mouse as described in WO 96/33735. The monoclonal antibodies can be tested for the ability to inhibit or neutralize the biological activity or physiological effect of the corresponding protein.

[0169] In the present invention, CA polypeptides of the invention and variants thereof are used to immunize a transgenic animal as described above. Monoclonal antibodies are made using methods known in the art, and the specificity of the antibodies is tested using isolated CA polypeptides. Methods for preparation of the human or primate CA or an epitope thereof include, but are not limited to chemical synthesis, recombinant DNA techniques or isolation from biological samples. Chemical synthesis of a peptide can be performed, for example, by the classical Merrifeld method of solid phase peptide synthesis (Merrifeld, J. Am. Chem. Soc. 85:2149, 1963 which is incorporated by reference) or the FMOC strategy on a Rapid Automated Multiple Peptide Synthesis system (E. I. du Pont de Nemours Company, Wilmington, Del.) (Caprino and Han, J. Org. Chem. 37:3404, 1972 which is incorporated by reference).

[0170] Polyclonal antibodies can be prepared by immunizing rabbits or other animals by injecting antigen followed by subsequent boosts at appropriate intervals. The animals are bled and sera assayed against purified CA proteins usually by ELISA or by bioassay based upon the ability to block the action of CA proteins. When using avian species, e.g., chicken, turkey and the like, the antibody can be isolated from the yolk of the egg. Monoclonal antibodies can be prepared after the method of Milstein and Kohler by fusing splenocytes from immunized mice with continuously replicating tumor cells such as myeloma or lymphoma cells. (Milstein and Kohler, Nature 256:495-497, 1975; Gulfre and Milstein, Methods in Enzymology: Immunochemical Techniques 73:1-46, Langone and Banatis eds., Academic Press, 1981 which are incorporated by reference). The hybridoma cells so formed are then cloned by limiting dilution methods and supernates assayed for antibody production by ELISA, RIA or bioassay.

[0171] The unique ability of antibodies to recognize and specifically bind to target proteins provides an approach for treating an overexpression of the protein. Thus, another aspect of the present invention provides for a method for preventing or treating diseases involving overexpression of a CA polypeptide by treatment of a patient with specific antibodies to the CA protein.

[0172] Specific antibodies, either polyclonal or monoclonal, to the CA proteins can be produced by any suitable method known in the art as discussed above. For example, murine or human monoclonal antibodies can be produced by hybridoma technology or, alternatively, the CA proteins, or an immunologically active fragment thereof, or an anti-idiotypic antibody, or fragment thereof can be administered to an animal to elicit the production of antibodies capable of recognizing and binding to the CA proteins. Such antibodies can be from any class of antibodies including, but not limited to IgG, IgA, IgM, IgD, and IgE or in the case of avian species, IgY and from any subclass of antibodies.

[0173] By immunotherapy is meant treatment of a cancer with an antibody raised against a CA protein. As used herein, immunotherapy can be passive or active. Passive immunotherapy as defined herein is the passive transfer of antibody to a recipient (patient). Active immunization is the induction of antibody and/or T-cell responses in a recipient (patient). Induction of an immune response is the result of providing the recipient with an antigen to which antibodies are raised. As appreciated by one of ordinary skill in the art, the antigen may be provided by injecting a polypeptide against which antibodies are desired to be raised into a recipient, or contacting the recipient with a nucleic acid capable of expressing the antigen and under conditions for expression of the antigen.

[0174] In a preferred embodiment, oncogenes which encode secreted growth factors may be inhibited by raising antibodies against CA proteins that are secreted proteins as described above. Without being bound by theory, antibodies used for treatment, bind and prevent the secreted protein from binding to its receptor, thereby inactivating the secreted CA protein.

[0175] In another preferred embodiment, the CA protein to which antibodies are raised is a transmembrane protein. Without being bound by theory, antibodies used for treatment, bind the extracellular domain of the CA protein and prevent it from binding to other proteins, such as circulating ligands or cell-associated molecules. The antibody may cause down-regulation of the transmembrane CA protein. As will be appreciated by one of ordinary skill in the art, the antibody may be a competitive, non-competitive or uncompetitive inhibitor of protein binding to the extracellular domain of the CA protein. The antibody is also an antagonist of the CA protein. Further, the antibody prevents activation of the transmembrane CA protein. In one aspect, when the antibody prevents the binding of other molecules to the CA protein, the antibody prevents growth of the cell. The antibody may also sensitize the cell to cytotoxic agents, including, but not limited to TNF-α, TNF-β, IL-1, INF-γ and IL-2, or chemotherapeutic agents including 5FU, vinblastine, actinomycin D, cisplatin, methotrexate, and the like. In some instances the antibody belongs to a sub-type that activates serum complement when complexed with the transmembrane protein thereby mediating cytotoxicity. Thus, cancers may be treated by administering to a patient antibodies directed against the transmembrane CA protein.

[0176] In another preferred embodiment, the antibody is conjugated to a therapeutic moiety. In one aspect the therapeutic moiety is a small molecule that modulates the activity of the CA protein. In another aspect the therapeutic moiety modulates the activity of molecules associated with or in close proximity to the CA protein. The therapeutic moiety may inhibit enzymatic activity such as protease or protein kinase activity associated with cancer.

[0177] In a preferred embodiment, the therapeutic moiety may also be a cytotoxic agent. In this method, radioisotopes, natural toxins, chemotherapy agents, or other substances (such as biological response modifiers) are chemically linked or conjugated to a monoclonal antibody to form “immunoconjugates” and “immunotoxins” which target the cytotoxic agent to tumor tissue or cells resulting in a reduction in the number of afflicted cells, thereby reducing symptoms associated with cancers, including lymphoma. Cytotoxic agents are numerous and varied and include, but are not limited to, cytotoxic drugs or toxins or active fragments of such toxins. Suitable toxins and their corresponding fragments include diphtheria A chain, exotoxin A chain, ricin A chain, abrin A chain, curcin, crotin, phenomycin, enomycin and the like. Cytotoxic agents also include radiochemicals made by conjugating radioisotopes to antibodies raised against CA proteins, or binding of a radionuclide to a chelating agent that has been covalently attached to the antibody. Targeting the therapeutic moiety to transmembrane CA proteins not only serves to increase the local concentration of therapeutic moiety in the cancer of interest, i.e., lymphoma, but also serves to reduce deleterious side effects that may be associated with the therapeutic moiety. A number of investigators have used monoclonal antibodies as carriers of cytotoxic substances in attempts to selectively direct those agents to malignant tissue. More particularly, a number of monoclonal antibodies have been conjugated to toxins such as ricin, abrin, diphtheria toxin and Pseudomonas exotoxin or to enzymatically active portions (A chains) thereof via heterobi functional agents. See, e.g., U.S. Pat. No. 4,753,894 to Frankel et al.; Nevelle, et al. (1982) Immunol Rev 62:75-91; Ross et al. (1980) Eur. J Biochem 104; Vitteta et al. (1982) Immunol Rev 62:158-183 Raso et al. (1982) Cancer Res 42:457-464, and Trowbridge et al. (1981) Nature 294:171-173.

[0178] In another preferred embodiment, the CA protein against which the antibodies are raised is an intracellular protein. In this case, the antibody may be conjugated to a protein that facilitates entry into the cell. In one case, the antibody enters the cell by endocytosis. In another embodiment, a nucleic acid encoding the antibody is administered to the individual or cell. Moreover, wherein the CA protein can be targeted within a cell, e.g., the nucleus, an antibody thereto contains a signal for that target localization, e.g., a nuclear localization signal.

[0179] The CA antibodies of the invention specifically bind to CA proteins. By “specifically bind” herein is meant that the antibodies bind to the protein with a binding constant in the range of 10⁻⁴-10⁻⁶ M⁻¹, with a preferred range being 10⁻⁷-10⁻⁹ M⁻¹.

[0180] In a preferred embodiment, the CA protein is purified or isolated after expression. CA proteins may be isolated or purified in a variety of ways known to those skilled in the art depending on what other components are present in the sample. Standard purification methods include electrophoretic, molecular, immunological and chromatographic techniques, including ion exchange, hydrophobic, affinity, and reverse-phase HPLC chromatography, and chromatofocusing. For example, the CA protein may be purified using a standard anti-CA antibody column. Ultrafiltration and diafiltration techniques, in conjunction with protein concentration, are also useful. For general guidance in suitable purification techniques, see Scopes, R., Protein Purification, Springer-Verlag, NY (1982). The degree of purification necessary will vary depending on the use of the CA protein. In some instances no purification will be necessary.

[0181] Detection of Cancer Phenotype

[0182] Once expressed and purified if necessary, the CA proteins and nucleic acids are useful in a number of applications. In one aspect, the expression levels of genes are determined for different cellular states in the cancer phenotype; that is, the expression levels of genes in normal tissue and in cancer tissue (and in some cases, for varying severities of lymphoma that relate to prognosis, as outlined below) are evaluated to provide expression profiles. An expression profile of a particular cell state or point of development is essentially a “fingerprint” of the state; while two states may have any particular gene similarly expressed, the evaluation of a number of genes simultaneously allows the generation of a gene expression profile that is unique to the state of the cell. By comparing expression profiles of cells in different states, information regarding which genes are important (including both up- and down-regulation of genes) in each of these states is obtained. Then, diagnosis may be done or confirmed: does tissue from a particular patient have the gene expression profile of normal or cancer tissue.

[0183] “Differential expression,” or equivalents used herein, refers to both qualitative as well as quantitative differences in the temporal and/or cellular expression patterns of genes, within and among the cells. Thus, a differentially expressed gene can qualitatively have its expression altered, including an activation or inactivation, in, for example, normal versus cancer tissue. That is, genes may be turned on or turned off in a particular state, relative to another state. As is apparent to the skilled artisan, any comparison of two or more states can be made. Such a qualitatively regulated gene will exhibit an expression pattern within a state or cell type which is detectable by standard techniques in one such state or cell type, but is not detectable in both. Alternatively, the determination is quantitative in that expression is increased or decreased; that is, the expression of the gene is either up-regulated, resulting in an increased amount of transcript, or down-regulated, resulting in a decreased amount of transcript. The degree to which expression differs need only be large enough to quantify via standard characterization techniques as outlined below, such as by use of Affymetrix GeneChip® expression arrays, Lockhart, Nature Biotechnology, 14:1675-1680 (1996), hereby expressly incorporated by reference. Other techniques include, but are not limited to, quantitative reverse transcriptase PCR, Northern analysis and RNase protection. As outlined above, preferably the change in expression (i.e. upregulation or downregulation) is at least about 50%, more preferably at least about 100%, more preferably at least about 150%, more preferably, at least about 200%, with from 300 to at least 1000% being especially preferred.

[0184] As will be appreciated by those in the art, this may be done by evaluation at either the gene transcript, or the protein level; that is, the amount of gene expression may be monitored using nucleic acid probes to the DNA or RNA equivalent of the gene transcript, and the quantification of gene expression levels, or, alternatively, the final gene product itself (protein) can be monitored, for example through the use of antibodies to the CA protein and standard immunoassays (ELISAs, etc.) or other techniques, including mass spectroscopy assays, 2D gel electrophoresis assays, etc. Thus, the proteins corresponding to CA genes, i.e. those identified as being important in a particular cancer phenotype, i.e., lymphoma, can be evaluated in a diagnostic test specific for that cancer.

[0185] In a preferred embodiment, gene expression monitoring is done and a number of genes, i.e. an expression profile, is monitored simultaneously, although multiple protein expression monitoring can be done as well. Similarly, these assays may be done on an individual basis as well.

[0186] In this embodiment, the CA nucleic acid probes may be attached to biochips as outlined herein for the detection and quantification of CA sequences in a particular cell. The assays are done as is known in the art. As will be appreciated by those in the art, any number of different CA sequences may be used as probes, with single sequence assays being used in some cases, and a plurality of the sequences described herein being used in other embodiments. In addition, while solid-phase assays are described, any number of solution based assays may be done as well.

[0187] In a preferred embodiment, both solid and solution based assays may be used to detect CA sequences that are up-regulated or down-regulated in cancers as compared to normal tissue. In instances where the CA sequence has been altered but shows the same expression profile or an altered expression profile, the protein will be detected as outlined herein.

[0188] In a preferred embodiment nucleic acids encoding the CA protein are detected. Although DNA or RNA encoding the CA protein may be detected, of particular interest are methods wherein the mRNA encoding a CA protein is detected. The presence of mRNA in a sample is an indication that the CA gene has been transcribed to form the mRNA, and suggests that the protein is expressed. Probes to detect the mRNA can be any nucleotide/deoxynucleotide probe that is complementary to and base pairs with the mRNA and includes but is not limited to oligonucleotides, CDNA or RNA. Probes also should contain a detectable label, as defined herein. In one method the mRNA is detected after immobilizing the nucleic acid to be examined on a solid support such as nylon membranes and hybridizing the probe with the sample. Following washing to remove the non-specifically bound probe, the label is detected. In another method detection of the mRNA is performed in situ. In this method permeabilized cells or tissue samples are contacted with a detectably labeled nucleic acid probe for sufficient time to allow the probe to hybridize with the target mRNA. Following washing to remove the non-specifically bound probe, the label is detected. For example a digoxygenin labeled riboprobe (RNA probe) that is complementary to the mRNA encoding a CA protein is detected by binding the digoxygenin with an anti-digoxygenin secondary antibody and developed with nitro blue tetrazolium and 5-bromo-4-chloro-3-indoyl phosphate.

[0189] In a preferred embodiment, any of the three classes of proteins as described herein (secreted, transmembrane or intracellular proteins) are used in diagnostic assays. The CA proteins, antibodies, nucleic acids, modified proteins and cells containing CA sequences are used in diagnostic assays. This can be done on an individual gene or corresponding polypeptide level, or as sets of assays.

[0190] As described and defined herein, CA proteins find use as markers of cancers, including lymphomas such as, but not limited to, Hodgkin's and non-Hodgkin's lymphoma. Detection of these proteins in putative cancer tissue or patients allows for a determination or diagnosis of the type of cancer. Numerous methods known to those of ordinary skill in the art find use in detecting cancers. In one embodiment, antibodies are used to detect CA proteins. A preferred method separates proteins from a sample or patient by electrophoresis on a gel (typically a denaturing and reducing protein gel, but may be any other type of gel including isoelectric focusing gels and the like). Following separation of proteins, the CA protein is detected by immunoblotting with antibodies raised against the CA protein. Methods of immunoblotting are well known to those of ordinary skill in the art.

[0191] In another preferred method, antibodies to the CA protein find use in in situ imaging techniques. In this method cells are contacted with from one to many antibodies to the CA protein(s). Following washing to remove non-specific antibody binding, the presence of the antibody or antibodies is detected. In one embodiment the antibody is detected by incubating with a secondary antibody that contains a detectable label. In another method the primary antibody to the CA protein(s) contains a detectable label. In another preferred embodiment each one of multiple primary antibodies contains a distinct and detectable label. This method finds particular use in simultaneous screening for a plurality of CA proteins. As will be appreciated by one of ordinary skill in the art, numerous other histological imaging techniques are useful in the invention.

[0192] In a preferred embodiment the label is detected in a fluorometer that has the ability to detect and distinguish emissions of different wavelengths. In addition, a fluorescence activated cell sorter (FACS) can be used in the method.

[0193] In another preferred embodiment, antibodies find use in diagnosing cancers from blood samples. As previously described, certain CA proteins are secreted/circulating molecules. Blood samples, therefore, are useful as samples to be probed or tested for the presence of secreted CA proteins. Antibodies can be used to detect the CA proteins by any of the previously described immunoassay techniques including ELISA, immunoblotting (Western blotting), immunoprecipitation, BIACORE technology and the like, as will be appreciated by one of ordinary skill in the art.

[0194] In a preferred embodiment, in situ hybridization of labeled CA nucleic acid probes to tissue arrays is done. For example, arrays of tissue samples, including CA tissue and/or normal tissue, are made. In situ hybridization as is known in the art can then be done.

[0195] It is understood that when comparing the expression fingerprints between an individual and a standard, the skilled artisan can make a diagnosis as well as a prognosis. It is further understood that the genes that indicate diagnosis may differ from those that indicate prognosis.

[0196] In a preferred embodiment, the CA proteins, antibodies, nucleic acids, modified proteins and cells containing CA sequences are used in prognosis assays. As above, gene expression profiles can be generated that correlate to cancer, especially lymphoma, severity, in terms of long term prognosis. Again, this may be done on either a protein or gene level with the use of genes being preferred. As above, the CA probes are attached to biochips for the detection and quantification of CA sequences in a tissue or patient. The assays proceed as outlined for diagnosis.

[0197] Screening for CA-Targeted Drugs

[0198] In one embodiment, any of the CA sequences as described herein are used in drug screening assays. The CA proteins, antibodies, nucleic acids, modified proteins and cells containing CA sequences are used in drug screening assays or by evaluating the effect of drug candidates on a “gene expression profile” or expression profile of polypeptides. hi one embodiment, the expression profiles are used, preferably in conjunction with high throughput screening techniques to allow monitoring for expression profile genes after treatment with a candidate agent, Zlokarnik, et al., Science 279, 84-8 (1998), Heid, et al., Genome Res., 6:986-994 (1996).

[0199] In another embodiment, the CA proteins, antibodies, nucleic acids, modified proteins and cells containing the native or modified CA proteins are used in screening assays. That is, the present invention provides novel methods for screening for compositions that modulate the cancer phenotype. As above, this can be done by screening for modulators of gene expression or for modulators of protein activity. Similarly, this may be done on an individual gene or protein level or by evaluating the effect of drug candidates on a “gene expression profile”. In a preferred embodiment, the expression profiles are used, preferably in conjunction with high throughput screening techniques to allow monitoring for expression profile genes after treatment with a candidate agent, see Zlokamik, supra.

[0200] Having identified the CA genes herein, a variety of assays to evaluate the effects of agents on gene expression may be executed. In a preferred embodiment, assays may be run on an individual gene or protein level. That is, having identified a particular gene as aberrantly regulated in cancer, candidate bioactive agents may be screened to modulate the gene's regulation. “Modulation” thus includes both an increase and a decrease in gene expression or activity. The preferred amount of modulation will depend on the original change of the gene expression in normal versus tumor tissue, with changes of at least 10%, preferably 50%, more preferably 100-300%, and in some embodiments 300-1000% or greater. Thus, if a gene exhibits a 4 fold increase in tumor compared to normal tissue, a decrease of about four fold is desired; a 10 fold decrease in tumor compared to normal tissue gives a 10 fold increase in expression for a candidate agent is desired, etc. Alternatively, where the CA sequence has been altered but shows the same expression profile or an altered expression profile, the protein will be detected as outlined herein.

[0201] As will be appreciated by those in the art, this may be done by evaluation at either the gene or the protein level; that is, the amount of gene expression may be monitored using nucleic acid probes and the quantification of gene expression levels, or, alternatively, the level of the gene product itself can be monitored, for example through the use of antibodies to the CA protein and standard immunoassays. Alternatively, binding and bioactivity assays with the protein may be done as outlined below.

[0202] In a preferred embodiment, gene expression monitoring is done and a number of genes, i.e. an expression profile, is monitored simultaneously, although multiple protein expression monitoring can be done as well.

[0203] In this embodiment, the CA nucleic acid probes are attached to biochips as outlined herein for the detection and quantification of CA sequences in a particular cell. The assays are further described below.

[0204] Generally, in a preferred embodiment, a candidate bioactive agent is added to the cells prior to analysis. Moreover, screens are provided to identify a candidate bioactive agent that modulates a particular type of cancer, modulates CA proteins, binds to a CA protein, or interferes between the binding of a CA protein and an antibody.

[0205] The term “candidate bioactive agent” or “drug candidate” or grammatical equivalents as used herein describes any molecule, e.g., protein, oligopeptide, small organic or inorganic molecule, polysaccharide, polynucleotide, etc., to be tested for bioactive agents that are capable of directly or indirectly altering either the cancer phenotype, binding to and/or modulating the bioactivity of a CA protein, or the expression of a CA sequence, including both nucleic acid sequences and protein sequences. In a particularly preferred embodiment, the candidate agent suppresses a CA phenotype, for example to a normal tissue fingerprint. Similarly, the candidate agent preferably suppresses a severe CA phenotype. Generally a plurality of assay mixtures are run in parallel with different agent concentrations to obtain a differential response to the various concentrations. Typically, one of these concentrations serves as a negative control, i.e., at zero concentration or below the level of detection.

[0206] In one aspect, a candidate agent will neutralize the effect of a CA protein. By “neutralize” is meant that activity of a protein is either inhibited or counter acted against so as to have substantially no effect on a cell.

[0207] Candidate agents encompass numerous chemical classes, though typically they are organic or inorganic molecules, preferably small organic compounds having a molecular weight of more than 100 and less than about 2,500 Daltons. Preferred small molecules are less than 2000, or less than 1500 or less than 1000 or less than 500 D. Candidate agents comprise functional groups necessary for structural interaction with proteins, particularly hydrogen bonding, and typically include at least an amine, carbonyl, hydroxyl or carboxyl group, preferably at least two of the functional chemical groups. The candidate agents often comprise cyclical carbon or heterocyclic structures and/or aromatic or polyaromatic structures substituted with one or more of the above functional groups. Candidate agents are also found among biomolecules including peptides, saccharides, fatty acids, steroids, purines, pyrimidines, derivatives, structural analogs or combinations thereof. Particularly preferred are peptides.

[0208] Candidate agents are obtained from a wide variety of sources including libraries of synthetic or natural compounds. For example, numerous means are available for random and directed synthesis of a wide variety of organic compounds and biomolecules, including expression of randomized oligonucleotides. Alternatively, libraries of natural compounds in the form of bacterial, fungal, plant and animal extracts are available or readily produced. Additionally, natural or synthetically produced libraries and compounds are readily modified through conventional chemical, physical and biochemical means. Known pharmacological agents may be subjected to directed or random chemical modifications, such as acylation, alkylation, esterification, or amidification to produce structural analogs.

[0209] In one embodiment, the candidate bioactive agents are proteins. By “protein” herein is meant at least two covalently attached amino acids, which includes proteins, polypeptides, oligopeptides and peptides. The protein may be made up of naturally occurring amino acids and peptide bonds, or synthetic peptidomimetic structures. Thus “amino acid”, or “peptide residue”, as used herein means both naturally occurring and synthetic amino acids. For example, homo-phenylalanine, citrulline and norleucine are considered amino acids for the purposes of the invention. “Amino acid” also includes imino acid residues such as proline and hydroxyproline. The side chains may be in either the (R) or the (S) configuration. In the preferred embodiment, the amino acids are in the (S) or L-configuration. If non-naturally occurring side chains are used, non-amino acid substituents may be used, for example to prevent or retard in vivo degradations.

[0210] In a preferred embodiment, the candidate bioactive agents are naturally occurring proteins or fragments of naturally occurring proteins. Thus, for example, cellular extracts containing proteins, or random or directed digests of proteinaceous cellular extracts, may be used. In this way libraries of prokaryotic and eukaryotic proteins may be made for screening in the methods of the invention. Particularly preferred in this embodiment are libraries of bacterial, fungal, viral, and mammalian proteins, with the latter being preferred, and human proteins being especially preferred.

[0211] In another preferred embodiment, the candidate bioactive agents are peptides of from about 5 to about 30 amino acids, with from about 5 to about 20 amino acids being preferred, and from about 7 to about 15 being particularly preferred. The peptides may be digests of naturally occurring proteins as is outlined above, random peptides, or “biased” random peptides. By “randomized” or grammatical equivalents herein is meant that each nucleic acid and peptide consists of essentially random nucleotides and amino acids, respectively. Since generally these random peptides (or nucleic acids, discussed below) are chemically synthesized, they may incorporate any nucleotide or amino acid at any position. The synthetic process can be designed to generate randomized proteins or nucleic acids, to allow the formation of all or most of the possible combinations over the length of the sequence, thus forming a library of randomized candidate bioactive proteinaceous agents.

[0212] In one embodiment, the library is fully randomized, with no sequence preferences or constants at any position. In a preferred embodiment, the library is biased. That is, some positions within the sequence are either held constant, or are selected from a limited number of possibilities. For example, in a preferred embodiment, the nucleotides or amino acid residues are randomized within a defined class, for example, of hydrophobic amino acids, hydrophilic residues, sterically biased (either small or large) residues, towards the creation of nucleic acid binding domains, the creation of cysteines, for cross-linking, prolines for SH-3 domains, serines, threonines, tyrosines or histidines for phosphorylation sites, etc., or to purines, etc.

[0213] In one embodiment, the candidate bioactive agents are nucleic acids. As described generally for proteins, nucleic acid candidate bioactive agents may be naturally occurring nucleic acids, random nucleic acids, or “biased” random nucleic acids. In another embodiment; the candidate bioactive agents are organic chemical moieties, a wide variety of which are available in the literature.

[0214] In assays for testing alteration of the expression profile of one or more CA genes, after the candidate agent has been added and the cells allowed to incubate for some period of time, a nucleic acid sample containing the target sequences to be analyzed is prepared. The target sequence is prepared using known techniques (e.g., converted from RNA to labeled cDNA, as described above) and added to a suitable microarray. For example, an in vitro reverse transcription with labels covalently attached to the nucleosides is performed. Generally, the nucleic acids are labeled with a label as defined herein, especially with biotin-FITC or PE, Cy3 and Cy5.

[0215] As will be appreciated by those in the art, these assays can be direct hybridization assays or can comprise “sandwich assays”, which include the use of multiple probes, as is generally outlined in U.S. Pat. Nos. 5,681,702, 5,597,909, 5,545,730, 5,594,117, 5,591,584, 5,571,670, 5,580,731, 5,571,670, 5,591,584, 5,624,802, 5,635,352, 5,594,118, 5,359,100, 5,124,246 and 5,681,697, all of which are hereby incorporated by reference. In this embodiment, in general, the target nucleic acid is prepared as outlined above, and then added to the biochip comprising a plurality of nucleic acid probes, under conditions that allow the formation of a hybridization complex.

[0216] A variety of hybridization conditions may be used in the present invention, including high, moderate and low stringency conditions as outlined above. The assays are generally run under stringency conditions that allow formation of the label probe hybridization complex only in the presence of target. Stringency can be controlled by altering a step parameter that is a thermodynamic variable, including, but not limited to, temperature, formamide concentration, salt concentration, chaotropic salt concentration, pH, organic solvent concentration, etc. These parameters may also be used to control non-specific binding, as is generally outlined in U.S. Pat. No. 5,681,697. Thus it may be desirable to perform certain steps at higher stringency conditions to reduce non-specific binding.

[0217] The reactions outlined herein may be accomplished in a variety of ways, as will be appreciated by those in the art. Components of the reaction may be added simultaneously, or sequentially, in any order, with preferred embodiments outlined below. In addition, the reaction may include a variety of other reagents in the assays. These include reagents like salts, buffers, neutral proteins, e.g. albumin, detergents, etc which may be used to facilitate optimal hybridization and detection, and/or reduce non-specific or background interactions. Also reagents that otherwise improve the efficiency of the assay, such as protease inhibitors, nuclease inhibitors, anti-microbial agents, etc., may be used, depending on the sample preparation methods and purity of the target. In addition, either solid phase or solution based (i.e., kinetic PCR) assays may be used.

[0218] Once the assay is run, the data are analyzed to determine the expression levels, and changes in expression levels as between states, of individual genes, forming a gene expression profile.

[0219] In a preferred embodiment, as for the diagnosis and prognosis applications, having identified the differentially expressed gene(s) or mutated gene(s) important in any one state, screens can be run to test for alteration of the expression of the CA genes individually. That is, screening for modulation of regulation of expression of a single gene can be done. Thus, for example, in the case of target genes whose presence or absence is unique between two states, screening is done for modulators of the target gene expression.

[0220] In addition, screens can be done for novel genes that are induced in response to a candidate agent. After identifying a candidate agent based upon its ability to suppress a CA expression pattern leading to a normal expression pattern, or modulate a single CA gene expression profile so as to mimic the expression of the gene from normal tissue, a screen as described above can be performed to identify genes that are specifically modulated in response to the agent. Comparing expression profiles between normal tissue and agent treated CA tissue reveals genes that are not expressed in normal tissue or CA tissue, but are expressed in agent treated tissue. These agent specific sequences can be identified and used by any of the methods described herein for CA genes or proteins. In particular these sequences and the proteins they encode find use in marking or identifying agent-treated cells. In addition, antibodies can be raised against the agent-induced proteins and used to target novel therapeutics to the treated CA tissue sample.

[0221] Thus, in one embodiment, a candidate agent is administered to a population of CA cells, that thus has an associated CA expression profile. By “administration” or “contacting” herein is meant that the candidate agent is added to the cells in such a manner as to allow the agent to act upon the cell, whether by uptake and intracellular action, or by action at the cell surface. In some embodiments, nucleic acid encoding a proteinaceous candidate agent (i.e. a peptide) may be put into a viral construct such as a retroviral construct and added to the cell, such that expression of the peptide agent is accomplished; see PCT US97/01019, hereby expressly incorporated by reference.

[0222] Once the candidate agent has been administered to the cells, the cells can be washed if desired and are allowed to incubate under preferably physiological conditions for some period of time. The cells are then harvested and a new gene expression profile is generated, as outlined herein.

[0223] Thus, for example, CA tissue may be screened for agents that reduce or suppress the CA phenotype. A change in at least one gene of the expression profile indicates that the agent has an effect on CA activity. By defining such a signature for the CA phenotype, screens for new drugs that alter the phenotype can be devised. With this approach, the drug target need not be known and need not be represented in the original expression screening platform, nor does the level of transcript for the target protein need to change.

[0224] In a preferred embodiment, as outlined above, screens may be done on individual genes and gene products (proteins). That is, having identified a particular differentially expressed gene as important in a particular state, screening of modulators of either the expression of the gene or the gene product itself can be done. The gene products of differentially expressed genes are sometimes referred to herein as “CA proteins” or “CAP”. The CAP may be a fragment, or alternatively, be the full-length protein to the fragment encoded by the nucleic acids of Tables 1-18 (human genomic sequences of SEQ ID NOS: 4, 12, 18, 30, 36, 44, 58, 66, 76, 82, 94, 108, 128, 138, 146, 154, 160 and 170, and sequences of SEQ ID NOS:5, 7, 13, 19, 21, 23, 25, 31, 37, 39, 45, 47, 49, 51, 53, 59, 61, 67, 69, 71, 77, 83, 85, 87, 89, 95, 97, 99, 101, 103, 109, 111, 113, 115, 117, 119, 121, 123, 129, 131, 133, 139, 141, 147, 149, 155, 161, 163, 165, 171, 173 and 175 corresponding to the human mRNAs generated therefrom). In a preferred embodiment, the CAP is selected from the human protein sequences shown in Tables 1-18 (of SEQ ID NOS: 6, 8, 14, 20, 22, 24, 26, 32, 38, 40, 46, 48, 50, 52, 54, 60, 62, 68, 70, 72, 78, 84, 86, 88, 90, 96, 98, 100, 102, 104, 110, 112, 114, 116, 118, 120, 122, 124, 130, 132, 134, 140, 142, 148, 150, 156, 162, 164, 166, 172, 174 and 176). In another embodiment, the sequences are sequence variants as further described herein.

[0225] Preferably, the CAP is a fragment approximately 14 to 24 amino acids in length. More preferably the fragment is a soluble fragment. Preferably, the fragment includes a non-transmembrane region. In a preferred embodiment, the fragment has an N-terminal Cys to aid in solubility. In one embodiment, the C-terminus of the fragment is kept as a free acid and the N-terminus is a free amine to aid in coupling, e.g., to a cysteine.

[0226] In one embodiment the CA proteins are conjugated to an immunogenic agent as discussed herein. In one embodiment the CA protein is conjugated to BSA.

[0227] In a preferred embodiment, screening is done to alter the biological function of the expression product of the CA gene. Again, having identified the importance of a gene in a particular state, screening for agents that bind and/or modulate the biological activity of the gene product can be run as is more fully outlined below.

[0228] In a preferred embodiment, screens are designed to first find candidate agents that can bind to CA proteins, and then these agents may be used in assays that evaluate the ability of the candidate agent to modulate the CAP activity and the cancer phenotype. Thus, as will be appreciated by those in the art, there are a number of different assays that may be run; binding assays and activity assays.

[0229] In a preferred embodiment, binding assays are done. In general, purified or isolated gene product is used; that is, the gene products of one or more CA nucleic acids are made. In general, this is done as is known in the art. For example, antibodies are generated to the protein gene products, and standard immunoassays are run to determine the amount of protein present. Alternatively, cells comprising the CA proteins can be used in the assays.

[0230] Thus, in a preferred embodiment, the methods comprise combining a CA protein and a candidate bioactive agent, and determining the binding of the candidate agent to the CA protein. Preferred embodiments utilize the human or mouse CA protein, although other mammalian proteins may also be used, for example for the development of animal models of human disease. In some embodiments, as outlined herein, variant or derivative CA proteins may be used.

[0231] Generally, in a preferred embodiment of the methods herein, the CA protein or the candidate agent is non-diffusably bound to an insoluble support having isolated sample receiving areas (e.g. a microtiter plate, an array, etc.). The insoluble support may be made of any composition to which the compositions can be bound, is readily separated from soluble material, and is otherwise compatible with the overall method of screening. The surface of such supports may be solid or porous and of any convenient shape. Examples of suitable insoluble supports include microtiter plates, arrays, membranes and beads. These are typically made of glass, plastic (e.g., polystyrene), polysaccharides, nylon or nitrocellulose, Teflon®, etc. Microtiter plates and arrays are especially convenient because a large number of assays can be carried out simultaneously, using small amounts of reagents and samples.

[0232] The particular manner of binding of the composition is not crucial so long as it is compatible with the reagents and overall methods of the invention, maintains the activity of the composition and is nondiffusable. Preferred methods of binding include the use of antibodies (which do not sterically block either the ligand binding site or activation sequence when the protein is bound to the support), direct binding to “sticky” or ionic supports, chemical crosslinking, the synthesis of the protein or agent on the surface, etc. Following binding of the protein or agent, excess unbound material is removed by washing. The sample receiving areas may then be blocked through incubation with bovine serum albumin (BSA), casein or other innocuous protein or other moiety.

[0233] In a preferred embodiment, the CA protein is bound to the support, and a candidate bioactive agent is added to the assay. Alternatively, the candidate agent is bound to the support and the CA protein is added. Novel binding agents include specific antibodies, non-natural binding agents identified in screens of chemical libraries, peptide analogs, etc. Of particular interest are screening assays for agents that have a low toxicity for human cells. A wide variety of assays may be used for this purpose, including labeled in vitro protein-protein binding assays, electrophoretic mobility shift assays, immunoassays for protein binding, functional assays (phosphorylation assays, etc.) and the like.

[0234] The determination of the binding of the candidate bioactive agent to the CA protein may be done in a number of ways. In a preferred embodiment, the candidate bioactive agent is labeled, and binding determined directly. For example, this may be done by attaching all or a portion of the CA protein to a solid support, adding a labeled candidate agent (for example a fluorescent label), washing off excess reagent, and determining whether the label is present on the solid support. Various blocking and washing steps may be utilized as is known in the art.

[0235] By “labeled” herein is meant that the compound is either directly or indirectly labeled with a label which provides a detectable signal, e.g. radioisotope, fluorescers, enzyme, antibodies, particles such as magnetic particles, chemiluminescers, or specific binding molecules, etc. Specific binding molecules include pairs, such as biotin and streptavidin, digoxin and antidigoxin etc. For the specific binding members, the complementary member would normally be labeled with a molecule which provides for detection, in accordance with known procedures, as outlined above. The label can directly or indirectly provide a detectable signal.

[0236] In some embodiments, only one of the components is labeled. For example, the proteins (or proteinaceous candidate agents) may be labeled at tyrosine positions using ¹²⁵I, or with fluorophores. Alternatively, more than one component may be labeled with different labels; using ¹²⁵I for the proteins, for example, and a fluorophore for the candidate agents.

[0237] In a preferred embodiment, the binding of the candidate bioactive agent is determined through the use of competitive binding assays. In this embodiment, the competitor is a binding moiety known to bind to the target molecule (i.e. CA protein), such as an antibody, peptide, binding partner, ligand, etc. Under certain circumstances, there may be competitive binding as between the bioactive agent and the binding moiety, with the binding moiety displacing the bioactive agent.

[0238] In one embodiment, the candidate bioactive agent is labeled. Either the candidate bioactive agent, or the competitor, or both, is added first to the protein for a time sufficient to allow binding, if present. Incubations may be performed at any temperature which facilitates optimal activity, typically between 4 and 40° C. Incubation periods are selected for optimum activity, but may also be optimized to facilitate rapid high throughput screening. Typically between 0.1 and 1 hour will be sufficient. Excess reagent is generally removed or washed away. The second component is then added, and the presence or absence of the labeled component is followed, to indicate binding.

[0239] In a preferred embodiment, the competitor is added first, followed by the candidate bioactive agent. Displacement of the competitor is an indication that the candidate bioactive agent is binding to the CA protein and thus is capable of binding to, and potentially modulating, the activity of the CA protein. In this embodiment, either component can be labeled. Thus, for example, if the competitor is labeled, the presence of label in the wash solution indicates displacement by the agent. Alternatively, if the candidate bioactive agent is labeled, the presence of the label on the support indicates displacement.

[0240] In an alternative embodiment, the candidate bioactive agent is added first, with incubation and washing, followed by the competitor. The absence of binding by the competitor may indicate that the bioactive agent is bound to the CA protein with a higher affinity. Thus, if the candidate bioactive agent is labeled, the presence of the label on the support, coupled with a lack of competitor binding, may indicate that the candidate agent is capable of binding to the CA protein.

[0241] In a preferred embodiment, the methods comprise differential screening to identity bioactive agents that are capable of modulating the activity of the CA proteins. In this embodiment, the methods comprise combining a CA protein and a competitor in a first sample. A second sample comprises a candidate bioactive agent, a CA protein and a competitor. The binding of the competitor is determined for both samples, and a change, or difference in binding between the two samples indicates the presence of an agent capable of binding to the CA protein and potentially modulating its activity. That is, if the binding of the competitor is different in the second sample relative to the first sample, the agent is capable of binding to the CA protein.

[0242] Alternatively, a preferred embodiment utilizes differential screening to identify drug candidates that bind to the native CA protein, but cannot bind to modified CA proteins. The structure of the CA protein may be modeled, and used in rational drug design to synthesize agents that interact with that site. Drug candidates that affect CA bioactivity are also identified by screening drugs for the ability to either enhance or reduce the activity of the protein.

[0243] Positive controls and negative controls may be used in the assays. Preferably all control and test samples are performed in at least triplicate to obtain statistically significant results. Incubation of all samples is for a time sufficient for the binding of the agent to the protein. Following incubation, all samples are washed free of non-specifically bound material and the amount of bound, generally labeled agent determined. For example, where a radiolabel is employed, the samples may be counted in a scintillation counter to determine the amount of bound compound.

[0244] A variety of other reagents may be included in the screening assays. These include reagents like salts, neutral proteins, e.g. albumin, detergents, etc which may be used to facilitate optimal protein-protein binding and/or reduce non-specific or background interactions. Also reagents that otherwise improve the efficiency of the assay, such as protease inhibitors, nuclease inhibitors, anti-microbial agents, etc., may be used. The mixture of components may be added in any order that provides for the requisite binding.

[0245] Screening for agents that modulate the activity of CA proteins may also be done. In a preferred embodiment, methods for screening for a bioactive agent capable of modulating the activity of CA proteins comprise the steps of adding a candidate bioactive agent to a sample of CA proteins, as above, and determining an alteration in the biological activity of CA proteins. “Modulating the activity of a CA protein” includes an increase in activity, a decrease in activity, or a change in the type or kind of activity present. Thus, in this embodiment, the candidate agent should both bind to CA proteins (although this may not be necessary), and alter its biological or biochemical activity as defined herein. The methods include both in vitro screening methods, as are generally outlined above, and in vivo screening of cells for alterations in the presence, distribution, activity or amount of CA proteins.

[0246] Thus, in this embodiment, the methods comprise combining a CA sample and a candidate bioactive agent, and evaluating the effect on CA activity. By “CA activity” or grammatical equivalents herein is meant one of the CA protein's biological activities, including, but not limited to, its role in tumorigenesis, including cell division, preferably in lymphatic tissue, cell proliferation, tumor growth and transformation of cells. In one embodiment, CA activity includes activation of or by a protein encoded by a nucleic acid of Tables 1-18. An inhibitor of CA activity is the inhibition of any one or more CA activities.

[0247] In a preferred embodiment, the activity of the CA protein is increased; in another preferred embodiment, the activity of the CA protein is decreased. Thus, bioactive agents that are antagonists are preferred in some embodiments, and bioactive agents that are agonists may be preferred in other embodiments.

[0248] In a preferred embodiment, the invention provides methods for screening for bioactive agents capable of modulating the activity of a CA protein. The methods comprise adding a candidate bioactive agent, as defined above, to a cell comprising CA proteins. Preferred cell types include almost any cell. The cells contain a recombinant nucleic acid that encodes a CA protein. In a preferred embodiment, a library of candidate agents is tested on a plurality of cells.

[0249] In one aspect, the assays are evaluated in the presence or absence or previous or subsequent exposure of physiological signals, for example hormones, antibodies, peptides, antigens, cytokines, growth factors, action potentials, pharmacological agents including chemotherapeutics, radiation, carcinogenics, or other cells (i.e. cell-cell contacts). In another example, the determinations are determined at different stages of the cell cycle process.

[0250] In this way, bioactive agents are identified. Compourids with pharmacological activity are able to enhance or interfere with the activity of the CA protein.

[0251] Applications of the Invention

[0252] In one embodiment, a method of inhibiting cancer cell division is provided. In another embodiment, a method of inhibiting tumor growth is provided. In a further embodiment, methods of treating cells or individuals with cancer are provided.

[0253] The method comprises administration of a cancer inhibitor. In particular embodiments, the cancer inhibitor is an antisense molecule, a pharmaceutical composition, a therapeutic agent or small molecule, or a monoclonal, polyclonal, chimeric or humanized antibody. In particular embodiments, a therapeutic agent is coupled with a an antibody, preferable a monoclonal antobody.

[0254] In other embodiments, methods for detection or diagnosis of cancer cells in an individual are provided. In particular embodiments, the diagnostic/detection agent is a small molecule that pereferentially binds to a CAP according to the invention. In one embodiment, the diagnostic/detection agent is an antibody, preferably a monoclonal antobody, preferably linked to a detectable agent.

[0255] In other embodiments of the invention, animal models and transgenic animals are provided, which find use in generating animal models of cancers, particularly lymphomas and carcinomas.

[0256] (a) Antisense Molecules

[0257] In one embodiment, the cancer inhibitor is an antisense molecule. Antisense molecules as used herein include antisense or sense oligonucleotides comprising a single-stranded nucleic acid sequence (either RNA or DNA) capable of binding to target mRNA (sense) or DNA (antisense) sequences for cancer molecules. Antisense or sense oligonucleotides, according to the present invention, comprise a fragment generally at least about 14 nucleotides, preferably from about 14 to 30 nucleotides. The ability to derive an antisense or a sense oligonucleotide, based upon a cDNA sequence encoding a given protein is described in, for example, Stein and Cohen, Cancer Res. 48:2659, (1988) and van der Krol et al., BioTechniques 6:958, (1988).

[0258] Antisense molecules may be introduced into a cell containing the target nucleotide sequence by formation of a conjugate with a ligand binding molecule, as described in WO 91/04753. Suitable ligand binding molecules include, but are not limited to, cell surface receptors, growth factors, other cytokines, or other ligands that bind to cell surface receptors. Preferably, conjugation of the ligand binding molecule does not substantially interfere with the ability of the ligand binding molecule to bind to its corresponding molecule or receptor, or block entry of the sense or antisense oligonucleotide or its conjugated version into the cell. Alternatively, a sense or an antisense oligonucleotide may be introduced into a cell containing the target nucleic acid sequence by formation of an oligonucleotide-lipid complex, as described in WO 90/10448. It is understood that the use of antisense molecules or knock out and knock in models may also be used in screening assays as discussed above, in addition to methods of treatment.

[0259] (b) Pharmaceutical Compositions

[0260] Pharmaceutical compositions encompassed by the present invention include as active agent, the polypeptides, polynucleotides, antisense oligonucleotides, or antibodies of the invention disclosed herein in a therapeutically effective amount. An “effective amount” is an amount sufficient to effect beneficial or desired results, including clinical results. An effective amount can be administered in one or more administrations. For purposes of this invention, an effective amount of an adenoviral vector is an amount that is sufficient to palliate, ameliorate, stabilize, reverse, slow or delay the progression of the disease state.

[0261] The compositions can be used to treat cancer as well as metastases of primary cancer. In addition, the pharmaceutical compositions can be used in conjunction with conventional methods of cancer treatment, e.g., to sensitize tumors to radiation or conventional chemotherapy. The terms “treatment”, “treating”, “treat” and the like are used herein to generally refer to obtaining a desired pharmacologic and/or physiologic effect. The effect may be prophylactic in terms of completely or partially preventing a disease or symptom thereof and/or may be therapeutic in terms of a partial or complete stabilization or cure for a disease and/or adverse effect attributable to the disease. “Treatment” as used herein covers any treatment of a disease in a mammal, particularly a human, and includes: (a) preventing the disease or symptom from occurring in a subject. which may be predisposed to the disease or symptom but has not yet been diagnosed as having it; (b) inhibiting the disease symptom, i.e., arresting its development; or (c) relieving the disease symptom, i.e., causing regression of the disease or symptom.

[0262] Where the pharmaceutical composition comprises an antibody that specifically binds to a gene product encoded by a differentially expressed polynucleotide, the antibody can be coupled to a drug for delivery to a treatment site or coupled to a detectable label to facilitate imaging of a site comprising cancer cells, such as prostate cancer cells. Methods for coupling antibodies to drugs and detectable labels are well known in the art, as are methods for imaging using detectable labels.

[0263] A “patient” for the purposes of the present invention includes both humans and other animals, particularly mammals, and organisms. Thus the methods are applicable to both human therapy and veterinary applications. In the preferred embodiment the patient is a mammal, and in the most preferred embodiment the patient is human.

[0264] The term “therapeutically effective amount” as used herein refers to an amount of a therapeutic agent to treat, ameliorate, or prevent a desired disease or condition, or to exhibit a detectable therapeutic or preventative effect. The effect can be detected by, for example, chemical markers or antigen levels. Therapeutic effects also include reduction in physical symptoms, such as decreased body temperature. The precise effective amount for a subject will depend upon the subject's size and health, the nature and extent of the condition, and the therapeutics or combination of therapeutics selected for administration. The effective amount for a given situation is determined by routine experimentation and is within the judgment of the clinician. For purposes of the present invention, an effective dose will generally be from about 0.01 mg/kg to about 5 mg/kg, or about 0.01 mg/kg to about 50 mg/kg or about 0.05 mg/kg to about 10 mg/kg of the compositions of the present invention in the individual to which it is administered.

[0265] A pharmaceutical composition can also contain a pharmaceutically acceptable carrier. The term “pharmaceutically acceptable carrier” refers to a carrier for administration of a therapeutic agent, such as antibodies or a polypeptide, genes, and other therapeutic agents. The term refers to any pharmaceutical carrier that does not itself induce the production of antibodies harmful to the individual receiving the composition, and which can be administered without undue toxicity. Suitable carriers can be large, slowly metabolized macromolecules such as proteins, polysaccharides, polylactic acids, polyglycolic acids, polymeric amino acids, amino acid copolymers, and inactive virus particles. Such carriers are well known to those of ordinary skill in the art. Pharmaceutically acceptable carriers in therapeutic compositions can include liquids such as water, saline, glycerol and ethanol. Auxiliary substances, such as wetting or emulsifying agents, pH buffering substances, and the like, can also be present in such vehicles. Typically, the therapeutic compositions are prepared as injectables, either as liquid solutions or suspensions; solid forms suitable for solution in, or suspension in, liquid vehicles prior to injection can also be prepared. Liposomes are included within the definition of a pharmaceutically acceptable carrier. Pharmaceutically acceptable salts can also be present in the pharmaceutical composition, e.g., mineral acid salts such as hydrochlorides, hydrobromides, phosphates, sulfates, and the like; and the salts of organic acids such as acetates, propionates, malonates, benzoates, and the like. A thorough discussion of pharmaceutically acceptable excipients is available in Remington: The Science and Practice of Pharmacy (1995) Alfonso Gennaro, Lippincott, Williams, & Wilkins.

[0266] The pharmaceutical compositions can be prepared in various forms, such as granules, tablets, pills, suppositories, capsules, suspensions, salves, lotions and the like. Pharmaceutical grade organic or inorganic carriers and/or diluents suitable for oral and topical use can be used to make up compositions containing the therapeutically-active compounds. Diluents known to the art include aqueous media, vegetable and animal oils and fats. Stabilizing agents, wetting and emulsifying agents, salts for varying the osmotic pressure or buffers for securing an adequate pH value, and skin penetration enhancers can be used as auxiliary agents.

[0267] The pharmaceutical compositions of the present invention comprise a CA protein in a form suitable for administration to a patient. In the preferred embodiment, the pharmaceutical compositions are in a water soluble form, such as being present as pharmaceutically acceptable salts, which is meant to include both acid and base addition salts. “Pharmaceutically acceptable acid addition salt” refers to those salts that retain the biological effectiveness of the free bases and that are not biologically or otherwise undesirable, formed with inorganic acids such as hydrochloric acid, hydrobromic acid, sulfuric acid, nitric acid, phosphoric acid and the like, and organic acids such as acetic acid, propionic acid, glycolic acid, pyruvic acid, oxalic acid, maleic acid, malonic acid, succinic acid, fumaric acid, tartaric acid, citric acid, benzoic acid, cinnamic acid, mandelic acid, methanesulfonic acid, ethanesulfonic acid, p-toluenesulfonic acid, salicylic acid and the like. “Pharmaceutically acceptable base addition salts” include those derived from inorganic bases such as sodium, potassium, lithium, ammonium, calcium, magnesium, iron, zinc, copper, manganese, aluminum salts and the like. Particularly preferred are the ammonium, potassium, sodium, calcium, and magnesium salts. Salts derived from pharmaceutically acceptable organic non-toxic bases include salts of primary, secondary, and tertiary amines, substituted amines including naturally occurring substituted amines, cyclic amines and basic ion exchange resins, such as isopropylamine, trimethylamine, diethylamine, triethylamine, tripropylamine, and ethanolamine.

[0268] The pharmaceutical compositions may also include one or more of the following: carrier proteins such as serum albumin; buffers; fillers such as microcrystalline cellulose, lactose, corn and other starches; binding agents; sweeteners and other flavoring agents; coloring agents; and polyethylene glycol. Additives are well known in the art, and are used in a variety of formulations.

[0269] The compounds having the desired pharmacological activity may be administered in a physiologically acceptable carrier to a host, as previously described. The agents may be administered in a variety of ways, orally, parenterally e.g., subcutaneously, intraperitoneally, intravascularly, etc. Depending upon the manner of introduction, the compounds may be formulated in a variety of ways. The concentration of therapeutically active compound in the formulation may vary from about 0.1-100% wgt/vol. Once formulated, the compositions contemplated by the invention can be (1) administered directly to the subject (e.g., as polynucleotide, polypeptides, small molecule agonists or antagonists, and the like); or (2) delivered ex vivo, to cells derived from the subject (e.g., as in ex vivo gene therapy). Direct delivery of the compositions will generally be accomplished by parenteral injection, e.g., subcutaneously, intraperitoneally, intravenously or intramuscularly, intratumoral or to the interstitial space of a tissue. Other modes of administration include oral and pulmonary administration, suppositories, and transdermal applications, needles, and gene guns or hyposprays. Dosage treatment can be a single dose schedule or a multiple dose schedule.

[0270] Methods for the ex vivo delivery and reimplantation of transformed cells into a subject are known in the art and described in e.g., International Publication No. WO 93/14778. Examples of cells useful in ex vivo applications include, for example, stem cells, particularly hematopoetic, lymph cells, macrophages, dendritic cells, or tumor cells. Generally, delivery of nucleic acids for both ex vivo and in vitro applications can be accomplished by, for example, dextran-mediated transfection, calcium phosphate precipitation, polybrene mediated transfection, protoplast fusion, electroporation, encapsulation of the polynucleotide(s) in liposomes, and direct microinjection of the DNA into nuclei, all well known in the art.

[0271] Once differential expression of a gene corresponding to a CA polynucleotide described herein has been found to correlate with a proliferative disorder, such as neoplasia, dysplasia, and hyperplasia, the disorder can be amenable to treatment by administration of a therapeutic agent based on the provided polynucleotide, corresponding polypeptide or other corresponding molecule (e.g., antisense, ribozyme, etc.). In other embodiments, the disorder can be amenable to treatment by administration of a small molecule drug that, for example, serves as an inhibitor (antagonist) of the function of the encoded gene product of a gene having increased expression in cancerous cells relative to normal cells or as an agonist for gene products that are decreased in expression in cancerous cells (e.g., to promote the activity of gene products that act as tumor suppressors).

[0272] The dose and the means of administration of the inventive pharmaceutical compositions are determined based on the specific qualities of the therapeutic composition, the condition, age, and weight of the patient, the progression of the disease, and other relevant factors. For example, administration of polynucleotide therapeutic compositions agents includes local or systemic administration, including injection, oral administration, particle gun or catheterized administration, and topical administration. Preferably, the therapeutic polynucleotide composition contains an expression construct comprising a promoter operably linked to a polynucleotide of at least 12, 22, 25, 30, or 35 contiguous nt of the polynucleotide disclosed herein. Various methods can be used to administer the therapeutic composition directly to a specific site in the body. For example, a small metastatic lesion is located and the therapeutic composition injected several times in several different locations within the body of tumor. Alternatively, arteries that serve a tumor are identified, and the therapeutic composition injected into such an artery, in order to deliver the composition directly into the tumor. A tumor that has a necrotic center is aspirated and the composition injected directly into the now empty center of the tumor. An antisense composition is directly administered to the surface of the tumor, for example, by topical application of the composition. X-ray imaging is used to assist in certain of the above delivery methods.

[0273] Targeted delivery of therapeutic compositions containing an antisense polynucleotide, subgenomic polynucleotides, or antibodies to specific tissues can also be used. Receptor-mediated DNA delivery techniques are described in, for example, Findeis et al., Trends Biotechnol. (1993) 11:202;Chiou et al., Gene Therapeutics: Methods And Applications Of Direct Gene Transfer (J. A. Wolff, ed.) (1994); Wu et al., J. Biol. Chem. (1988) 263:621; Wu et al., J. Biol. Chem. (1994) 269:542; Zenke et al., Proc. Natl. Acad. Sci. (USA) (1990) 87:3655; Wu et al., J. Biol. Chem. (1991) 266:338. Therapeutic compositions containing a polynucleotide are administered in a range,of about 100 ng to about 200 mg of DNA for local administration in a gene therapy protocol. Concentration ranges of about 500 ng to about 50 mg, about 1 μg to about 2 mg, about 5 μg to about 500 μg, and about 20 μg to about 100 μg of DNA can also be used during a gene therapy protocol. Factors such as method of action (e.g., for enhancing or inhibiting levels of the encoded gene product) and efficacy of transformation and expression are considerations that will affect the dosage required for ultimate efficacy of the antisense subgenomic polynucleotides. Where greater expression is desired over a larger area of tissue, larger amounts of antisense subgenomic polynucleotides or the same amounts re-administered in a successive protocol of administrations, or several administrations to different adjacent or close tissue portions of, for example, a tumor site, may be required to effect a positive therapeutic outcome. In all cases, routine experimentation in clinical trials will determine specific ranges for optimal therapeutic effect.

[0274] The therapeutic polynucleotides and polypeptides of the present invention can be delivered using gene delivery vehicles. The gene delivery vehicle can be of viral or non-viral origin (see generally, Jolly, Cancer Gene Therapy (1994) 1:51; Kimura, Human Gene Therapy (1994) 5:845; Connelly, Human Gene Therapy (1995) 1:185; and Kaplitt, Nature Genetics (994) 6:148). Expression of such coding sequences can be induced using endogenous mammalian or heterologous promoters. Expression of the coding sequence can be either constitutive or regulated.

[0275] Viral-based vectors for delivery of a desired polynucleotide and expression in a desired cell are well known in the art. Exemplary viral-based vehicles include, but are not limited to, recombinant retroviruses (see, e.g., WO 90/07936; WO 94/03622; WO 93/25698; WO 93/25234; U.S. Pat. No. 5,219,740; WO 93/11230; WO 93/10218; U.S. Pat. No. 4,777,127; GB Patent No. 2,200,651; EP 0 345 242; and WO 91/02805), alphavirus-based vectors (e.g., Sindbis virus vectors, Semliki forest virus (ATCC VR-67; ATCC VR-1247), Ross River virus (ATCC VR-373; ATCC VR-1246) and Venezuelan equine encephalitis virus (ATCC VR-923; ATCC VR-1250; ATCC VR 1249; ATCC VR-532)), and adeno-associated virus (AAV) vectors (see, e.g., WO 94/12649, WO 93/03769; WO 93/19191; WO 94/28938; WO 95/11984 and WO 95/00655). Administration of DNA linked to killed adenovirus as described in Curiel, Hum. Gene Ther. (1992) 3:147 can also be employed.

[0276] Non-viral delivery vehicles and methods can also be employed, including, but not limited to, polycationic condensed DNA linked or unlinked to killed adenovirus alone (see, e.g., Curiel, Hum. Gene Ther. (1992) 3:147); ligand-linked DNA (see, e.g., Wu, J. Biol. Chem. (1989) 264:16985); eukaryotic cell delivery vehicles cells (see, e.g., U.S. Pat. No. 5,814,482; WO 95/07994; WO 96/17072; WO 95/30763; and WO 97/42338) and nucleic charge neutralization or fusion with cell membranes. Naked DNA can also be employed. Exemplary naked DNA introduction methods are described in WO 90/11092 and U.S. Pat. No. 5,580,859. Liposomes that can act as gene delivery vehicles are described in U.S. Pat. No. 5,422,120; WO 95/13796; WO 94/23697; WO 91/14445; and EP 0524968. Additional approaches are described in Philip, Mol. Cell Biol. (1994) 14:2411, and in Woffendin, Proc. Natl. Acad. Sci. (1994) 91:1581.

[0277] Further non-viral delivery suitable for use includes mechanical delivery systems such as the approach described in Woffendin et al., Proc. Natl. Acad. Sci. USA (1994) 91(24):11581. Moreover, the coding sequence and the product of expression of such can be delivered through deposition of photopolymerized hydrogel materials or use of ionizing radiation (see, e.g., U.S. Pat. No. 5,206,152 and WO 92/11033). Other conventional methods for gene delivery that can be used for delivery of the coding sequence include, for example, use of hand-held gene transfer particle gun (see, e.g., U.S. Pat. No. 5,149,655); use of ionizing radiation for activating transferred gene (see, e.g., U.S. Pat. No. 5,206,152 and WO 92/11033).

[0278] The administration of the CA proteins and modulators of the present invention can be done in a variety of ways as discussed above, including, but not limited to, orally, subcutaneously, intravenously, intranasally, transdermally, intraperitoneally, intramuscularly, intrapulmonary, vaginally, rectally, or intraocularly. In some instances, for example, in the treatment of wounds and inflammation, the CA proteins and modulators may be directly applied as a solution or spray.

[0279] In a preferred embodiment, CA proteins and modulators are administered as therapeutic agents, and can be formulated as outlined above. Similarly, CA genes (including both the full-length sequence, partial sequences, or regulatory sequences of the CA coding regions) can be administered in gene therapy applications, as is known in the art. These CA genes can include antisense applications, either as gene therapy (i.e. for incorporation into the genome) or as antisense compositions, as will be appreciated by those in the art.

[0280] Thus, in one embodiment, methods of modulating CA gene activity in cells or organisms are provided. In one embodiment, the methods comprise administering to a cell an anti-CA antibody that reduces or eliminates the biological activity of an endogenous CA protein. Alternatively, the methods comprise administering to a cell or organism a recombinant nucleic acid encoding a CA protein. As will be appreciated by those in the art, this may be accomplished in any number of ways. In a preferred embodiment, for example when the CA sequence is down-regulated in cancer, the activity of the CA gene product is increased by increasing the amount of CA expression in the cell, for example by overexpressing the endogenous CA gene or by administering a gene encoding the CA sequence, using known gene-therapy techniques. In a preferred embodiment, the gene therapy techniques include the incorporation of the exogenous gene using enhanced homologous recombination (EHR), for example as described in PCT/US93/03868, hereby incorporated by reference in its entirety. Alternatively, for example when the CA sequence is up-regulated in cancer, the activity of the endogenous CA gene is decreased, for example by the administration of a CA antisense nucleic acid.

[0281] (c) Vaccines

[0282] In a preferred embodiment, CA genes are administered as DNA vaccines, either single genes or combinations of CA genes. Naked DNA vaccines are generally known in the art. Brower, Nature Biotechnology, 16:1304-1305 (1998).

[0283] In one embodiment, CA genes of the present invention are used as DNA vaccines. Methods for the use of genes as DNA vaccines are well known to one of ordinary skill in the art, and include placing a CA gene or portion of a CA gene under the control of a promoter for expression in a patient with cancer. The CA gene used for DNA vaccines can encode full-length CA proteins, but more preferably encodes portions of the CA proteins including peptides derived from the CA protein. In a preferred embodiment a patient is immunized with a DNA vaccine comprising a plurality of nucleotide sequences derived from a CA gene. Similarly, it is possible to immunize a patient with a plurality of CA genes or portions thereof. Without being bound by theory, expression of the polypeptide encoded by the DNA vaccine, cytotoxic T-cells, helper T-cells and antibodies are induced that recognize and destroy or eliminate cells expressing CA proteins.

[0284] In a preferred embodiment, the DNA vaccines include a gene encoding an adjuvant molecule with the DNA vaccine. Such adjuvant molecules include cytokines that increase the immunogenic response to the CA polypeptide encoded by the DNA vaccine. Additional or alternative adjuvants are known to those of ordinary skill in the art and find use in the invention.

[0285] (d) Antibodies

[0286] In one embodiment, a cancer inhibitor is an antibody as discussed above. In one embodiment, the CA proteins of the present invention may be used to generate polyclonal and monoclonal antibodies to CA proteins, which are useful as described herein. Similarly, the CA proteins can be coupled, using standard technology, to affinity chromatography columns. These columns may then be used to purify CA antibodies. In a preferred embodiment, the antibodies are generated to epitopes unique to a CA protein; that is, the antibodies show little or no cross-reactivity to other proteins. These antibodies find use in a number of applications. For example, the CA antibodies may be coupled to standard affinity chromatography columns and used to purify CA proteins. The antibodies may also be used therapeutically as blocking polypeptides, as outlined above, since they will specifically bind to the CA protein.

[0287] The present invention further provides methods for detecting the presence of and/or measuring a level of a polypeptide in a biological sample, which CA polypeptide is encoded by a CA polynucleotide that is differentially expressed in a cancer cell, using an antibody specific for the encoded polypeptide. The methods generally comprise: a) contacting the sample with an antibody specific for a polypeptide encoded by a CA polynucleotide that is differentially expressed in a prostate cancer cell; and b) detecting binding between the antibody and molecules of the sample.

[0288] Detection of specific binding of the antibody specific for the encoded cancer-associated polypeptide, when compared to a suitable control is an indication that encoded polypeptide is present in the sample. Suitable controls include a sample known not to contain the encoded CA polypeptide or known not to contain elevated levels of the polypeptide; such as normal tissue, and a sample contacted with an antibody not specific for the, encoded polypeptide, e.g., an anti-idiotype antibody. A variety of methods to detect specific antibody-antigen interactions are known in the art and can be used in the method, including, but not limited to, standard immunohistological methods, immunoprecipitation, an enzyme immunoassay, and a radioimmunoassay. In general, the specific antibody will be detectably labeled, either directly or indirectly. Direct labels include radioisotopes; enzymes whose products are detectable (e.g., luciferase, β-galactosidase, and the like); fluorescent labels (e.g., fluorescein isothiocyanate, rhodamine, phycoerythrin, and the like); fluorescence emitting metals, e.g., ¹⁵²Eu, or others of the lanthanide series, attached to the antibody through metal chelating groups such as EDTA; chemiluminescent compounds, e.g., luminol, isoluminol, acridinium salts, and the like; bioluminescent compounds, e.g., luciferin, aequorin (green fluorescent protein), and the like. The antibody may be attached (coupled) to an insoluble support, such as a polystyrene plate or a bead. Indirect labels include second antibodies specific for antibodies specific for the encoded polypeptide (“first specific antibody”), wherein the second antibody is labeled as described above; and members of specific binding pairs, e.g., biotin-avidin, and the like. The biological sample may be brought into contact with and immobilized on a solid support or carrier, such as nitrocellulose, that is capable of immobilizing cells, cell particles, or soluble proteins. The support may then be washed with suitable buffers, followed by contacting with a detectably-labeled first specific antibody. Detection methods are known in the art and will be chosen as appropriate to the signal emitted by the detectable label. Detection is generally accomplished in comparison to suitable controls, and to appropriate standards.

[0289] In some embodiments, the methods are adapted for use in vivo, e.g., to locate or identify sites where cancer cells are present. In these embodiments, a detectably-labeled moiety, e.g., an antibody, which is specific for a cancer-associated polypeptide is administered to an individual (e.g., by injection), and labeled cells are located using standard imaging techniques, including, but not limited to, magnetic resonance imaging, computed tomography scanning, and the like. In this manner, cancer cells are differentially labeled.

[0290] (e) Detection and Diagnosis of Cancers

[0291] Without being bound by theory, it appears that the various CA sequences are important in cancers. Accordingly, disorders based on mutant or variant CA genes may be determined. In one embodiment, the invention provides methods for identifying cells containing variant CA genes comprising determining all or part of the sequence of at least one endogenous CA genes in a cell. As will be appreciated by those in the art, this may be done using any number of sequencing techniques. In a preferred embodiment, the invention provides methods of identifying the CA genotype of an individual comprising determining all or part of the sequence of at least one CA gene of the individual. This is generally done in at least one tissue of the individual, and may include the evaluation of a number of tissues or different samples of the same tissue. The method may include comparing the sequence of the sequenced CA gene to a known CA gene, i.e., a wild-type gene. As will be appreciated by those in the art, alterations in the sequence of some CA genes can be an indication of either the presence of the disease, or propensity to develop the disease, or prognosis evaluations.

[0292] The sequence of all or part of the CA gene can then be compared to the sequence of a known CA gene to determine if any differences exist. This can be done using any number of known homology programs, such as Bestfit, etc. In a preferred embodiment, the presence of a difference in the sequence between the CA gene of the patient and the known CA gene is indicative of a disease state or a propensity for a disease state, as outlined herein.

[0293] In a preferred embodiment, the CA genes are used as probes to determine the number of copies of the CA gene in the genome. For example, some cancers exhibit chromosomal deletions or insertions, resulting in an alteration in the copy number of a gene.

[0294] In another preferred embodiment CA genes are used as probes to determine the chromosomal location of the CA genes. Information such as chromosomal location finds use in providing a diagnosis or prognosis in particular when chromosomal abnormalities such as translocations, and the like are identified in CA gene loci.

[0295] The present invention provides methods of using the polynucleotides described herein for detecting cancer cells, facilitating diagnosis of cancer and the severity of a cancer (e.g., tumor grade, tumor burden, and the like) in a subject, facilitating a determination of the prognosis of a subject, and assessing the responsiveness of the subject to therapy (e.g., by providing a measure of therapeutic effect through, for example, assessing tumor burden during or following a chemotherapeutic regimen). Detection can be based on detection of a pqlynucleotide that is differentially expressed in a cancer cell, and/or detection of a polypeptide encoded by a polynucleotide that is differentially expressed in a cancer cell. The detection methods of the invention can be conducted in vitro or in vivo, on isolated cells, or in whole tissues or a bodily fluid e.g., blood, plasma, serum, urine, and the like).

[0296] In some embodiments, methods are provided for detecting a cancer cell by detecting expression in the cell of a transcript that is differentially expressed in a cancer cell. Any of a variety of known methods can be used for detection, including, but not limited to, detection of a transcript by hybridization with a polynucleotide that hybridizes to a polynucleotide that is differentially expressed in a prostate cancer cell; detection of a transcript by a polymerase chain reaction using specific oligonucleotide primers; in situ hybridization of a cell using as a probe a polynucleotide that hybridizes to a gene that is differentially expressed in a prostate cancer cell. The methods can be used to detect and/or measure mRNA levels of a gene that is differentially expressed in a cancer cell. In some embodiments, the methods comprise: a) contacting a sample with a polynucleotide that corresponds to a differentially expressed gene described herein under conditions that allow hybridization; and b) detecting hybridization, if any.

[0297] Detection of differential hybridization, when compared to a suitable control, is an indication of the presence in the sample of a polynucleotide that is differentially expressed in a cancer cell. Appropriate controls include, for example, a sample that is known not to contain a polynucleotide that is differentially expressed in a cancer cell, and use of a labeled polynucleotide of the same “sense” as the polynucleotide that is differentially expressed in the cancer cell. Conditions that allow hybridization are known in the art, and have been described in more detail above. Detection can also be accomplished by any known method, including, but not limited to, in situ hybridization, PCR (polymerase chain reaction), RT-PCR (reverse transcription-PCR), TMA, bDNA, and Nasbau and “Northern” or RNA blotting, or combinations of such techniques, using a suitably labeled polynucleotide. A variety of labels and labeling methods for polynucleotides are known in the art and can be used in the assay methods of the invention. Specificity of hybridization can be determined by comparison to appropriate controls.

[0298] Polynucleotides generally comprising at least 10 nt, at least 12 nt or at least 15 contiguous nucleotides of a polynucleotide provided herein, such as, for example, those having the sequence as depicted in Tables 1-18, are used for a variety of purposes, such as probes for detection of and/or measurement of, transcription levels of a polynucleotide that is differentially expressed in a prostate cancer cell. As will be readily appreciated by the ordinarily skilled artisan, the probe can be detectably labeled and contacted with, for example, an array comprising immobilized polynucleotides obtained from a test sample (e.g., mRNA). Alternatively, the probe can be immobilized on an array and the test sample detectably labeled. These and other variations of the methods of the invention are well within the skill in the art and are within the scope of the invention.

[0299] Nucleotide probes are used to detect expression of a gene corresponding to the provided polynucleotide. In Northern blots, mRNA is separated electrophoretically and contacted with a probe. A probe is detected as hybridizing to an mRNA species of a particular size. The amount of hybridization can be quantitated to determine relative amounts of expression, for example under a particular condition. Probes are used for in situ hybridization to cells to detect expression. Probes can also be used in vivo for diagnostic detection of hybridizing sequences. Probes are typically labeled with a radioactive isotope. Other types of detectable labels can be used such as chromophores, fluorophores, and enzymes. Other examples of nucleotide hybridization assays are described in WO92/02526 and U.S. Pat. No. 5,124,246.

[0300] PCR is another means for detecting small amounts of target nucleic acids (see, e.g., Mullis et al., Meth. Enzymol. (1987) 155:335; U.S. Pat. No. 4,683,195; and U.S. Pat. No. 4,683,202). Two primer oligonucleotides that hybridize with the target nucleic acids are used to prime the reaction. The primers can be composed of sequence within or 3′ and 5′ to the CA polynucleotides disclosed herein. Alternatively, if the primers are 3′ and 5′ to these polynucleotides, they need not hybridize to them or the complements. After amplification of the target with a thermostable polymerase, the amplified target nucleic acids can be detected by methods known in the art, e.g., Southern blot. mRNA or cDNA can also be detected by traditional blotting techniques (e.g., Southern blot, Northern blot, etc.) described in Sambrook et al., “Molecular Cloning: A Laboratory Manual” (New York, Cold Spring Harbor Laboratory, 1989) (e.g., without PCR amplification). In general, mRNA or cDNA generated from mRNA using a polymerase enzyme can be purified and separated using gel electrophoresis, and transferred to a solid support, such as nitrocellulose. The solid support is exposed to a labeled probe, washed to remove any unhybridized probe, and duplexes containing the labeled probe are detected.

[0301] Methods using PCR amplification can be performed on the DNA from a single cell, although it is convenient to use at least about 10⁵ cells. The use of the polymerase chain reaction is described in Saiki et al. (1985) Science 239:487, and a review of current techniques may be found in Sambrook, et al. Molecular Cloning: A Laboratory Manual, CSH Press 1989, pp.14.2-14.33. A detectable label may be included in the amplification reaction. Suitable detectable labels include fluorochromes,(e.g. fluorescein isothiocyanate (FITC), rhodamine, Texas Red, phycoerythrin, allophycocyanin, 6-carboxyfluorescein (6-FAM), 2′,7′-dimethoxy-4′,5′-dichloro-6-carboxyfluorescein, 6-carboxy-X-rhodamine (ROX), 6-carboxy-2′,4′,7′,4,7-hexachlorofluorescein (HEX), 5-carboxyfluorescein (5-FAM) or N,N,N′,N′-tetramethyl-6-carboxyrhodamine (TAMRA)), radioactive labels, (e.g. ³²p, ³⁵S, ³H, etc.), and the like. The label may be a two stage system, where the polynucleotides is conjugated to biotin, haptens, etc. having a high affinity binding partner, e.g. avidin, specific antibodies, etc., where the binding partner is conjugated to a detectable label. The label may be conjugated to one or both of the primers. Alternatively, the pool of nucleotides used in the amplification is labeled, so as to incorporate the label into the amplification product.

[0302] The detection methods can be provided as part of a kit. Thus, the invention further provides kits for detecting the presence and/or a level of a polynucleotide that is differentially expressed in a cancer cell (e.g., by detection of an mRNA encoded by the differentially expressed gene of interest), and/or a polypeptide encoded thereby, in a biological sample. Procedures using these kits can be performed by clinical laboratories, experimental laboratories, medical practitioners, or private individuals. The kits of the invention for detecting a polypeptide encoded by a polynucleotide that is differentially expressed in a cancer cell may comprise a moiety that specifically binds the polypeptide, which may be an antibody that binds the polypeptide or fragment thereof. The kits of the invention used for detecting a polynucleotide that is differentially expressed in a prostate cancer cell may comprise a moiety that specifically hybridizes to such a polynucleotide. The kit may optionally provide additional components that are useful in the procedure, including, but not limited to,. buffers, developing reagents, labels, reacting surfaces, means for detection, control samples, standards, instructions, and interpretive information. Accordingly, the present invention provides kits for detecting prostate cancer comprising at least one of polynucleotides having the sequence as shown in Tables 1-18 or fragments thereof.

[0303] The present invention further relates to methods of detecting/diagnosing a neoplastic or preneoplastic condition in a mammal (for example, a human). “Diagnosis” as used herein generally includes determination of a subject's susceptibility to a disease or disorder, determination as to whether a subject is presently affected by a disease or disorder, prognosis of a subject affected by a disease or disorder (e.g., identification of pre-metastatic or metastatic cancerous states, stages of cancer, or responsiveness of cancer to therapy), and therametrics (e.g., monitoring a subject's condition to provide information as to the effect or efficacy of therapy).

[0304] The terms “treatment”, “treating”, “treat” and the like are used herein to generally refer to obtaining a desired pharmacologic and/or physiologic effect. The effect may be prophylactic in terms of completely or partially preventing a disease or symptom thereof and/or may be therapeutic in terms of a partial or complete stabilization or cure for a disease and/or adverse effect attributable to the disease. “Treatment” as used herein covers any treatment of a disease in a mammal, particularly a human, and includes:(a) preventing the disease or symptom from occurring in a subject which may be predisposed to the disease or symptom but has not yet been diagnosed as having it; (b) inhibiting the disease symptom, i.e., arresting its development; or (c) relieving the disease symptom, i.e., causing regression of the disease or symptom.

[0305] An “effective amount” is an amount sufficient to effect beneficial or desired results, including clinical results. An effective amount can be administered in one or more administrations.

[0306] A “cell sample” encompasses a variety of sample types obtained from an individual and can be used in a diagnostic or monitoring assay. The definition encompasses blood and other liquid samples of biological origin, solid tissue samples such as a biopsy specimen or tissue cultures or cells derived therefrom, and the progeny thereof. The definition also includes samples that have been manipulated in any way after their procurement, such as by treatment with reagents, solubilization, or enrichment for certain components, such as proteins or polynucleotides. The term “cell sample” encompasses a clinical sample, and also includes cells in culture, cell supernatants, cell lysates, serum, plasma, biological fluid, and tissue samples.

[0307] As used herein, the terms “neoplastic cells”, “neoplasia”, “tumor”, “tumor cells”, “cancer” and “cancer cells”, (used interchangeably) refer to cells which exhibit relatively autonomous growth, so that they exhibit an aberrant growth phenotype characterized by a significant loss of control of cell proliferation (i.e., de-regulated cell division). Neoplastic cells can be malignant or benign.

[0308] The terms “individual,” “subject,” “host,” and “patient,” are used interchangeably herein and refer to any mammalian subject for whom diagnosis, treatment, or therapy is desired, particularly humans. Other subjects may include cattle, dogs, cats, guinea pigs, rabbits, rats, mice, horses, and so on. Examples of conditions that can be detected/diagnosed in accordance with these methods include cancers. Polynucleotides corresponding to genes that exhibit the appropriate expression pattern can be used to detect cancer in a subject. For a review of markers of cancer, see, e.g., Hanahan et al. Cell 100:57-70 (2000).

[0309] One detection/diagnostic method comprises: (a) obtaining from a mammal (e.g., a human) a biological sample, (b) detecting the presence in the sample of a CA protein and (c) comparing the amount of product present with that in a control sample. In accordance with this method, the presence in the sample of elevated levels of a CA gene product indicates that the subject has a neoplastic or preneoplastic condition.

[0310] Biological samples suitable for use in this method include biological fluids such as serum, plasma, pleural effusions, urine and cerebro-spinal fluid, CSF, tissue samples (e.g., mammary tumor or prostate tissue slices) can also be used in the method of the invention, including samples derived from biopsies. Cell cultures or cell extracts derived, for example, from tissue biopsies can also be used.

[0311] The compound is preferably a binding protein, e.g., an antibody, polyclonal or monoclonal, or antigen binding fragment thereof, which can be labeled with a detectable marker (e.g., fluorophore, chromophore or isotope, etc). Where appropriate, the compound can be attached to a solid support such as a bead, plate, filter, resin, etc. Determination of formation of the complex can be effected by contacting the complex with a further compound (e.g., an antibody) that specifically binds to the first compound (or complex). Like the first compound, the further compound can be attached to a solid support and/or can be labeled with a detectable marker.

[0312] The identification of elevated levels of CA protein in accordance with the present invention makes possible the identification of subjects (patients) that are likely to benefit from adjuvant therapy. For example, a biological sample from a post primary therapy subject (e.g., subject having undergone surgery) can be screened for the presence of circulating CA protein, the presence of elevated levels of the protein, determined by studies of normal populations, being indicative of residual tumor tissue. Similarly, tissue from the cut site of a surgically removed tumor can be examined (e.g., by immunofluorescence), the presence of elevated levels of product (relative to the surrounding tissue) being indicative of incomplete removal of the tumor. The ability to identify such subjects makes it possible to tailor therapy to the needs of the particular subject. Subjects undergoing non-surgical therapy, e.g., chemotherapy or radiation therapy, can also be monitored, the presence in samples from such subjects of elevated levels of CA protein being indicative of the need for continued treatment. Staging of the disease (for example, for purposes of optimizing treatment regimens) can also be effected, for example, by biopsy e.g., with antibody specific for a CA protein.

[0313] (f) Animal Models and Transgenics

[0314] In another preferred embodiment CA genes find use in generating animal models of cancers, particularly lymphomas and carcinomas. As is appreciated by one of ordinary skill in the art, when the CA gene identified is repressed or diminished in CA tissue, gene therapy technology wherein antisense RNA directed to the CA gene will also diminish or repress expression of the gene. An animal generated as such serves as an animal model of CA that finds use in screening bioactive drug candidates. Similarly, gene knockout technology, for example as a result of homologous recombination with an appropriate gene targeting vector, will result in the absence of the CA protein. When desired, tissue-specific expression or knockout of the CA protein may be necessary.

[0315] It is also possible that the CA protein is overexpressed in cancer. As such, transgenic animals can be generated that overexpress the CA protein. Depending on the desired expression level, promoters of various strengths can be employed to express the transgene. Also, the number of copies of the integrated transgene can be determined and compared for a determination of the expression level of the transgene. Animals generated by such methods find use as animal models of CA and are additionally useful in screening for bioactive molecules to treat cancer.

[0316] Characterization of CA Sequences

[0317] The CA nucleic acid sequences of the invention are depicted in Tables 1-18. The sequences in each Table include genomic DNA sequence (mouse genomic sequences mDxx-yyy; human genomic sequences hDxx-yyy), sequence corresponding to the. mRNA(s) generated therefrom (mRxx-yyy; hRxx-yyy) and amino acid sequences of the proteins (mPxx-yyy; hPxx-yyy) encoded by the mRNA for both mouse and human genes. N/A indicates a gene that has been identified, but for which there has not been a name ascribed.

[0318] The mouse and human genomic DNA sequence, sequence corresponding to the mRNA(s) generated therefrom and amino acid sequences of the proteins as shown in Tables 1-18 are described according to SEQ ID NOS as follows in Table 19.

TABLE 19

| DESIGNATION | SEQ ID NO: | TYPE OF SEQUENCE |
|---|---|---|
| mD6-184 | SEQ ID NO: 1 | MOUSE GENOMIC SEQUENCE |
| mR6-184 | SEQ ID NO: 2 | MOUSE mRNA SEQUENCE |
| mP6-184 | SEQ ID NO: 3 | MOUSE PROTEIN SEQUENCE |
| hD6-184 | SEQ ID NO: 4 | HUMAN GENOMIC SEQUENCE |
| hR6-184.1 | SEQ ID NO: 5 | HUMAN mRNA SEQUENCE |
| hP6-184.1 | SEQ ID NO: 6 | HUMAN PROTEIN SEQUENCE |
| hR6-184.2 | SEQ ID NO: 7 | HUMAN mRNA SEQUENCE |
| hP6-184.2 | SEQ ID NO: 8 | HUMAN PROTEIN SEQUENCE |
| mD7-165 | SEQ ID NO: 9 | MOUSE GENOMIC SEQUENCE |
| mR7-165 | SEQ ID NO: 10 | MOUSE mRNA SEQUENCE |
| mP7-165 | SEQ ID NO: 11 | MOUSE PROTEIN SEQUENCE |
| hD7-165 | SEQ ID NO: 12 | HUMAN GENOMIC SEQUENCE |
| hR7-165 | SEQ ID NO: 13 | HUMAN mRNA SEQUENCE |
| hP7-165 | SEQ ID NO: 14 | HUMAN PROTEIN SEQUENCE |
| mD13-070 | SEQ ID NO: 15 | MOUSE GENOMIC SEQUENCE |
| mR13-070 | SEQ ID NO: 16 | MOUSE mRNA SEQUENCE |
| mP13-070 | SEQ ID NO: 17 | MOUSE PROTEIN SEQUENCE |
| hD13-070 | SEQ ID NO: 18 | HUMAN GENOMIC SEQUENCE |
| hR13-070.1 | SEQ ID NO: 19 | HUMAN mRNA SEQUENCE |
| hP13-070.1 | SEQ ID NO: 20 | HUMAN PROTEIN SEQUENCE |
| hR13-070.2 | SEQ ID NO: 21 | HUMAN mRNA SEQUENCE |
| hP13-070.2 | SEQ ID NO: 22 | HUMAN PROTEIN SEQUENCE |
| hR13-070.3 | SEQ ID NO: 23 | HUMAN mRNA SEQUENCE |
| hP13-070.3 | SEQ ID NO: 24 | HUMAN PROTEIN SEQUENCE |
| hR13-070.4 | SEQ ID NO: 25 | HUMAN mRNA SEQUENCE |
| hP13-070.4 | SEQ ID NO: 26 | HUMAN PROTEIN SEQUENCE |
| mD13-073 | SEQ ID NO: 27 | MOUSE GENOMIC SEQUENCE |
| mR13-073 | SEQ TD NO: 28 | MOUSE mRNA SEQUENCE |
| mPl3-073 | SEQ ID NO: 29 | MOUSE PROTETN SEQUENCE |
| hD13-073 | SEQ ID NO: 30 | HUMAN GENOMIC SEQUENCE |
| hR13-073 | SEQ ID NO: 31 | HUMAN mRNA SEQUENCE |
| hP13-073 | SEQ ID NO: 32 | HUMAN PROTEIN SEQUENCE |
| mD13-075 | SEQ ID NO: 33 | MOUSE GENOMIC SEQUENCE |
| mR13-075 | SEQ ID NO: 34 | MOUSE mRNA SEQUENCE |
| mP13-075 | SEQ ID NO: 35 | MOUSE PROTEIN SEQUENCE |
| hD13-075 | SEQ ID NO: 36 | HUMAN GENOMIC SEQUENCE |
| hR13-075.1 | SEQ ID NO: 37 | HUMAN mRNA SEQUENCE |
| hP13-075.1 | SEQ ID NO: 38 | HUMAN PROTEIN SEQUENCE |
| hR13-075.2 | SEQ ID NO: 39 | HUMAN mRNA SEQUENCE |
| hP13-075.2 | SEQ ID NO: 40 | HUMAN PROTEIN SEQUENCE |
| mD13-080 | SEQ ID NO: 41 | MOUSE GENOMIC SEQUENCE |
| mR13-080 | SEQ ID NO: 42 | MOUSE mRNA SEQUENCE |
| mP13-080 | SEQ ID NO: 43 | MOUSE PROTEIN SEQUENCE |
| hD13-080 | SEQ ID NO: 44 | HUMAN GENOMIC SEQUENCE |
| hR13-080.1 | SEQ ID NO: 45 | HUMAN mRNA SEQUENCE |
| hP13-080.1 | SEQ ID NO: 46 | HUMAN PROTEIN SEQUENCE |
| hR13-080.2 | SEQ ID NO: 47 | HUMAN mRNA SEQUENCE |
| hP13-080.2 | SEQ ID NO: 48 | HUMAN PROTEIN SEQUENCE |
| hR13-080.3 | SEQ ID NO: 49 | HUMAN mRNA SEQUENCE |
| hP13-080.3 | SEQ ID NO: 50 | HUMAN PROTEIN SEQUENCE |
| hR13-080.4 | SEQ ID NO: 51 | HUMAN mRNA SEQUENCE |
| hP13-080.4 | SEQ ID NO: 52 | HUMAN PROTEIN SEQUENCE |
| hR13-080.5 | SEQ ID NO: 53 | HUMAN mRNA SEQUENCE |
| hP13-080.5 | SEQ ID NO: 54 | HUMAN PROTEIN SEQUENCE |
| mD13-117 | SEQ ID NO: 55 | MOUSE GENOMIC SEQUENCE |
| mR13-117 | SEQ ID NO: 56 | MOUSE mRNA SEQUENCE |
| mP13-117 | SEQ ID NO: 57 | MOUSE PROTEIN SEQUENCE |
| hD13-117 | SEQ ID NO: 58 | HUMAN GENOMIC SEQUENCE |
| hR13-117.1 | SEQ ID NO: 59 | HUMAN mRNA SEQUENCE |
| hP13-117.1 | SEQ ID NO: 60 | HUMAN PROTEIN SEQUENCE |
| hR13-117.2 | SEQ ID NO: 61 | HUMAN mRNA SEQUENCE |
| hP13-117.2 | SEQ ID NO: 62 | HUMAN PROTEIN SEQUENCE |
| mD14-014 | SEQ ID NO: 63 | MOUSE GENOMIC SEQUENCE |
| mR14-014 | SEQ ID NO: 64 | MOUSE mRNA SEQUENCE |
| mP14-014 | SEQ ID NO: 65 | MOUSE PROTEIN SEQUENCE |
| hD14-014 | SEQ ID NO: 66 | HUMAN GENOMIC SEQUENCE |
| hR14-014.1 | SEQ ID NO: 67 | HUMAN mRNA SEQUENCE |
| hP14-014.1 | SEQ ID NO: 68 | HUMAN PROTEIN SEQUENCE |
| hR14-014.2 | SEQ ID NO: 69 | HUMAN mRNA SEQUENCE |
| hP14-014.2 | SEQ ID NO: 70 | HUMAN PROTEIN SEQUENCE |
| hR14-014.3 | SEQ ID NO: 71 | HUMAN mRNA SEQUENCE |
| hP14-014.3 | SEQ ID NO: 72 | HUMAN PROTEIN SEQUENCE |
| mD16-001 | SEQ TD NO: 73 | MOUSE GENOMIC SEQUENCE |
| mR16-001 | SEQ ID NO: 74 | MOUSE mRNA SEQUENCE |
| mP16-001 | SEQ ID NO: 75 | MOUSE PROTEIN SEQUENCE |
| hD16-001 | SEQ ID NO: 76 | HUMAN GENOMIC SEQUENCE |
| hR16-001 | SEQ ID NO: 77 | HUMAN mRNA SEQUENCE |
| hP16-001 | SEQ ID NO: 78 | HUMAN PROTEIN SEQUENCE |
| mD16-028 | SEQ ID NO: 79 | MOUSE GENOMIC SEQUENCE |
| mR16-028 | SEQ ID NO: 80 | MOUSE mRNA SEQUENCE |
| mP16-028 | SEQ ID NO: 81 | MOUSE PROTEIN SEQUENCE |
| hD16-028 | SEQ ID NO: 82 | HUMAN GENOMIC SEQUENCE |
| hR16-028.1 | SEQ ID NO: 83 | HUMAN mRNA SEQUENCE |
| hP16-028.1 | SEQ ID NO: 84 | HUMAN PROTEIN SEQUENCE |
| hR16-028.2 | SEQ ID NO: 85 | HUMAN mRNA SEQUENCE |
| hP16-028.2 | SEQ ID NO: 86 | HUMAN PROTEIN SEQUENCE |
| hR16-028.3 | SEQ ID NO: 87 | HUMAN mRNA SEQUENCE |
| hP16-028.3 | SEQ ID NO: 88 | HUMAN PROTEIN SEQUENCE |
| hR16-028.4 | SEQ ID NO: 89 | HUMAN mRNA SEQUENCE |
| hP16-028.4 | SEQ ID NO: 90 | HUMAN PROTEIN SEQUENCE |
| mD16-030 | SEQ ID NO: 91 | MOUSE GENOMIC SEQUENCE |
| mR16-030 | SEQ ID NO: 92 | MOUSE mRNA SEQUENCE |
| mP16-030 | SEQ ID NO: 93 | MOUSE PROTEIN SEQUENCE |
| hD16-030 | SEQ ID NO: 94 | HUMAN GENOMIC SEQUENCE |
| hR16-030.1 | SEQ ID NO: 95 | HUMAN mRNA SEQUENCE |
| hP16-030.1 | SEQ ID NO: 96 | HUMAN PROTEIN SEQUENCE |
| hR16-030.2 | SEQ ID NO: 97 | HUMAN mRNA SEQUENCE |
| hP16-030.2 | SEQ ID NO: 98 | HUMAN PROTEIN SEQUENCE |
| hR16-030.3 | SEQ ID NO: 99 | HUMAN mRNA SEQUENCE |
| hP16-030.3 | SEQ ID NO: 100 | HUMAN PROTEIN SEQUENCE |
| hR16-030.4 | SEQ ID NO: 101 | HUMAN mRNA SEQUENCE |
| hP16-030.4 | SEQ ID NO: 102 | HUMAN PROTEIN SEQUENCE |
| hR16-030.5 | SEQ ID NO: 103 | HUMAN mRNA SEQUENCE |
| hP16-030.5 | SEQ ID NO: 104 | HUMAN PROTEIN SEQUENCE |
| mD16-031 | SEQ ID NO: 105 | MOUSE GENOMIC SEQUENCE |
| mR16-031 | SEQ ID NO: 106 | MOUSE mRNA SEQUENCE |
| mP16-031 | SEQ ID NO: 107 | MOUSE PROTEIN SEQUENCE |
| hD16-031 | SEQ ID NO: 108 | HUMAN GENOMIC SEQUENCE |
| hR16-031.1 | SEQ ID NO: 109 | HUMAN mRNA SEQUENCE |
| hP16-031.1 | SEQ ID NO: 110 | HUMAN PROTEIN SEQUENCE |
| hR16-031.2 | SEQ ID NO: 111 | HUMAN mRNA SEQUENCE |
| hP16-031.2 | SEQ ID NO: 112 | HUMAN PROTEIN SEQUENCE |
| hR16-031.3 | SEQ ID NO: 113 | HUMAN mRNA SEQUENCE |
| hP16-031.3 | SEQ ID NO: 114 | HUMAN PROTEIN SEQUENCE |
| hR16-031.4 | SEQ ID NO: 115 | HUMAN mRNA SEQUENCE |
| hP16-031.4 | SEQ ID NO: 116 | HUMAN PROTEIN SEQUENCE |
| hR16-031.5 | SEQ ID NO: 117 | HUMAN mRNA SEQUENCE |
| hP16-031.5 | SEQ ID NO: 118 | HUMAN PROTEIN SEQUENCE |
| hR16-031.6 | SEQ ID NO: 119 | HUMAN mRNA SEQUENCE |
| hP16-031.6 | SEQ ID NO: 120 | HUMAN PROTEIN SEQUENCE |
| hR16-031.7 | SEQ ID NO: 121 | HUMAN mRNA SEQUENCE |
| hP16-031.7 | SEQ ID NO: 122 | HUMAN PROTEIN SEQUENCE |
| hR16-031.8 | SEQ ID NO: 123 | HUMAN mRNA SEQUENCE |
| hP16-031.8 | SEQ ID NO: 124 | HUMAN PROTEIN SEQUENCE |
| mD16-032 | SEQ ID NO: 125 | MOUSE GENOMIC SEQUENCE |
| mR16-032 | SEQ ID NO: 126 | MOUSE mRNA SEQUENCE |
| mP16-032 | SEQ TD NO: 127 | MOUSE PROTEIN SEQUENCE |
| hD16-032 | SEQ ID NO: 128 | HUMAN GENOMIC SEQUENCE |
| hR16-032.1 | SEQ ID NO: 129 | HUMAN mRNA SEQUENCE |
| hP16-032.1 | SEQ ID NO: 130 | HUMAN PROTEIN SEQUENCE |
| hR16-032.2 | SEQ ID NO: 131 | HUMAN mRNA SEQUENCE |
| hP16-032.2 | SEQ ID NO: 132 | HUMAN PROTEIN SEQUENCE |
| hR16-032.3 | SEQ ID NO: 133 | HUMAN mRNA SEQUENCE |
| hP16-032.3 | SEQ ID NO: 134 | HUMAN PROTEIN SEQUENCE |
| mD16-038 | SEQ ID NO: 135 | MOUSE GENOMIC SEQUENCE |
| mR16-038 | SEQ TD NO: 136 | MOUSE mRNA SEQUENCE |
| mP16-038 | SEQ ID NO: 137 | MOUSE PROTEIN SEQUENCE |
| hD16-038 | SEQ ID NO: 138 | HUMAN GENOMIC SEQUENCE |
| hR16-038.1 | SEQ ID NO: 139 | HUMAN mRNA SEQUENCE |
| hP16-038.1 | SEQ ID NO: 140 | HUMAN PROTEIN SEQUENCE |
| hR16-038.2 | SEQ ID NO: 141 | HUMAN mRNA SEQUENCE |
| hP16-038.2 | SEQ ID NO: 142 | HUMAN PRQTEIN SEQUENCE |
| mD16-039 | SEQ ID NO: 143 | MOUSE GENOMIC SEQUENCE |
| mR16-039 | SEQ ID NO: 144 | MOUSE mRNA SEQUENCE |
| mP16-039 | SEQ ID NO: 145 | MOUSE PROTEIN SEQUENCE |
| hD16-039 | SEQ ID NO: 146 | HUMAN GENOMIC SEQUENCE |
| hR16-039.1 | SEQ ID NO: 147 | HUMAN mRNA SEQUENCE |
| hP16-039.1 | SEQ ID NO: 148 | HUMAN PROTEIN SEQUENCE |
| hR16-039.2 | SEQ ID NO: 149 | HUMAN mRNA SEQUENCE |
| hP16-039.2 | SEQ ID NO: 150 | HUMAN PROTEIN SEQUENCE |
| mD16-042 | SEQ ID NO: 151 | MOUSE GENOMIC SEQUENCE |
| mR16-042 | SEQ ID NO: 152 | MOUSE mRNA SEQUENCE |
| mP16-042 | SEQ ID NO: 153 | MOUSE PROTEIN SEQUENCE |
| hD16-042 | SEQ ID NO: 154 | HUMAN GENOMIC SEQUENCE |
| hR16-042 | SEQ ID NO: 155 | HUMAN mRNA SEQUENCE |
| hP16-042 | SEQ ID NO: 156 | HUMAN PROTEIN SEQUENCE |
| mD16-049 | SEQ ID NO: 157 | MOUSE GENOMIC SEQUENCE |
| mR16-049 | SEQ ID NO: 158 | MOUSE mRNA SEQUENCE |
| mP16-049 | SEQ ID NO: 159 | MOUSE PROTEIN SEQUENCE |
| hD16-049 | SEQ ID NO: 160 | HUMAN GENOMIC SEQUENCE |
| hR16-049.1 | SEQ ID NO: 161 | HUMAN mRNA SEQUENCE |
| hP16-049.1 | SEQ ID NO: 162 | HUMAN PROTEIN SEQUENCE |
| hR16-049.2 | SEQ ID NO: 163 | HUMAN mRNA SEQUENCE |
| hP16-049.2 | SEQ ID NO: 164 | HUMAN PROTEIN SEQUENCE |
| hR16-049.3 | SEQ ID NO: 165 | HUMAN mRNA SEQUENCE |
| hP16-049.3 | SEQ ID NO: 166 | HUMAN PROTEIN SEQUENCE |
| mD16-063 | SEQ ID NO: 167 | MOUSE GENOMIC SEQUENCE |
| mR16-063 | SEQ ID NO: 168 | MOUSE mRNA SEQUENCE |
| mP16-063 | SEQ ID NO: 169 | MOUSE PROTEIN SEQUENCE |
| hD16-063 | SEQ ID NO: 170 | HUMAN GENOMIC SEQUENCE |
| hR16-063.1 | SEQ ID NO: 171 | HUMAN mRNA SEQUENCE |
| hP16-063.1 | SEQ ID NO: 172 | HUMAN PROTEIN SEQUENCE |
| hR16-063.2 | SEQ ID NO: 173 | HUMAN mRNA SEQUENCE |
| hP16-063.2 | SEQ ID NO: 174 | HUMAN PROTEIN SEQUENCE |
| hR16-063.3 | SEQ ID NO: 175 | HUMAN mRNA SEQUENCE |
| hP16-063.3 | SEQ ID NO: 176 | HUMAN PROTEIN SEQUENCE |

[0319] The CA sequences were analyzed by Panther™ (Molecular Diagnostics, Palo Alto, Calif.) software designed to detect homologs and enable prediction of molecular function through a system for protein functional classification. Human Gene Ontlogy annotations were prepared in accordance with the Gene Ontology Consortium (Gene Ontology: tool for the unification of biology. The Gene Ontology Consortium Nature Genet. 25: 25-29 (2000)). Similar analysis was carried out by determining IPR information regarding the CA polypeptides from InterPro, which is an integrated documentation resource for protein families, domains and functional sites (Apweiler at al. Bioinformatics 16(12):1145-1150 (2000)).

[0320] The CA sequences may be classified according to the following predicted general classifications of function by Panther™ analysis, human gene ontology and IPR domain information for polypeptides haying SEQ ID NOS: 6, 8, 14, 20, 22, 24, 26, 32, 38, 40, 46, 48, 50, 52, 54, 60, 62, 68, 70, 72, 78, 84, 86, 88, 90, 96, 98, 100, 102, 104, 110, 112, 114, 116, 118, 120, 122, 124, 130, 132, 134, 140, 142, 148, 150, 156, 162, 164, 166, 172, 174 and 176 as shown in Tables 1-18. The classifications are shown in Table 20 below.

TABLE 20

| HUMAN | |
|---|---|
| PROTEIN | CLASSIFICATION |
| hP6-184.1 | HUMAN PANTHER CLASSIFICATIONS |
| (Seq ID No: 6) | FAMILY (SUBFAMILY) |
| | TNTEGRIN ALPHA(TNTEGRIN ALPHA-9) |
| | BIOLOGICAL PROCESS |
| | Cell adhesion(2.29.00.00.00) |
| | MOLECULAR FUNCTIONS |
| | Cell adhesion molecule(1.05.00.00.00) > Other |
| | cell adhesion molecule(1.05.99.00.00) |
| | HUMAN GENE ONTOLOGY |
| | BIOLOGICAL PROCESS |
| | cell adhesion > cell-cell matrix adhesion |
| | cell communication > cell adhesion |
| | cell surface receptor linked signal transduction > |
| | integrin receptor signal signaling pathway |
| | cell adhesion > homophilic cell adhesion |
| | mesoderm development > muscle development |
| | MOLECULAR FUNCTION |
| | transmembrane receptor > cell adhesion receptor |
| | cell adhesion > cell adhesion receptor |
| | cell adhesion > calcium-dependent cell adhesion |
| | protein binding > collagen binding |
| | molecular_function unknown > lymphocyte |
| | antigen |
| | GO molecular function > cell adhesion |
| | CELL COMPONENT |
| | integral plasma membrane protein > integrin |
| | cytoplasm > cytoskeleton |
| | cell > membrane fraction |
| | plasma membrane > integral plasma membrane |
| | protein |
| | cell > plasma membrane |
| | HUMAN PROTETN DOMAINS (INTERPRO |
| | SIGNATURES) |
| | IPR000413 (INTEGRINA) |
| | IPR000413 (Int alpha) |
| | IPR000413 (integrin A) |
| | IPR000413 (FG-GAP) |
| | IPR000413 (INTEGRIN ALPHA 2 3) |
| hP6-184.2 | HUMAN PANTHER CLASSIFICATIONS |
| (SEQ ID No: 8) | FAMILY (SUBFAMILY) |
| | INTEGRIN ALPHA(INTEGRIN ALPHA-9) |
| | BIOLOGICAL PROCESS |
| | Cell adhesion(2.29.00.00.00) |
| | MOLECULAR FUNCTIONS |
| | Cell adhesion molecule(1.05.00.00.00) > Other |
| | cell adhesion molecule(1.05.99.00.00) |
| | HUMAN GENE ONTOLOGY |
| | No Gene Ontology |
| | HUMAN PROTEIN DOMAINS (INTERPRO |
| | SIGNATURES) |
| | IPR000413 (INTEGRINA) |
| | IPR000413 (Int alpha) |
| | IPR000413 (integrin A) |
| | IPR000413 (FG-GAP) |
| | IPR000413 (INTEGRIN ALPHA 2 3) |
| hP7-165 | HUMAN PANTHER CLASSIFICATIONS |
| (Seq ID No: 14) | FAMILY (SUBFAMILY) |
| | RIBOFLAVIN-BINDING PROTEIN- |
| | RELATED(FOLATE-BINDING PROTEIN) |
| | BIOLOGICAL PROCESS |
| | Coenzyme and prosthetic group |
| | metabolism(2.07.00.00.00) |
| | Transport(2.15.00.00.00) > Vitamin/cofactor |
| | transport(2.15.09.00.00) |
| | MOLECULAR FUNCTIONS |
| | Receptor(1.01.00.00.00) > Other |
| | receptor(1.01.99.00.00) |
| | Transporter(1.10.00.00.00) > Other |
| | transporter(1.10.99.00.00) |
| | HUMAN GENE ONTOLOGY |
| | BIOLOGICAL PROCESS |
| | protein-membrane targeting > post-translational |
| | membrane targeting |
| | vitamin/cofactor transport > folate transport |
| | endocytosis > receptor mediated endocytosis |
| | antimicrobial response > antibacterial response |
| | MOLECULAR FUNCTION |
| | ligand binding or carrier > folate binding |
| | molecular_function unknown > tumor antigen |
| | CELL COMPONENT |
| | cell > membrane fraction |
| | plasma membrane > peripheral plasma membrane |
| | protein |
| | plasma membrane > integral plasma membrane |
| | protein |
| | GO cellular component > extracellular |
| | HUMAN PROTEIN DOMAINS (INTERPRO |
| | SIGNATURES) |
| | IPR004269 (Folate rec) |
| hP13-070.1 | HUMAN PANTHER CLASSIFICATIONS |
| (Seq ID No: 20) | FAMILY (SUBFAMILY) |
| | PROSTAGLANDIN F2-ALPHA RECEPTOR |
| | REGULATORY PROTEIN-RELATED |
| | (PROSTAGLANDIN F2-ALPHA RECEPTOR |
| | REGULATORY PROTEIN-RELATED) |
| | BIOLOGICAL PROCESS |
| | Signal transduction(2.11.00.00.00) > Cell surface |
| | receptor mediated signal transduction(2.11.01.00.00) |
| | MOLECULAR FUNCTIONS |
| | Molecular function unclassified(1.97.00.00.00) |
| | HUMAN GENE ONTOLOGY |
| | BIOLOGICAL PROCESS |
| | humoral defense mechanism > antimicrobial |
| | response |
| | cell death > necrosis |
| | protein localization > protein secretion |
| | MOLECULAR FUNCTION |
| | antimicrobial response protein > lysozyme |
| | O-glucosyl hydrolase > lysozyme |
| | defense/immunity protein > immunoglobulin |
| | B cell receptor > immunoglobulin |
| | CELL COMPONENT |
| | cell > membrane fraction |
| | plasma membrane > integral plasma membrane |
| | protein |
| | HUMAN PROTEIN DOMAINS (INTERPRO |
| | SIGNATURES) |
| | IPR003596 (IGv) |
| | IPR003598 (IGc2) |
| | IPR003006 (ig) |
| | IPR003599 (IGc2) |
| | IPR003006 (ig) |
| hP13-070.2 | HUMAN PANTHER CLASSIFICATIONS |
| (SEQ ID No: 22) | FAMILY (SUBFAMILY) |
| | PROSTAGLANDIN F2-ALPHA RECEPTOR |
| | REGULATORY PROTETN-RELATED |
| | (PROSTAGLANDIN F2-ALPHA RECEPTOR |
| | REGULATORY PROTEIN-RELATED) |
| | BIOLOGICAL PROCESS |
| | Signal transduction(2.11.00.00.00) > Cell surface |
| | receptor mediated signal transduction(2.11.01.00.00) |
| | MOLECULAR FUNCTIONS |
| | Molecular function unclassified(1.97.00.00.00) |
| | HUMAN GENE ONTOLOGY |
| | BIOLOGICAL PROCESS |
| | humoral defense mechanism > antimicrobial |
| | response |
| | MOLECULAR FUNCTION |
| | antimicrobial response protein > lysozyme |
| | O-glucosyl hydrolase > lysozyme |
| | defense/immunity protein > immunoglobulin |
| | B cell receptor > immunoglobulin |
| | CELL COMPONENT |
| | cell > membrane fraction |
| | plasma membrane > integral plasma membrane |
| | protein |
| | HUMAN PROTEIN DOMAINS (INTERPRO |
| | SIGNATURES) |
| | IPR003596 (IGv) |
| | IPR003599 (IG) |
| | IPR003006 (ig) |
| hP13-070.3 | HUMAN PANTHER CLASSIFICATIONS |
| (SEQ ID No: 24) | FAMILY (SUBFAMILY) |
| | PROSTAGLANDIN F2-ALPHA RECEPTOR |
| | REGULATORY PROTETN-RELATED |
| | (PROSTAGLANDIN F2-ALPHA RECEPTOR |
| | REGULATORY PROTEIN-RELATED) |
| | BIOLOGICAL PROCESS |
| | Signal transduction(2.11.00.00.00) > Cell surface |
| | receptor mediated signal transduction(2.11.01.00.00) |
| | MOLECULAR FUNCTIONS |
| | Molecular function unclassified(1.97.00.00.00) |
| | HUMAN GENE ONTOLOGY |
| | BIOLOGICAL PROCESS |
| | humoral defense mechanism > antimicrobial |
| | response |
| | cell death > necrosis |
| | MOLECULAR FUNCTION |
| | antimicrobial response protein > lysozyme |
| | O-glucosyl hydrolase > lysozyme |
| | defense/immunity protein > immunoglobulin |
| | B cell receptor > immunoglobulin |
| | CELL COMPONENT |
| | cell > membrane fraction |
| | plasma membrane > integral plasma membrane |
| | protein |
| | HUMAN PROTETN DOMAINS (INTERPRO |
| | SIGNATURES) |
| | IPR003596 (IGv) |
| | IPR003598 (IGc2) |
| | IPR003599 (IG) |
| | IPR003006 (ig) |
| hP13-070.4 | HUMAN PANTHER CLASSIFICATIONS |
| (SEQ ID No: 26) | FAMILY (SUBFAMILY) |
| | PROSTAGLANDIN F2-ALPHA RECEPTOR |
| | REGULATORY PROTETN-RELATED |
| | (PROSTAGLANDIN F2-ALPHA RECEPTOR |
| | REGULATORY PROTEIN-RELATED) |
| | BIOLOGICAL PROCESS |
| | Signal transduction(2.11.00.00.00) > Cell surface |
| | receptor mediated signal transduction(2.11.01.00.00) |
| | MOLECULAR FUNCTIONS |
| | Molecular function unclassified(1.97.00.00.00) |
| | HUMAN GENE ONTOLOGY |
| | BIOLOGICAL PROCESS |
| | humoral defense mechanism > antimicrobial |
| | response |
| | cell death > necrosis |
| | MOLECULAR FUNCTION |
| | antimicrobial response protein > lysozyme |
| | O-glucosyl hydrolase > lysozyme |
| | defense/immunity protein > immunoglobulin |
| | B cell receptor > immunoglobulin |
| | CELL COMPONENT |
| | cell > membrane fraction |
| | plasma membrane > integral plasma membrane |
| | protein |
| | HUMAN PROTEIN DOMAINS (INTERPRO |
| | SIGNATURES) |
| | IPR003596 (IGv) |
| | IPR003598 (IGc2) |
| | IPR003599 (IG) |
| | IPR003006 (ig) |
| hP13-073 | HUMAN PANTHER CLASSIFICATIONS |
| (SEQ ID No: 32) | FAMILY (SUBFAMILY) |
| | AMTNOPEPTIDASE(GLUTAMYL |
| | AMINOPEPTIDASE) |
| | BIOLOGICAL PROCESS |
| | Protein metabolism and |
| | modification(2.05.00.00.00) > Proteolysis |
| | (2.05.04.00.00) |
| | MOLECULAR FUNCTIONS |
| | Protease(1.17.00.00.00) > |
| | Metalloprotease(1.17.01.00.00) |
| | HUMAN GENE ONTOLOGY |
| | No Gene Ontology |
| | HUMAN PROTEIN DOMAINS (INTERPRO |
| | SIGNATURES) |
| | IPR001930 (ALADIPTASE) |
| | IPR001930 (Peptidase M1) |
| hP13-075.1 | HUMAN PANTHER CLASSIFICATIONS |
| (SEQ ID No: 38) | FAMILY (SUBFAMILY) |
| | MUCOLIPIN 1-RELATED(MUCOLIPIN 1- |
| | RELATED) |
| | BIOLOGICAL PROCESS |
| | Biological process unclassified(2.99.00.00.00) |
| | MOLECULAR FUNCTIONS |
| | Molecular function unknown(1.99.00.00.00) |
| | HUMAN GENE ONTOLOGY |
| | BIOLOGICAL PROCESS |
| | neurogenesis > central nervous system |
| | development |
| | ion transport > cation transport |
| | transcription, DNA-dependent > transcription |
| | regulation |
| | protein modification > protein phosphorylation |
| | cell death > apoptosis |
| | MOLECULAR FUNCTION |
| | enzyme > nitric oxide synthase |
| | ligand binding or carrier > calcium binding |
| | GO molecular function > cell cycle regulator |
| | enzyme > protein kinase |
| | nucleotide binding > ATP binding |
| | CELL COMPONENT |
| | GO cellular component > extracellular |
| | mitochondrial membrane > mitochondrial inner |
| | membrane |
| | extracellular > extracellular space |
| | microtubule organizing center > centrosome |
| | plasma membrane > integral plasma membrane |
| | protein |
| | HUMAN PROTEIN DOMAINS (INTERPRO |
| | SIGNATURES) |
| | IPR005821 (ion trans) |
| | IPR002111 (CATION CHANNEL TRPL) |
| hP13-075.2 | HUMAN PANTHER CLASSIFICATIONS |
| (SEQ ID No: 40) | FAMILY (SUBFAMILY) |
| | MUCOLIPIN 1-RELATED(MUCOLTPIN I- |
| | RELATED) |
| | BIOLOGICAL PROCESS |
| | Biological process unclassified(2.99.00.00.00) |
| | MOLECULAR FUNCTIONS |
| | Molecular function unknown(1.99.00.00.00) |
| | HUMAN GENE ONTOLOGY |
| | No Gene Ontology |
| | HUMAN PROTEIN DOMAINS (INTERPRO |
| | SIGNATURES) |
| | IPR002111 (CATION CHANNEL TRPL) |
| hP13-080.1 | HUMAN PANTHER CLASSIFICATIONS |
| (SEQ ID No: 46) | FAMILY (SUBFAMILY) |
| | ADIIPOPHILIN-RELATED(ADIPOPHILIN) |
| | BIOLOGICAL PROCESS |
| | Biological process unclassified(2. 99.00.00.00) |
| | MOLECULAR FUNCTIONS |
| | Molecular function unknown(1.99.00.00.00) |
| | HUMAN GENE ONTOLOGY |
| | BIOLOGICAL PROCESS |
| | macromolecule biosynthesis > protein |
| | biosynthesis |
| | protein metabolism and modification > protein |
| | biosynthesis |
| | MOLECULAR FUNCTION |
| | GO molecular function > ligand binding or carrier |
| | CELL COMPONENT |
| | cytoplasm > lipid particle |
| | cytoplasm > Golgi apparatus |
| | GO cellular component > extracellular |
| | cytoplasm > endoplasmic reticulum |
| | cell > cytoplasm |
| | HUMAN PROTEIN DOMAINS (INTERPRO |
| | SIGNATURES) |
| | IPR004279 (perilipin) |
| hP13-080.2 | HUMAN PANTHER CLASSIFICATIONS |
| (SEQ ID No: 48) | FAMILY (SUBFAMILY) |
| | ADIPOPHILIN-RELATED(ADIPOPHILTN) |
| | BIOLOGICAL PROCESS |
| | Biological process unclassified(2.99.00.00.00) |
| | MOLECULAR FUNCTIONS |
| | Molecular function unknown(1.99.00.00.00) |
| | HUMAN GENE ONTOLOGY |
| | No Gene Ontology |
| | HUMAN PROTEIN DOMAINS (INTERPRO |
| | SIGNATURES) |
| | No Domain Hit |
| hP13-080.3 | HUMAN PANTHER CLASSIFICATIONS |
| (SEQ ID No: 50) | FAMILY (SUBFAMILY) |
| | ADIPOPHILIN-RELATED(ADIPOPHILIN) |
| | BIOLOGICAL PROCESS |
| | Biological process unclassified(2.99.00.00.00) |
| | MOLECULAR FUNCTIONS |
| | Molecular function unknown(1.99.00.00.00) |
| | HUMAN GENE ONTOLOGY |
| | No Gene Ontology |
| | HUMAN PROTEIN DOMAINS (INTERPRO |
| | SIGNATURES) |
| | IPR004279 (perilipin) |
| hP13-080.4 | HUMAN PANTHER CLASSIFICATIONS |
| (SEQ ID No: 52) | FAMILY (SUBFAMILY) |
| | ADIPOPHILIN-RELATED(ADIPOPHILIN) |
| | BIOLOGICAL PROCESS |
| | Biological process unclassified(2.99.00.00.00) |
| | MOLECULAR FUNCTIONS |
| | Molecular function unknown(1.99.00.00.00) |
| | HUMAN GENE ONTOLOGY |
| | BIOLOGICAL PROCESS |
| | macromolecule biosynthesis > protein |
| | biosynthesis |
| | protein metabolism and modification > protein |
| | biosynthesis |
| | MOLECULAR FUNCTION |
| | GO molecular function > ligand binding or carrier |
| | CELL COMPONENT |
| | cytoplasm > lipid particle |
| | cytoplasm > Golgi apparatus |
| | GO cellular component > extracellular |
| | cytoplasm > endoplasmic reticulum |
| | cell > cytoplasm |
| | HUMAN PROTEIN DOMAINS (INTERPRO |
| | SIGNATURES) |
| | IPR004279 (perilipin) |
| hP13-080.5 | HUMAN PANTHER CLASSIFICATIONS |
| (SEQ ID No: 54) | FAMILY (SUBFAMILY) |
| | ADIPOPHILIN-RELATED(ADIPOPHILTN) |
| | BIOLOGICAL PROCESS |
| | Biological process unclassified(2.99.00.00.00) |
| | MOLECULAR FUNCTIONS |
| | Molecular function unknown(1.99.00.00.00) |
| | HUMAN GENE ONTOLOGY |
| | BIOLOGICAL PROCESS |
| | macromolecule biosynthesis > protein |
| | biosynthesis |
| | protein metabolism and modification > protein |
| | biosynthesis |
| | MOLECULAR FUNCTION |
| | GO molecular function > ligand binding or carrier |
| | CELL COMPONENT |
| | cytoplasm > lipid particle |
| | cytoplasm > Golgi apparatus |
| | GO cellular component > extracellular |
| | cytoplasm > endoplasmic reticulum |
| | cell > cytoplasm |
| | HUMAN PROTEIN DOMAINS (INTERPRO |
| | SIGNATURES) |
| | IPR004279 (perilipin) |
| hP13-117.1 | HUMAN PANTHER CLASSIFICATIONS |
| (SEQ ID No: 60) | FAMILY (SUBFAMILY) |
| | INTERFERON-GAMMA RECEPTOR ALPHA |
| | CHAIN(INTERFERON-GAMMA RECEPTOR |
| | ALPHA CHAIN) |
| | BIOLOGICAL PROCESS |
| | Signal transduction(2.11.00.00.00) > Intracellular |
| | signaling cascade(2.11.02.00.00) > MAPKKK |
| | cascade(2.11.02.03.00) > JAK-STAT |
| | cascade(2.11.02.06.00) |
| | Signal transduction(2.11.00.00.00) > Cell |
| | communication(2.11.03.00.00) > Ligand-mediated |
| | signaling(2.11.03.03.00) |
| | Signal transduction(2.11.00.00.00) > Cell surface |
| | receptor mediated signal transduction |
| | (2.11.01.00.00) > Cytokine and chemokine |
| | mediated signaling pathway(2.11.01.02.00) |
| | Immunity and defense(2.1 6.00.00.00) > |
| | Macrophage-mediated immunity(2.16.05.00.00) |
| | Immunity and defense(2.16.00.00.00) > |
| | Interferon-mediated immunity(2.16.06.00.00) |
| | Immunity and defense(2.16.00.00.00) > T-cell |
| | mediated immunity(2.16.01.00.00) |
| | MOLECULAR FUNCTIONS |
| | Receptor(1.01.00.00.00) > Cytokine |
| | receptor(1.01.04.00.00) > Interferon, |
| | receptor(1.01.04.02.00) |
| | HUMAN GENE ONTOLOGY |
| | BIOLOGICAL PROCESS |
| | defense response > immune response |
| | cell communication > signal transduction |
| | signal transduction > cell surface receptor linked |
| | signal transduction |
| | MOLECULAR FUNCTION |
| | defense/immunity protein > antiviral response |
| | protein |
| | enzyme > phosphoribosylamine--glycine ligase |
| | CELL COMPONENT |
| | cell > membrane fraction |
| | plasma membrane > integral plasma membrane |
| | protein |
| | cell > plasma membrane |
| | HUMAN PROTEIN DOMAINS (INTERPRO |
| | SIGNATURES) |
| | IPR000282 (CRDA) |
| | IPR000282 (CR2A) |
| hP13-117.2 | HUMAN PANTHER CLASSIFICATIONS |
| (SEQ ID No: 62) | FAMILY (SUBFAMILY) |
| | INTERFERON-GAMMA RECEPTOR ALPHA |
| | CHAIN(INTERFERON-GAMMA RECEPTOR |
| | ALPHA CHAIN) |
| | BIOLOGICAL PROCESS |
| | Signal transduction(2.11.00.00.00) > Intracellular |
| | signaling cascade(2.11.02.00.00) > MAPKKK |
| | cascade(2.11.02.03.00) > JAK-STAT cascade |
| | (2.11.02.06.00) |
| | Signal transduction(2.11.00.00.00) > Cell |
| | communication(2.11.03.00.00) > Ligand-mediated |
| | signaling(2.11.03.03.00) |
| | Signal transduction(2.11.00.00.00) > Cell surface |
| | receptor mediated signal transduction |
| | (2.11.01.00.00) > Cytokine and chemokine |
| | mediated signaling pathway(2.11.01.02.00) |
| | Immunity and defense(2.16.00.00.00) > |
| | Macrophage-mediated immunity(2.16.05.00.00) |
| | Immunity and defense(2.16.00.00.00) > |
| | Interferon-mediated immunity(2.16.06.00.00) |
| | Immunity and defense(2.16.00.00.00) > T-cell |
| | mediated immunity(2.16.01.00.00) |
| | MOLECULAR FUNCTIONS |
| | Receptor(1.01.00.00.00) > Cytokine |
| | receptor(1.01.04.00.00) > Interferon receptor |
| | (1.01.04.02.00) |
| | HUMAN GENE ONTOLOGY |
| | BIOLOGICAL PROCESS |
| | defence response > immune response |
| | cell communication > signal transduction |
| | signal transduction > cell surface receptor linked |
| | signal transduction |
| | MOLECULAR FUNCTION |
| | defense/immunity protein > antiviral response |
| | protein |
| | enzyme > phosphoribosylamine--glycine ligase |
| | CELL COMPONENT |
| | cell > membrane fraction |
| | plasma membrane > integral plasma membrane |
| | protein |
| | cell >plasma membrane |
| | HUMAN PROTEIN DOMAINS (INTERPRO |
| | SIGNATURES) |
| | IPR000282 (CR2B) |
| | NULL (SER RICH) |
| | IPR000282 (CR2A) |
| hP14-014.1 | HUMAN PANTHER CLASSIFICATIONS |
| (SEQ ID No: 68) | FAMILY (SUBFAMILY) |
| | FER-1-RELATED (DYSFERLIN) |
| | BIOLOGICAL PROCESS |
| | Biological process unclassified(2.99.00.00.00) |
| | MOLECULAR FUNCTIONS |
| | Membrane traffic protein(1.26.00.00.00) > Other |
| | membrane traffic protein(1.26.99.00.00) |
| | HUMAN GENE ONTOLOGY |
| | No Gene Ontology |
| | HUMAN PROTEIN DOMAINS (INTERPRO |
| | SIGNATURES) |
| | IPR000008 (C2) |
| | IPR000008 (C2) |
| | NULL (ARG RICH) |
| | IPR000008 (C2 DOMAIN 25) |
| hP14-014.2 | HUMAN PANTHER CLASSIFICATIONS |
| (SEQ ID No: 70) | FAMILY (SUBFAMILY) |
| | FER-1-RELATED(DYSFERLIN) |
| | BIOLOGICAL PROCESS |
| | Biological process unclassified(2.99.00.00.00) |
| | MOLECULAR FUNCTIONS |
| | Membrane traffic protein(1.26.00.00.00) > Other |
| | membrane traffic protein(1.26.99.00.00) |
| | HUMAN GENE ONTOLOGY |
| | BIOLOGICAL PROCESS |
| | cell motility > muscle contraction |
| | cell growth and maintenance > membrane fusion |
| | sensory perception > hearing |
| | cell growth and maintenance > transport |
| | cell growth and maintenance > intracellular |
| | protein traffic |
| | MOLECULAR FUNCTION |
| | enzyme > glutaminase |
| | phospholipid binding > calcium-dependent |
| | phospholipid binding |
| | nucleic acid binding > DNA binding |
| | ligand binding or carrier > calcium binding |
| | enzyme > protein kinase |
| | CELL COMPONENT |
| | cell > plasma membrane |
| | nucleus > nuclear membrane |
| | cell > membrane fraction |
| | cytoplasm > cytosol |
| | cytoplasm > synaptic vesicle |
| | HUMAN PROTEIN DOMAINS (INTERPRO |
| | SIGNATURES) |
| | IPR000008 (C2) |
| | IPR000008 (C2) |
| | NULL (ARG RICH) |
| | IPR000008 (C2 DOMAIN 25) |
| hP14-014.3 | HUMAN PANTHER CLASSIFICATIONS |
| (SEQ ID No: 72) | FAMILY (SUBFAMILY) |
| | FER-1-RELATED (DYSFERLIN) |
| | BIOLOGICAL PROCESS |
| | Biological process unclassified(2.99.00.00.00) |
| | MOLECULAR FUNCTIONS |
| | Membrane traffic protein(1.26.00.00.00) > Other |
| | membrane traffic protein(1.26.99.00.00) |
| | HUMAN GENE ONTOLOGY |
| | BIOLOGICAL PROCESS |
| | cell motility > muscle contraction |
| | cell growth and maintenance > membrane fusion |
| | sensory perception > hearing |
| | protein modification > protein phosphorylation |
| | signal transduction > intracellular signaling |
| | cascade |
| | MOLECULAR FUNCTION |
| | enzyme > glutaminase |
| | enzyme > protein kinase |
| | protein serine/threonine kinase > protein kinase C |
| | nucleotide binding > ATP binding |
| | phospholipid binding > calcium-dependent |
| | phospholipid binding |
| | CELL COMPONENT |
| | cell > plasma membrane |
| | nucleus > nuclear membrane |
| | cell > membrane fraction |
| | cytoplasm > synaptic vesicle |
| | cytoplasm > cytosol |
| | HUMAN PROTETN DOMATNS (INTERPRO |
| | SIGNATURES) |
| | IPR000008 (C2) |
| | IPR000008 (C2) |
| | NULL (ARG RICH) |
| | IPR000008 (C2 DOMAIN 2 5) |
| hP16-001 | HUMAN PANTHER CLASSIFICATIONS |
| (SEQ ID No: 78) | FAMILY (SUBFAMILY) |
| | C-TEYPE LECTIN FAMILY DOMAIN |
| | CONTAINING PROTEIN(Unassigned) |
| | BIOLOGICAL PROCESS |
| | Biological process unclassified(2.99.00.00.00) |
| | MOLECULAR FUNCTIONS |
| | Molecular function unclassified(1.97.00.00.00) |
| | HUMAN GENE ONTOLOGY |
| | BIOLOGICAL PROCESS |
| | cell communication > cell adhesion |
| | intracellular protein traffic > endocytosis |
| | endocytosis > receptor mediated endocytosis |
| | humoral defense mechanism > antimicrobial |
| | response |
| | defence response > inflammatory response |
| | MOLECULAR FUNCTION |
| | sugar binding > lectin |
| | glycosaminoglycan binding > hyaluronic acid |
| | binding |
| | molecular_function unknown > lymphocyte |
| | antigen |
| | lectin > mannose binding lectin |
| | mannose binding > mannose binding lectin |
| | ligand binding or carrier > calcium binding |
| | CELL COMPONENT |
| | plasma membrane > integral plasma membrane |
| | protein |
| | extracellular > extracellular matrix |
| | cell > membrane fraction |
| | cell > plasma membrane |
| | extracellular > extracellular space |
| | HUMAN PROTETN DOMAINS (INTERPRO |
| | SIGNATURES) |
| | IPR001304 (CLECT) |
| | IPR001304 (lectin c) |
| | IPR001304 (C TYPE LECTIN 2) |
| hP16-028.1 | HUMAN PANTHER CLASSIFICATIONS |
| (SEQ ID No: 84) | FAMILY (SUBFAMILY) |
| | CHOLINE TRANSPORTER CLT1,2(CTL2) |
| | BIOLOGICAL PROCESS |
| | Transport(2.15.00.00.00) > Small molecule |
| | transport(2.15.02.00.00) |
| | MOLECULAR FUNCTIONS |
| | Transporter(1.10.00.00.00) > Other |
| | transporter(1.10.99.00.00) |
| | HUMAN GENE ONTOLOGY |
| | No Gene Ontology |
| | HUMAN PROTEIN DOMAINS (INTERPRO |
| | SIGNATURES) |
| | No Domain Hit |
| hP16-028.2 | HUMAN PANTHER CLASSIFICATIONS |
| (SEQ ID No: 86) | FAMILY (SUBFAMILY) |
| | CHOLINE TRANSPORTER CLT1,2(CTL2) |
| | BIOLOGICAL PROCESS |
| | Transport(2.15.00.00.00) > Small molecule |
| | transport(2.15.02.00.00) |
| | MOLECULAR FUNCTIONS |
| | Transporter(1.10.00.00.00) > Other |
| | transporter(1.10.99. 00.00) |
| | HUMAN GENE ONTOLOGY |
| | No Gene Ontology |
| | HUMAN PROTEIN DOMAINS (INTERPRO |
| | SIGNATURES) |
| | No Domain Hit |
| hP16-028.3 | HUMAN PANTHER CLASSIFICATIONS |
| (SEQ ID No: 88) | FAMILY (SUBFAMILY) |
| | CHOLINE TRANSPORTER CLT1,2(CTL2) |
| | BIOLOGICAL PROCESS |
| | Transport(2.15.00.00.00) > Small molecule |
| | transport(2.15.02.00.00) |
| | MOLECULAR FUNCTIONS |
| | Transporter(1.10.00.00.00) > Other |
| | transporter(1.10.99.00.00) |
| | HUMAN GENE ONTOLOGY |
| | No Gene Ontology |
| | HUMAN PROTEIN DOMAINS (INTERPRO |
| | SIGNATURES) |
| | No Domain Hit |
| hP16-028.4 | HUMAN PANTHER CLASSIFICATIONS |
| (SEQ ID No: 90) | FAMILY (SUBFAMILY) |
| | CHOLINE TRANSPORTER CLT1,2(CTL2) |
| | BIOLOGICAL PROCESS |
| | Transport(2.15.00.00.00) > Small molecule |
| | transport(2.15.02.00.00) |
| | MOLECULAR FUNCTIONS |
| | Transporter(1.10.00.00.00) > Other |
| | transporter(1.10.99.00.00) |
| | HUMAN GENE ONTOLOGY |
| | No Gene Ontology |
| | HUMAN PROTEIN DOMAINS (INTERPRO |
| | SIGNATURES) |
| | No Domain Hit |
| hP16-030.1 | HUMAN PANTHER CLASSIFICATIONS |
| (SEQ ID No: 96) | FAMILY (SUBFAMILY) |
| | OLIGOSACCHARYL |
| | TRANSFERASE(OLIGOSACCHARYL |
| | TRANSFERASE STT3 SUBUNIT) |
| | BIOLOGICAL PROCESS |
| | Protein metabolism and |
| | modification(2.05.00.00.00) > Protein |
| | modification(2.05.03.00.00) > Protein |
| | glycosylation(2.05.03.04.00) |
| | MOLECULAR FUNCTIONS |
| | Transferase(1.20.00.00.00) > |
| | Glycosyltransferase(1.20.09.00.00) |
| | HUMAN GENE ONTOLOGY |
| | No Gene Ontology |
| | HUMAN PROTEIN DOMAINS (INTERPRO |
| | SIGNATURES) |
| | IPR003674 (STT3) |
| hP16-030.2 | HUMAN PANTHER CLASSIFICATIONS |
| (SEQ ID No: 98) | FAMILY (SUBFAMILY) |
| | OLIGOSACCHARYL |
| | TRANSFERASE(OLIGOSACCHARYL |
| | TRANSFERASE STT3 SUBUNIT) |
| | BIOLOGICAL PROCESS |
| | Protein metabolism and |
| | modification(2.05.00.00.00) > Protein |
| | modification(2.05.03.00.00) > Protein |
| | glycosylation(2.05.03.04.00) |
| | MOLECULAR FUNCTIONS |
| | Transferase(1.20.00.00.00) > |
| | Glycosyltransferase(1.20.09.00.00) |
| | HUMAN GENE ONTOLOGY |
| | BIOLOGICAL PROCESS |
| | protein modification > protein phosphorylation |
| | protein glycosylation > N-linked glycosylation |
| | peptidoglycan catabolism > regulation of CDK |
| | activity |
| | cell cycle control > regulation of CDK activity |
| | mitotic GuS transition > regulation of CDK |
| | activity |
| | mitotic G2/M transition > regulation of CDK |
| | activity |
| | cell communication > signal transduction |
| | peptidoglycan catabolism > DNA damage |
| | checkpoint |
| | cell cycle checkpoint > DNA damage checkpoint |
| | MOLECULAR FUNCTION |
| | enzyme > protein kinase |
| | nucleotide binding > ATP binding |
| | enzyme > oligosaccharyl transferase |
| | protein kinase > protein tyrosine kinase |
| | oligosaceharyl transferase > dolichyl- |
| | diphosphooligosaccharide-protein |
| | glycosyltransferase |
| | CELL COMPONENT |
| | cell > cytoplasm |
| | cell > nucleus |
| | cell > membrane fraction |
| | chromosome > meiotic chromosome |
| | plasma membrane > integral plasma membrane |
| | protein |
| | HUMAN PROTEIN DOMAINS (INTERPRO |
| | SIGNATURES) |
| | IPR003674 (STT3) |
| hP16-030.3 | HUMAN PANTHER CLASSIFICATIONS |
| (SEQ ID No: 100) | FAMILY (SUBFAMILY) |
| | OLIGOSACCHARYL |
| | TRANSFERASE(OLIGOSACCHARYL |
| | TRANSFERASE STT3 SUBUNIT) |
| | BIOLOGICAL PROCESS |
| | Protein metabolism and |
| | modification(2.05.00.00.00) > Protein |
| | modification(2.05.03.00.00) > Protein |
| | glycosylation(2.05.03.04.00) |
| | MOLECULAR FUNCTIONS |
| | Transferase(1.20.00.00.00) > |
| | Glycosyltransferase(1.20.09.00.00) |
| | HUMAN GENE ONTOLOGY |
| | BIOLOGICAL PROCESS |
| | protein modification > protein phosphorylation |
| | protein glycosylation > N-linked glycosylation |
| | peptidoglycan catabolism > regulation of CDK |
| | activity |
| | cell cycle control > regulation of CDK activity |
| | mitotic G1/S transition > regulation of CDK |
| | activity |
| | mitotic G2/M transition > regulation of CDK |
| | activity |
| | cell communication > signal transduction |
| | peptidoglycan catabolism > DNA damage |
| | checkpoint |
| | cell cycle checkpoint > DNA damage checkpoint |
| | MOLECULAR FUNCTION |
| | enzyme > protein kinase |
| | nucleotide binding > ATP binding |
| | enzyme > oligosaccharyl transferase |
| | protein kinase > protein tyrosine kinase |
| | oligosaccharyl transferase > dolichyl- |
| | diphosphooligosaccharide-protein glycosyl- |
| | transferase |
| | CELL COMPONENT |
| | cell > cytoplasm |
| | cell > nucleus |
| | cell > membrane fraction |
| | chromosome > meiotic chromosome |
| | plasma membrane > integral plasma membrane |
| | protein |
| | HUMAN PROTEIN DOMAINS (INTERPRO |
| | SIGNATURES) |
| | IPR003674 (STT3) |
| hP16-030.4 | HUMAN PANTHER CLASSIFICATIONS |
| (SEQ ID No: 102) | FAMILY (SUBFAMILY) |
| | MAP AND CAM |
| | KINASE(SERINE/THREONINE-PROTEIN |
| | KINASE CHK1) |
| | BIOLOGICAL PROCESS |
| | Protein metabolism and |
| | modification(2.05.00.00.00) > Protein |
| | modification(2.05.03.00.00) > Protein |
| | phosphorylation(2.05.03.01.00) |
| | Signal transduction(2.11.00.00.00) > Intracellular |
| | signaling cascade(2.11.02.00.00) |
| | Immunity and defense(2.16.00.00.00) > Other |
| | immune and defense(2.16.99.00.00) |
| | Cell proliferation and |
| | differentiation(2.28.00.00.00) |
| | MOLECULAR FUNCTIONS |
| | Kinase(1.15.00.00.00) > Protein |
| | kinase(1.15.01.00.00) > Non-receptor |
| | serine/threonine protein kinase(1.15.01.04.00) |
| | HUMAN GENE ONTOLOGY |
| | BIOLOGICAL PROCESS |
| | protein modification > protein phosphorylation |
| | peptidoglycan catabolism > regulation of CDK |
| | activity |
| | cell cycle control > regulation of CDK activity |
| | mitotic G1/S transition > regulation of CDK |
| | activity |
| | mitotic G2/M transition > regulation of CDK |
| | activity |
| | cell communication > signal transduction |
| | peptidoglycan catabolism > DNA damage |
| | checkpoint |
| | cell cycle checkpoint > DNA damage checkpoint |
| | developmental processes > gametogenesis |
| | MOLECULAR FUNCTION |
| | enzyme > protein kinase |
| | nucleotide binding > ATP binding |
| | protein kinase > protein tyrosine kinase |
| | protein binding>calmodulin binding |
| | cyclic-nucleotide dependent protein kinase > |
| | cGMP-dependent protein kinase |
| | CELL COMPONENT |
| | cell > cytoplasm |
| | cell > nucleus |
| | chromosome > meiotic chromosome |
| | cell > membrane fraction |
| | cytoskeleton > microtubule cytoskeleton |
| | HUMAN PROTEIN DOMAINS (INTERPRO |
| | SIGNATURES) |
| | IPR001245 (TyrKc) |
| | IPR002290 (S TKc) |
| | IPR000719 (pkinase) |
| | IPR000719 (PROTEIN KINASE DOM) |
| | IPR000719 (sp O14757 CHK1 HUMAN) |
| hP16-030.5 | HUMAN PANTHER CLASSIFICATIONS |
| (SEQ ID No: 104) | FAMILY (SUBFAMILY) |
| | CASEIIN KINASE I- |
| | RELATED(SERINE/THREONINE-PROTEIN |
| | KINASE CHK1) BIOLOGICAL PROCESS |
| | Protein metabolism and |
| | modification(2.05.00.00.00) > Protein |
| | modification(2.05.03.00.00) > Protein |
| | phosphorylation(2.05.03.01.00) |
| | Signal transduction(2.11.00.00.00) > Intracellular |
| | signaling cascade(2.11.02.00.00) |
| | Oncogenesis(2.17.00.00.00) |
| | Cell cycle(2.24.00.00.00) > Cell cycle |
| | control(2.24.04.00.00) |
| | MOLECULAR FUNCTIONS |
| | Kinase(1.15.00.00.00) > Protein |
| | kinase(1.15.01.00.00) > Non-receptor |
| | serine/threonine protein kinase(1.15.01.04.00) |
| | HUMAN GENE ONTOLOGY |
| | BIOLOGICAL PROCESS |
| | protein modification > protein phosphorylation |
| | peptidoglycan catabolism > regulation of CDK |
| | activity |
| | cell cycle control > regulation of CDK activity |
| | mitotic GuS transition > regulation of CDK |
| | activity |
| | mitotic G2/M transition > regulation of CDK |
| | activity |
| | peptidoglycan catabolism > DNA damage |
| | checkpoint |
| | cell cycle checkpoint > DNA damage checkpoint |
| | cell growth and maintenance > cell cycle |
| | developmental processes > gametogenesis |
| | MOLECULAR FUNCTION |
| | enzyme > protein kinase |
| | nucleotide binding > ATP binding |
| | protein kinase > protein tyrosine kinase |
| | protein serine/threonine kinase > cyclin- |
| | dependent protein kinase |
| | cyclic-nucleotide dependent protein kinase > |
| | cGMP-dependent protein kinase |
| | CELL COMPONENT |
| | cell > cytoplasm |
| | cell > nucleus |
| | chromosome > meiotic chromosome |
| | cytoskeleton > microtubule cytoskeleton |
| | nuclear membrane > nuclear membrane lumen |
| | HUMAN PROTEIN DOMAINS (INTERPRO |
| | SIGNATURES) |
| | IPR002290 (S TKc) |
| | IPR000719 (pkinase) |
| | IPR000719 (PROTEIN KINASE DOM) |
| | IPR000719 (sp O14757 CHK1 HUMAN) |
| hP16-031.1 | HUMAN PANTHER CLASSIFICATIONS |
| (SEQ ID No: 110) | FAMILY (SUBFAMILY) |
| | CELL ADHESION MOLECULE-RELATED(gb |
| | def: retinoblastoma inhibiting gene 1 |
| | [mus musculus]) |
| | BIOLOGICAL PROCESS |
| | Biological process unclassified(2.99.00.O0.00) |
| | MOLECULAR FUNCTIONS |
| | Molecular function unclassified(1.97.00.00.00) |
| | HUMAN GENE ONTOLOGY |
| | BIOLOGICAL PROCESS |
| | cell communication > cell adhesion |
| | ectoderm development > neurogenesis |
| | protein modification > protein dephosphorylation |
| | protein modification > protein phosphorylation |
| | cell-cell signaling > synaptic transmission |
| | MOLECULAR FUNCTION |
| | GO molecular function > cell adhesion |
| | defense/immunity protein > immunoglobulin |
| | B cell receptor > immunoglobulin |
| | protein tyrosine phosphatase > prenylated protein |
| | tyrosine phosphatase |
| | enzyme > protein kinase |
| | protein kinase > protein tyrosine kinase |
| | CELL COMPONENT |
| | plasma membrane>integral plasma membrane |
| | protein |
| | cell > plasma membrane |
| | cell > membrane fraction |
| | plasma membrane > peripheral plasma membrane |
| | protein |
| | actin cytoskeleton > non-muscle myosin |
| | HUMAN PROTEIN DOMAINS (INTERPRO |
| | SIGNATURES) |
| | IPR003961 (FN3) |
| | IPR003598 (IGc2) |
| | IPR003599 (IG) |
| | IPR003961 (fn3) |
| | IPR003006 (ig) |
| | NULL (SER RICH) |
| | IPR000694 (PRO RICH) |
| hP16-031.2 | HUMAN PANTHER CLASSIFICATIONS |
| (SEQ ID No: 112) | FAMILY (SUBFAMILY) |
| | NOT ANNOTATED(NOT ANNOTATED) |
| | BIOLOGICAL PROCESS |
| | Biological process unclassified(2.99.00.00.00) |
| | MOLECULAR FUNCTIONS |
| | Molecular function unclassified(1.97.00.00.00) |
| | HUMAN GENE ONTOLOGY |
| | No Gene Ontology |
| | HUMAN PROTEIN DOMAINS (INTERPRO |
| | SIGNATURES) |
| | NULL (SER RICH) |
| | IPR000694 (PRO RICH) |
| hP16-031.3 | HUMAN PANTHER CLASSIFICATIONS |
| (SEQ ID No: 114) | FAMILY (SUBFAMILY) |
| | NOT ANNOTATED(NOT ANNOTATED) |
| | BIOLOGICAL PROCESS |
| | Biological process unclassified(2.99.00.00.00) |
| | MOLECULAR FUNCTIONS |
| | Molecular function unclassified(1.97.00.00.00) |
| | HUMAN GENE ONTOLOGY |
| | No Gene Ontology |
| | HUMAN PROTEIN DOMAINS (INTERPRO |
| | SIGNATURES) |
| | NULL (SER RICH) |
| | IPR000694 (PRO RICH) |
| hP16-031.4 | HUMAN PANTHER CLASSIFICATIONS |
| (SEQ ID No: 116) | FAMILY (SUBFAMILY) |
| | NOT ANNOTATED(NOT ANNOTATED) |
| | BIOLOGICAL PROCESS |
| | Biological process unclassified(2.99.00.00.00) |
| | MOLECULAR FUNCTIONS |
| | Molecular function unclassified(1.97.00.00.00) |
| | HUMAN GENE ONTOLOGY |
| | BIOLOGICAL PROCESS |
| | ectoderm development > neurogenesis |
| | MOLECULAR FUNCTION |
| | GO molecular function > cell adhesion |
| | CELL COMPONENT |
| | plasma membrane > integral plasma membrane |
| | protein |
| | HUMAN PROTEIN DOMAINS (INTERPRO |
| | SIGNATURES) |
| | NULL (SER RICH) |
| | IPR000694 (PRO RICH) |
| hP16-031.5 | HUMAN PANTHER CLASSIFICATIONS |
| (SEQ ID No: 118) | FAMILY (SUBFAMILY) |
| | NOT ANNOTATED(NOT ANNOTATED) |
| | BIOLOGICAL PROCESS |
| | Biological process unclassified(2.99.00.00.00) |
| | MOLECULAR FUNCTIONS |
| | Molecular function unclassified(1.97.00.00.00) |
| | HUMAN GENE ONTOLOGY |
| | No Gene Ontology |
| | HUMAN PROTEIN DOMAINS (INTERPRO |
| | SIGNATURES) |
| | NULL (SER RICH) |
| | IPR000694 (PRO RICH) |
| hP16-031.6 | HUMAN PANTHER CLASSIFICATIONS |
| (SEQ ID No: 120) | FAMILY (SUBFAMILY) |
| | NOT ANNOTATED(NOT ANNOTATED) |
| | BIOLOGICAL PROCESS |
| | Biological process unclassified(2.99.00.00.00) |
| | MOLECULAR FUNCTIONS |
| | Molecular function unclassified(1.97.00.00.00) |
| | HUMAN GENE ONTOLOGY |
| | BIOLOGICAL PROCESS |
| | ectoderm development > neurogenesis |
| | MOLECULAR FUNCTION |
| | GO molecular function > cell adhesion |
| | CELL COMPONENT |
| | plasma membrane > integral plasma membrane |
| | protein |
| | HUMAN PROTEIN DOMAINS (INTERPRO |
| | SIGNATURES) |
| | NULL (SER RICH) |
| | IPR000694 (PRO RICH) |
| hP16-031.7 | HUMAN PANTHER CLASSIFICATIONS |
| (SEQ ID No: 122) | FAMILY (SUBFAMILY) |
| | NOT ANNOTATED(NOT ANNOTATED) |
| | BIOLOGICAL PROCESS |
| | Biological process unclassified(2.99.00.00.00) |
| | MOLECULAR FUNCTIONS |
| | Molecular function unclassified(1.97.00.00.00) |
| | HUMAN GENE ONTOLOGY |
| | BIOLOGICAL PROCESS |
| | ectoderm development > neurogenesis |
| | MOLECULAR FUNCTION |
| | GO molecular function > cell adhesion |
| | CELL COMPONENT |
| | plasma membrane > integral plasma membrane |
| | protein |
| | HUMAN PROTEIN DOMAINS (INTERPRO |
| | SIGNATURES) |
| | NULL (SER RICH) |
| | IPR000194 (PRO RICH) |
| hP16-031.8 | HUMAN PANTHER CLASSIFICATIONS |
| (SEQ ID No: 124) | FAMILY (SUBFAMILY) |
| | CELL ADHESION MOLECULE-RELATED(gb |
| | def: retinoblastoma inhibiting gene 1 |
| | [mus musculus]) |
| | BIOLOGICAL PROCESS |
| | Biological process unclassified(2.99.00.00.00) |
| | MOLECULAR FUNCTIONS |
| | Molecular function unclassified(1.97.00.00.00) |
| | HUMAN GENE ONTOLOGY |
| | BIOLOGICAL PROCESS |
| | cell communication > cell adhesion |
| | ectoderm development > neurogenesis |
| | protein modification > protein dephosphorylation |
| | protein modification > protein phosphorylation |
| | cell-cell signaling > synaptic transmission |
| | MOLECULAR FUNCTION |
| | GO molecular function > cell adhesion |
| | defense/immunity protein > immunoglobulin |
| | B cell receptor > immunoglobulin |
| | protein kinase > protein tyrosine kinase |
| | enzyme > protein kinase |
| | protein tyrosine phosphatase > prenylated protein |
| | tyrosine phosphatase |
| | CELL COMPONENT |
| | plasma membrane > integral plasma membrane |
| | protein |
| | cell > plasma membrane |
| | cell > membrane fraction |
| | plasma membrane > peripheral plasma membrane |
| | protein |
| | integral plasma membrane protein > integral |
| | plasma membrane proteoglycan |
| | HUMAN PROTEIN DOMAINS (INTERPRO |
| | SIGNATURES) |
| | IPR003596 (IGv) |
| | IPR003598 (IGc2) |
| | IPR003599 (IG) |
| | IPR003006 (ig) |
| hP16-032.1 | HUMAN PANTHER CLASSIFICATIONS |
| (SEQ ID No: 130) | FAMILY (SUBFAMILY) |
| | GLUTAMATE RECEPTOR |
| | RELATED(GLUTAMATE RECEPTOR, |
| | IONOTROPIC KAINATE 4) |
| | BIOLOGICAL PROCESS |
| | Transport(2.15.00.00.00) > Ion |
| | transport(2.15.01.00.00) > Cation |
| | transport(2. 15.01.01.00) |
| | Neuronal activities(2.18.00.00.00) > Synaptic |
| | transmission(2.18.01.00.00) > Nerve-nerve synaptic |
| | transmission(2.18.01.02.00) |
| | MOLECULAR FUNCTIONS |
| | Receptor(1.01.00.00.00) |
| | Ion channel(1.03.00.00.00) > Ligand-gated ion |
| | channel(1.03.01.00.00) > Glutamate |
| | receptor(1.03.01.01.00) |
| | HUMAN GENE ONTOLOGY |
| | BIOLOGICAL PROCESS |
| | G protein linked receptor protein signaling |
| | pathway > glutamate signaling pathway |
| | cell-cell signaling > synaptic transmission |
| | cell growth and maintenance > transport |
| | cytoplasm organization and biogenesis > |
| | ribosome biogenesis |
| | transport > ion transport |
| | MOLECULAR FUNCTION |
| | GO molecular function > enzyme |
| | enzyme > cysteine synthase |
| | CELL COMPONENT |
| | cell > membrane fraction |
| | plasma membrane > integral plasma membrane |
| | protein |
| | cell > plasma membrane |
| | cytoplasm > synaptic vesicle |
| | cell wall > periplasmic space |
| | HUMAN PROTEIN DOMAINS (INTERPRO |
| | SIGNATURES) |
| | IPR001320 (PBPe) |
| | IPR001828 (ANF receptor) |
| | IPR001320 (lig chan) |
| | IPR001311 (SBP GLUR) |
| | IPR001622 (CHANNEL PORE K) |
| | IPR001320 (sp Q01812 GLK4 RAT) |
| hP16-032.2 | HUMAN PANTHER CLASSIFICATIONS |
| (SEQ ID No: 132) | FAMILY (SUBFAMILY) |
| | GLUTAMATE RECEPTOR |
| | RELATED(GLUTAMATE RECEPTOR, |
| | IONOTROPIC KAINATE 4) |
| | BIOLOGICAL PROCESS |
| | Transport(2.15.00.00.00) > Ion |
| | transport(2.15.01.00.00) > Cation |
| | transport(2.15.01.01.00) |
| | Neuronal activities(2.18.00.00.00) > Synaptic |
| | transmission(2.18.01.00.00) > Nerve-nerve synaptic |
| | transmission(2.18.01.02.00) |
| | MOLECULAR FUNCTIONS |
| | Receptor(1.01.00.00.00) |
| | Ion channel(1.03.00.00.00) > Ligand-gated ion |
| | channel(1.03.01.00.00) > Glutamate |
| | receptor(1.03.01.01.00) |
| | HUMAN GENE ONTOLOGY |
| | BIOLOGICAL PROCESS |
| | G protein linked receptor protein signaling |
| | pathway > glutamate signaling pathway |
| | cell-cell signaling>synaptic transmission |
| | cell growth and maintenance > transport |
| | cytoplasm organization and biogenesis > |
| | ribosome biogenesis |
| | transport > ion transport |
| | MOLECULAR FUNCTION |
| | GO molecular function > enzyme |
| | enzyme > cysteine synthase |
| | CELL COMPONENT |
| | cell > membrane fraction |
| | plasma membrane > integral plasma membrane |
| | protein |
| | cell > plasma membrane |
| | cytoplasm > synaptic vesicle |
| | cell wall > periplasmic space |
| | HUMAN PROTEIN DOMAINS (INTERPRO |
| | SIGNATURES) |
| | IPR001320 (PBPc) |
| | IPR001828 (ANF receptor) |
| | IPR001320 (lig chan) |
| | IPR001311 (SBP GLUR) |
| | IPR001622 (CHANNEL PORE K) |
| | IPR001320 (sp Q01812 GLK4 RAT) |
| hP16-032.3 | HUMAN PANTHER CLASSIFICATIONS |
| (SEQ ID No: 134) | FAMILY (SUBFAMILY) |
| | GLUTAMATE RECEPTOR |
| | RELATED(GLUTAMATE RECEPTOR, |
| | IONOTROPIC KAINATE 4) |
| | BIOLOGICAL PROCESS |
| | Transport(2.15.00.00.00) > Ion |
| | transport(2.15.01.00.00) > Cation |
| | transport(2.15.01.01.00) |
| | Neuronal activities(2.18.00.00.00) > Synaptic |
| | transmission(2.18.01 .00.00) > Nerve-nerve synaptic |
| | transmission(2. 18.01.02.00) |
| | MOLECULAR FUNCTIONS |
| | Receptor(1.01.00.00.00) |
| | Ion channel(1.03.00.00.00) > Ligand-gated ion |
| | channel(1.03.01.00.00) > Glutamate |
| | receptor(1.03.01.01.00) |
| | HUMAN GENE ONTOLOGY |
| | BIOLOGICAL PROCESS |
| | G protein linked receptor protein signaling |
| | pathway > glutamate signaling pathway |
| | cell-cell signaling > synaptic transmission |
| | cell growth and maintenance > transport |
| | cytoplasm organization and biogenesis > |
| | ribosome biogenesis |
| | transport > ion transport |
| | MOLECULAR FUNCTION |
| | GO molecular function > enzyme |
| | enzyme > cysteine synthase |
| | CELL COMPONENT |
| | cell > membrane fraction |
| | plasma membrane > integral plasma membrane |
| | protein |
| | cell > plasma membrane |
| | cytoplasm > synaptic vesicle |
| | cell wall > periplasmic space |
| | HUMAN PROTEIN DOMAINS (INTERPRO |
| | SIGNATURES) |
| | IPR001320 (PBPe) |
| | IPR001828 (ANF receptor) |
| | IPR001320 (lig chan) |
| | IPR001311 (SBP GLUIR) |
| | IPR001622 (CHANNEL PORE K) |
| | IPR001320 (sp Q01812 GLK4 RAT) |
| hP16-038.1 | HUMAN PANTHER CLASSIFICATIONS |
| (SEQ ID No: 140) | FAMILY (SUBFAMILY) |
| | TRYPSIN-RELATED |
| | PROTEASE(TRANSMEMBRANE SERINE |
| | PROTEASE) |
| | BIOLOGICAL PROCESS |
| | Protein metabolism and |
| | modification(2.05.00.00.00) > Proteolysis |
| | (2.05.04.00.00) |
| | MOLECULAR FUNCTIONS |
| | Protease(1.17.00.00.00) > Serine-type |
| | protease(1.17.03.00.00) |
| | HUMAN GENE ONTOLOGY |
| | BIOLOGICAL PROCESS |
| | macromolecule catabolism > proteolysis and |
| | peptidolysis |
| | G protein linked receptor protein signaling |
| | pathway > neuropeptide signaling pathway |
| | defence response > inflammatory response |
| | cell proliferation > negative control of cell |
| | proliferation |
| | GO biological process > cell growth and |
| | maintenance |
| | MOLECULAR FUNCTION. |
| | serine-type endopeptidase > trypsin |
| | serine-type endopeptidase > chymotrypsin |
| | serine-type peptidase > serine-type endopeptidase |
| | endopeptidase > serine-type endopeptidase |
| | peptidase > serine-type peptidase |
| | serine-type endopeptidase > plasmin |
| | CELL COMPONENT |
| | extracellular > extracellular space |
| | plasma membrane > integral plasma membrane |
| | protein |
| | GO cellular component > extracellular |
| | cell > membrane fraction |
| | cell > plasma membrane |
| | HUMAN PROTEIN DOMAINS (INTERPRO |
| | SIGNATURES) |
| | IPR001314 (CHYMOTRYPSIN) |
| | IPR001254 (Tryp SPc) |
| | IPR001190 (SR) |
| | IPR001254 (trypsin) |
| | IPR001254 (TRYPSIN DOM) |
| | IPR001190 (SRCR 2) |
| hP16-038.2 | HUMAN PANTHER CLASSIFICATIONS |
| (SEQ ID No: 142) | FAMILY (SUBFAMILY) |
| | TRYPSIN-RELATED |
| | PROTEASE(TRANSMEMBRANE SERINE |
| | PROTEASE) |
| | BIOLOGICAL PROCESS |
| | Protein metabolism and |
| | modification(2.05.00.00.00) > Proteolysis |
| | (2.05.04.00.00) |
| | MOLECULAR FUNCTIONS |
| | Protease(1.17.00.00.00) > Serine-type |
| | protease(1.17.03.00.00) |
| | HUMAN GENE ONTOLOGY |
| | No Gene Ontology |
| | HUMAN PROTEIN DOMAINS (INTERPRO |
| | SIGNATURES) |
| | IPR001314 (CHYMOTRYPSIN) |
| | IPR001254 (Tryp SPc) |
| | IPR001190 (SR) |
| | IPR001254 (trypsin) |
| | IPR001254 (TRYPSIN DOM) |
| | IPR001190 (SRCR 2) |
| hP16-039.1 | HUMAN PANTHER CLASSIFICATIONS |
| (SEQ ID No: 148) | FAMILY (SUBFAMILY) |
| | CELL ADHESION MOLECULE- |
| | RELATED(ADHESION PROTEIN RA175) |
| | BIOLOGICAL PROCESS |
| | Cell adhesion(2.29.00.00.00) |
| | MOLECULAR FUNCTIONS |
| | Cell adhesion molecule(1.05.00.00.00) > CAM |
| | family adhesion molecule(1.05.01.00.00) |
| | HUMAN GENE ONTOLOGY |
| | BIOLOGICAL PROCESS |
| | cell communication > cell adhesion |
| | protein-membrane targeting > post-translational |
| | membrane targeting |
| | cell growth and maintenance > invasive growth |
| | protein modification > protein phosphorylation |
| | pyrimidine nucleoside monophosphate |
| | biosynthesis > TMP biosynthesis |
| | pyrimidine ribonucleoside monophosphate |
| | biosynthesis > TMP biosynthesis |
| | MOLECULAR FUNCTION |
| | GO molecular function > cell adhesion |
| | defense/immunity protein > immunoglobulin |
| | B cell receptor > immunoglobulin |
| | enzyme > thymidine kinase |
| | protein kinase > protein tyrosine kinase |
| | nucleotide binding > ATP binding |
| | CELL COMPONENT |
| | adherens junction > cell-cell adherens junction |
| | plasma membrane > integral plasma membrane |
| | protein |
| | cell > plasma membrane |
| | cell > membrane fraction |
| | plasma membrane > peripheral plasma membrane |
| | protein |
| | HUMAN PROTETN DOMAINS (INTERPRO |
| | SIGNATURES) |
| | IPR003598 (IGc2) |
| | IPR003599 (IG) |
| | IPR003006 (ig) |
| hP16-039.2 | HUMAN PANTHER CLASSIFICATIONS |
| (SEQ ID No: 150) | FAMILY (SUBFAMILY) |
| | Unclassified |
| | HUMAN GENE ONTOLOGY |
| | No Gene Ontology |
| | HUMAN PROTEIN DOMAINS (INTERPRO |
| | SIGNATURES) |
| | No Domain Hit |
| hP16-042 | HUMAN PANTHER CLASSIFICATIONS |
| (SEQ ID No: 156) | FAMILY (SUBFAMILY) |
| | SEMAPHORIN(SEMAPHORIN 3A-RELATED) |
| | BIOLOGICAL PROCESS |
| | Signal transduction(2.11.00.00.00) > Cell |
| | communication(2.11.03.00.00) |
| | Developmental processes(2.23.00.00.00) > |
| | Ectoderm development(2.23.08.00.00) > |
| | Neurogenesis(2.23.08.01.00) |
| | MOLECULAR FUNCTIONS |
| | Signaling molecule(1.02.00.00.00) > Membrane- |
| | bound signaling molecule(1.02.07.00.00) |
| | HUMAN GENE ONTOLOGY |
| | BIOLOGICAL PROCESS |
| | ectoderm development > neurogenesis |
| | defence response > immune response |
| | peptidoglycan catabolism > axon guidance |
| | axonogenesis > axon guidance |
| | xenobiotic metabolism > drug resistance |
| | cell adhesion > cell-cell matrix adhesion |
| | MOLECULAR FUNCTION |
| | GO molecular function > cell adhesion |
| | defense/immunity protein > immunoglobulin |
| | B cell receptor > immunoglobulin |
| | transmembrane receptor > cell adhesion receptor |
| | cell adhesion > cell adhesion receptor |
| | glucosidase > mannosyl-oligosaceharide |
| | glucosidase (processing A-glucosidase I) |
| | CELL COMPONENT |
| | extracellular > extracellular space |
| | plasma membrane > peripheral plasma membrane |
| | protein |
| | cell > membrane fraction |
| | GO cellular component > extracellular |
| | integral plasma membrane protein > integrin |
| | HUMAN PROTEIN DOMAINS (INTERPRO |
| | SIGNATURES) |
| | IPR003659 (PSI) |
| | IPR001627 (Sema) |
| hP16-049.1 | HUMAN PANTHER CLASSTFICATIONS |
| (SEQ ID No: 162) | FAMILY (SUBFAMILY) |
| | TRANSMEMBRANE CHANNEL MAJOR |
| | INTRINSIC PROTEIN FAMILY MEMBER |
| | (AQUAPORIN 9) |
| | BIOLOGICAL PROCESS |
| | Biological process unclassified(2.99.00.00.00) |
| | MOLECULAR FUNCTIONS |
| | Transporter(1.10.00.00.00) > Other |
| | transporter(1.10.99.00.00) |
| | HUMAN GENE ONTOLOGY |
| | BIOLOGICAL PROCESS |
| | cell growth and maintenance > transport |
| | transport > water transport |
| | defence response > immune response |
| | ectoderm development > neurogenesis |
| | metabolism > energy pathways |
| | MOLECULAR FUNCTION |
| | metallopeptidase > peptidyl-dipeptidase A |
| | peptidyl-dipeptidase > peptidyl-dipeptidase A |
| | aminopeptidase > Xaa-Pro aminopeptidase |
| | enzyme > N |
| | acetylglucosaminylphosphatidylinositol deacetylase |
| | enzyme > NADH dehydrogenase (ubiquinone) |
| | CELL COMPONENT |
| | cell > membrane fraction |
| | plasma membrane > integral plasma membrane |
| | protein |
| | mitochondrial membrane > mitochondrial outer |
| | membrane |
| | Golgi apparatus > secretory vesicle |
| | intercellular junction > gap junction |
| | HUMAN PROTEIN DOMAINS (INTERPRO |
| | SIGNATURES) |
| | IPR000425 (MINTRINSICP) |
| | IPR000425 (MIP) |
| | IPR000425 (sp O43315 AQP9 HUMAN) |
| hP16-049.2 | HUMAN PANTHER CLASSTFICATIONS |
| (SEQ ID No: 164) | FAMILY (SUBFAMILY) |
| | TRANSMEMBRANE CHANNEL MAJOR |
| | INTRINSIC PROTEIN FAMILY MEMBER |
| | (AQUAPORIN 9) |
| | BIOLOGICAL PROCESS |
| | Biological process unclassified(2.99.00.00.00) |
| | MOLECULAR FUNCTIONS |
| | Transporter(1.10.00.00.00) > Other |
| | transporter(1.10.99.00.00) |
| | HUMAN GENE ONTOLOGY |
| | BIOLOGICAL PROCESS |
| | cell growth and maintenance > transport |
| | transport > water transport |
| | defence response > immune response |
| | ectoderm development > neurogenesis |
| | metabolism > energy pathways |
| | MOLECULAR FUNCTION |
| | metallopeptidase > peptidyl-dipeptidase A |
| | peptidyl-dipeptidase > peptidyl-dipeptidase A |
| | aminopeptidase > Xaa-Pro aminopeptidase |
| | enzyme > N |
| | acetylglucosaminylphosphatidylinositol deacetylase |
| | enzyme > NADH dehydrogenase (ubiquinone) |
| | CELL COMPONENT |
| | cell > membrane fraction |
| | plasma membrane > integral plasma membrane |
| | protein |
| | mitochondrial membrane > mitochondrial outer |
| | membrane |
| | Golgi apparatus > secretory vesicle |
| | intercellular junction > gap junction |
| | HUMAN PROTEIN DOMAINS (INTERPRO |
| | SIGNATURES) |
| | IPR000425 (MINTRINSICP) |
| | IPR000425 (MIP) |
| | IPR000425 (sp O43315 AQP9 HUMAN) |
| | IPR000425 (MIP) |
| hP16-049.3 | HUMAN PANTHER CLASSIFICATIONS |
| (SEQ ID No: 166) | FAMILY (SUBFAMILY) |
| | TRANSMEMBRANE CHANNEL MAJOR |
| | INTRINSIC PROTEIN FAMILY MEMBER |
| | (AQUAPORIN 9) |
| | BIOLOGICAL PROCESS |
| | Biological process unclassified(2.99.00.00.00) |
| | MOLECULAR FUNCTIONS |
| | Transporter(1.10.00.00.00) > Other |
| | transporter(1.10.99.00.00) |
| | HUMAN GENE ONTOLOGY |
| | No Gene Ontology |
| | HUMAN PROTEIN DOMAINS (INTERPRO |
| | SIGNATURES) |
| | IPR000425 (MINTRINSICP) |
| | IPR000425 (MIP) |
| | IPR000425 (sp O43315 AQP9 HUMAN) |
| | IPR000425 (MIP) |
| hP16-063.1 | HUMAN PANTHER CLASSIFICATIONS |
| (SEQ ID No: 172) | FAMILY (SUBFAMILY) |
| | VOLTAGE-DEPENDENT CALCIUM |
| | CHANNEL ALPHA2-RELATED(CALCIUM |
| | CHANNEL, ALPHA 2/DELTA SUBUNIT 2) |
| | BIOLOGICAL PROCESS |
| | Transport(2.15.00.00.00) > Ion |
| | transport(2.15.01.00.00) > Cation |
| | transport(2.1-5.01.01.00) |
| | MOLECULAR FUNCTIONS |
| | Ion channel(1.03.00.00.00) > Voltage-gated ion |
| | channel(1.03.03.00.00) > Voltage-gated calcium |
| | channel(1.03.03.02.00) |
| | HUMAN GENE ONTOLOGY |
| | No Gene Ontology |
| | HUMAN PROTEIN DOMAINS (INTERPRO |
| | SIGNATURES) |
| | IPR002035 (VWA) |
| | IPR004010 (Cache) |
| | IPR002035 (VWFA) |
| hP16-063.2 | HUMAN PANTHER CLASSIFICATIONS |
| (SEQ ID No: 174) | FAMILY (SUBFAMILY) |
| | VOLTAGE-DEPENDENT CALCIUM |
| | CHANNEL ALPHA2-RELATED(CALCIUM |
| | CHANNEL, ALPHA 2/DELTA SUBUNIT 2) |
| | BIOLOGICAL PROCESS |
| | Transport(2.15.00.00.00) > Ion |
| | transport(2.15.01.00.00) > Cation |
| | transport(2.15.01.01.00) |
| | MOLECULAR FUNCTIONS |
| | Ion channel(1.03.00.00.00) > Voltage-gated ion |
| | channel(1.03.03.00.00) > Voltage-gated calcium |
| | channel(1.03.03.02.00) |
| | HUMAN GENE ONTOLOGY |
| | BIOLOGICAL PROCESS |
| | transport > ion transport |
| | MOLECULAR FUNCTION |
| | nucleic acid binding > RNA binding |
| | CELL COMPONENT |
| | integral plasma membrane protein > voltage- |
| | gated calcium channel |
| | cell > membrane fraction |
| | HUMAN PROTEIN DOMAINS (INTERPRO |
| | SIGNATURES) |
| | IPR002035 (VWA) |
| | IPR004010 (Cache) |
| | IPR002035 (VWFA) |
| hP16-063.3 | HUMAN PANTHER CLASSIFICATIONS |
| (SEQ ID No: 176) | FAMILY (SUBFAMILY) |
| | VOLTAGE-DEPENDENT CALCIUM |
| | CHANNEL ALPHA2-RELATED(CALCIUM |
| | CHANNEL, ALPHA 2/DELTA SUBUNIT 2) |
| | BIOLOGICAL PROCESS |
| | Transport(2.15.00.00.00) > Ion |
| | transport(2.15.01.00.00) > Cation |
| | transport(2.15.01.01.00) |
| | MOLECULAR FUNCTIONS |
| | Ion channel(1.03.00.00.00) > Voltage-gated ion |
| | channel(1.03.03.00.00) > Voltage-gated calcium |
| | channel(1.03.03.02.00) |
| | HUMAN GENE ONTOLOGY |
| | BIOLOGICAL PROCESS |
| | transport > ion transport |
| | MOLECULAR FUNCTION |
| | nucleic acid binding > RNA binding |
| | CELL COMPONENT |
| | integral plasma membrane protein > voltage- |
| | gated calcium channel |
| | cell > membrane fraction |
| | HUMAN PROTEIN DOMAINS (INTERPRO |
| | SIGNATURES) |
| | IPR002035 (VWA) |
| | IPR004010 (Cache) |
| | IPR002035 (VWFA) |

[0321] A CA protein (CAP) is a ATP binding protein wherein the CAP sequence is selected from the group consisting of SEQ ID NOS: 38, 72, 98, 100, 102 and 104.

[0322] A CA protein (CAP) is a transport protein wherein the CAP sequence is selected from the group consisting of SEQ ID NOS: 68, 70, 72, 84, 86, 88, 90, 130, 132, 134, 162, 164, 166, 172, 174 and 176.

[0323] A CA protein (CAP) is a protein kinase wherein the CAP sequence is selected from the group consisting of SEQ ID NOS: 102, 104, 110, 124, 140, 142, 148, 162 and 164.

[0324] A CA protein (CAP) is a lysozyme wherein the CAP sequence is selected from the group consisting of SEQ ID NOS: 20, 22, 24 and 26.

[0325] A CA protein (CAP) is a G-protein coupled receptor wherein the CAP sequence is selected from the group consisting of SEQ ID NOS: 130, 132 and 134.

[0326] A CA protein (CAP) is an adipophilin-related protein wherein the CAP sequence is selected from the group consisting of SEQ ID NOS: 46, 48, 50, 52 and 54.

[0327] A CA protein (CAP) is involved in protein metabolism wherein the CAP sequence is selected from the group consisting of SEQ ID NOS: 46, 52, 54, 96 and 98.

[0328] A CA protein (CAP) is involved in signalling/signal transduction wherein the CAP sequence is selected from the group consisting of SEQ ID NOS: 60, 62, 98, 100, 102, 104 and 156.

[0329] A CA protein (CAP) is a cell adhesion molecule wherein the CAP sequence is selected from the group consisting of SEQ ID NOS: 6, 8, 78, 110, 116, 120, 122, 124, 148and 156.

[0330] A CA protein (CAP) is expressed on a cell surface, wherein the CA protein is selected from the group consisting of SEQ ID NOS: 6, 8, 14, 20, 22, 24, 26, 32, 38, 40, 46, 48, 50, 52, 54, 60, 62, 68, 70, 72, 78, 84, 86, 88, 90, 96, 98, 100, 102, 104, 110, 112, 114, 116, 118, 120, 122, 124, 130, 132, 134, 140, 142, 148, 150, 156, 162, 164, 166, 172, 174 and 176.

[0331] Certain aspects of the present invention are described in greater detail in the non-limiting examples that follow.

### EXAMPLES

[0332] The following examples are put forth so as to provide those of ordinary skill in the art with a complete disclosure and description of how to make and use the present invention, and are not intended to limit the scope of what the inventors regard as their invention nor are they intended to represent that the experiments below are all and only experiments performed. Efforts have been made to ensure accuracy with respect to numbers used (e.g. amounts, temperature, etc.) but some experimental errors and deviations should be accounted for. Unless indicated otherwise, parts are parts by weight, molecular weight is weight average molecular weight, temperature is in degrees Celsius, and pressure is at or near atmospheric.

### Example 1

### Insertion Site Analysis following Tumor Induction in Mice

[0333] Tumors are induced in mice using either mouse mammary tumor virus (MMTV) or murine leukemia virus (MLV). MMTV causes mammary adenocarcinomas and MLV causes a variety of different hematopoetic malignancies (primarily T- or B-cell lymphomas). Three routes of infection are used: (1) injection of neonates with purified virus preparations, (2) infection by milk-borne virus during nursing, and (3) genetic transmission of pathogenic proviruses via the germ-line (Akvr1 and/or Mtv2). The type of malignancy present in each affected mouse is determined by histological analysis of H&E-stained thin sections of formalin-fixed, paraffin-embedded biopsy samples. Host DNA sequences flanking all clonally-integrated proviruses in each tumor are recovered by nested anchored-PCR using two virus-specific primers and two primers specific for a 40 bp double stranded DNA anchor ligated to restriction enzyme digested tumor DNA. Amplified bands representing host/virus junction fragments are cloned and sequenced. Then the host sequences (called “tags”) are used to BLAST analyze the Celera mouse genomic sequence. For each individual tag, three parameters are recorded: (1) the mouse chromosome assignment, (2) base pair coordinates at which the integration occurred, and (3) provirus orientation. Using this information, all available tags from all analyzed tumors are mapped to the mouse genome. To identify the protooncogene targets of provirus insertion mutation, the provirus integration pattern at each cluster of integrants is analyzed relative to the locations of all known genes in the transcriptome. The presence of provirus at the same locus in two or more independent tumors is prima facie evidence that a protooncogene is present at or very near the proviral integration sites. This is because the genome is too large for random integrations to result in observable clustering. Any clustering that is detected is unequivocal evidence for biological selection during tumorigenesis. In order to identify the human orthologs of the protooncogene targets of provirus insertion mutation, a comparative analysis of syntenic regions of the mouse and human genomes is performed.

[0334] An example of PCR amplification of host/virus junction fragments is presented in FIG. 1. Lane 1 contains the amplification products from normal control DNA and lane 2 contains the amplification products from tumor DNA. The bands result from 5′ host/virus junction fragments present in the DNA samples. Lane 1 has bands from the env/3′ LTR junctions from all proviruses (upper) and the host/5′ LTR from the pathogenic endogenous Mtv2 provirus present in this particular mouse strain. This endogenous provirus is detected because its sequence is identical to the new clonally integrated proviruses in the tumor. All four new clonally integrated proviruses known to be in this tumor are readily detected.

### Example 2

### Analysis of Quantitative RT-PCR: Comparative CT Method

[0335] The expression level of target genes is quantified using the ABI PRISM 7900HT Sequence Detection System (Applied Biosystems, Calif.). The method is based on the quantitation of the initial copy number of target template in comparison to that of a reference (normalizer) housekeeper gene (Pre-Developed TaqMan® Assay Reagents Gene Expression Quahtification Protocol, Applied Biosystems, 2001). Accumulation of DNA product with each PCR cycle is related to amplicon efficiency and the initial template concentration. Therefore the amplification efficiency of both the target and the normalizer must be approximately equal. The threshold cycle (C_{T}), which is dependent on the starting template copy number and the DNA amplification efficiency, is a PCR cycle during which PCR product growth is exponential. With a similar dynamic range for the target and normalizer, the comparative C_{T} method is applicable.

[0336] An example of the comparative C_{T} method of gene expression for quantitative RT-PCR is shown in FIG. 2. In the first step, assays are performed in quadruplicate on a normal tissue and several sample tissues. In these tissues, the means and standard deviations of C_{T} values are determined for housekeeper genes (chosen as controls if shown to be biologically stable among various samples, irrespective of disease state) and for the target gene. FIG. 2 shows an example of average C_{T} values for a housekeeper gene and target gene. These values can fall within a range from upper teens to 40 depending on the intrinsic expression level of the gene in the particular tissue. The coefficient of variance of all replicate sets cannot exceed 1.5%.

[0337] An assessment of how the ΔC_{T} changes with template dilution verifies that the efficiencies of the target and housekeeper amplicons are approximately equal if the log input amount of template RNA versus ΔC_{T} plot has a slope <0.10. With the relative efficiencies verified for target and housekeeper, the ΔΔC_{T} comparative calculation becomes valid, as mentioned above. An example of the calculated difference between the C_{T} values of target and housekeeper genes (ΔC_{T}) for various samples is shown in FIG. 3. The ΔΔC_{T} is calculated for each sample by subtracting its ΔC_{T} value from the ΔC_{T} value of the baseline (calibrator) sample. If the expression is increased in some samples and decreased in others, ΔΔC_{T} will be a mixture of negative and positive values. The final step in the calculation is to transform these values to absolute values. The formula for this is:

Comparative expression level=2^{-ΔΔCT}

[0338] The final value for the calibrator should always be one. FIG. 4 shows the ΔΔC_{T} and comparative expression level for each sample from FIG. 3.

### Example 3

### Detection of Elevated Levels of cDNA Associated with Cancer using Arrays

[0339] cDNA sequences representing a variety of candidate CA genes to be screened for differential expression in cancer are assayed by hybridization on polynucleotide arrays. The CDNA sequences include cDNA clones isolated from cell lines or tissues of interest. The cDNA sequences analyzed also include polynucleotides comprising sequence overlap with sequences in the Unigene database, and which encode a variety of gene products of various origins, functionality, and levels of characterization. cDNAs are spotted onto reflective slides (Amersham) according to methods well known in the art at a density of 9,216 spots per slide representing 4,068 sequences (including controls) spotted in duplicate, with approximately 0.8 μl of an approximately 200 ng/μl solution of cDNA.

[0340] PCR products of selected cDNA clones corresponding to the gene products of interest are prepared in a 50% DMSO solution. These PCR products are spotted onto Amersham aluminum microarray slides at a density of 9216 clones per array using a Molecular Dynamics Generation III spotting robot. Clones are spotted in duplicate, for a total of 4608 different sequences per chip.

[0341] cDNA probes are prepared from total RNA obtained by laser capture microdissection (LCM, Arcturus Enginering Inc., Mountain View, Calif.) of tumor tissue samples and normal tissue samples isolated from patients.

[0342] Total RNA is first reverse transcribed into cDNA using a primer containing a T7 RNA polymerase promoter, followed by second strand DNA synthesis. cDNA is then transcribed in vitro to produce antisense RNA using the T7 promoter-mediated expression (see, e.g., Luo et al. (1999) Nature Med 5:117-122), and the antisense RNA is then converted into cDNA. The second set of cDNAs are again transcribed in vitro, using the T7 promoter, to provide antisense RNA. This antisense RNA is then fluorescently labeled, or the RNA is again converted into cDNA, allowing for a third round of T7-mediated amplification to produce more antisense RNA. Thus the procedure provides for two or three rounds of in vitro transcription to produce the final RNA used for fluorescent labeling. Probes are labeled by making fluorescently labeled cDNA from the RNA starting material. Fluorescently labeled cDNAs prepared from the tumor RNA sample are compared to fluorescently labeled cDNAs prepared from normal cell RNA sample. For example, the cDNA probes from the normal cells are labeled with Cy3 fluorescent dye (green) and the CDNA probes prepared from suspected cancer cells are labeled with Cy5 fluorescent dye (red).

[0343] The differential expression assay is performed by mixing equal amounts of probes from tumor cells and normal cells of the same patient. The arrays are prehybridized by incubation for about 2 hrs at 60° C. in 5×SSC, 0.2% SDS, 1 mM EDTA, and then washing three times in water and twice in isopropanol. Following prehybridization of the array, the probe mixture is then hybridized to the array under conditions of high stringency (overnight at 42° C. in 50% formamide, 5×SSC, and 0.2% SDS. After hybridization, the array is washed at 55° C. three times as follows: 1) first wash in 1×SSC/0.2% SDS; 2) second wash in 0.1×SSC/0.2% SDS; and 3) third wash in 0.1×SSC.

[0344] The arrays are then scanned for green and red fluorescence using a Molecular Dynamics Generation III dual color laser-scanner/detector. The images are processed using BioDiscovery Autogene software, and the data from each scan set normalized. The experiment is repeated, this time labeling the two probes with the opposite color in order to perform the assay in both “color directions.” Each experiment is sometimes repeated with two more slides (one in each color direction). The data from each scan is normalized, and the level of fluorescence for each sequence on the array expressed as a ratio of the geometric mean of 8 replicate spots/genes from the four arrays or 4 replicate spots/gene from 2 arrays or some other permutation.

[0345] Normalization: The objective of normalization is to generate a cDNA library in which all transcripts expressed in a particular cell type or tissue are equally represented (S.M. Weissman, Mol Biol. Med. 4(3):133-143 (1987); Patanjali, et al., Proc. Natl. Acad. Sci. USA 88(5):1943-1947 (1991)), and therefore isolation of as few as 30,000 recombinant clones in an optimally normalized library may represent the entire gene expression repertoire of a cell, estimated to number 10,000 per cell.

[0346] Total RNA is extracted from harvested cells using RNeasy™ Protect Kit (Qiagen, Valencia, Calif.), following manufacturer's recommended procedures. RNA is quantified using RiboGreen™ RNA quantification kit (Molecular Probes, Inc. Eugene, Oreg.). One μg of total RNA is reverse transcribed and PCR amplified using SMART™ PCR cDNA synthesis kit (ClonTech, Palo Alto, Calif.). The cDNA products are size-selected by agarose gel electrophoresis using standard procedures (Sambrook, J. T., et al. Molecular Cloning: A Laboratory Manual, 2d ed., Cold Spring Harbor Laboratory Press, NY). The CDNA is extracted using Bio 101 Geneclean® II kit (Qbiogene, Carlsbad, Calif.). Normalization of the CDNA is carried out using kinetics of hybridization principles: 1.0 μg of cDNA is denatured by heat at 100° C. for 10 minutes, then incubated at 42° C. for 42 hours in the presence of 120 mM NaCl, 10 mM Tris.HCl (pH=8.0), 5 mM EDTA.Na+ and 50% formamide. Single-stranded CDNA (“normalized”) is purified by hydroxyapatite chromatography (#130-0520, BioRad, Hercules, Calif.) following the manufacturer's recommended procedures, amplified and converted to double-stranded cDNA by three cycles of PCR amplification, and cloned into plasmid vectors using standard procedures (Sambrook, J. T., et al. Molecular Cloning: A Laboratory Manual, 2d ed., Cold Spring Harbor Laboratory Press, NY). All primers/adaptors used in the normalization and cloning process are provided by the manufacturer in the SMART™ PCR CDNA synthesis kit (ClonTech, Palo Alto, Calif.). Supercompetent cells (XL-2 Blue Ultracompetent Cells, Stratagene, Calif.) are transfected with the normalized CDNA libraries, plated on solid media and grown overnight at 36° C.

[0347] The sequences of 10,000 recombinants per normalized library are analyzed by capillary sequencing using the ABI PRISM 3700 DNA Analyzer (Applied Biosystems, California). To determine the representation of transcripts in a library, BLAST analysis is performed on the clone sequences to assign transcript identity to each isolated clone, i.e., the sequences of the isolated polynucleotides are first masked to eliminate low complexity sequences using the XBLAST masking program (Claverie “Effective Large-Scale Sequence Similarity Searches,” Computer Methods for Macromolecular Sequence Analysis, Doolittle, ed., Meth. Enzymol. 266:212-227 Academic Press, NY, N.Y. (1996); see particularly Claverie, in “Automated DNA Sequencing and Analysis Techniques” Adams et al., eds., Chap. 36, p. 267 Academic Press, San Diego, 1994 and Claverie et al. Comput. Chem. (1993) 17:191). Generally, masking does not influence the final search results, except to eliminate sequences of relative little interest due to their low complexity, and to eliminate multiple “hits” based on similarity to repetitive regions common to multiple sequences, e.g., Alu repeats. The remaining sequences are then used in a BLASTN vs. GenBank search. The sequences are also used as query sequence in a BLASTX vs. NRP (non-redundant proteins) database search.

[0348] Automated sequencing reactions are performed using a Perkin-Elmer PRISM Dye Terminator Cycle Sequencing Ready Reaction Kit containing AmpliTaq DNA Polym erase, FS, according to the manufacturer's directions. The reactions are cycled on a GeneAmp PCR System 9600 as per manufacturer's instructions, except that they are annealed at 20° C. or 30° C. for one minute. Sequencing reactions are ethanol precipitated, pellets are resuspended in 8 microliters of loading buffer, 1.5 microliters is loaded on a sequencing gel, and the data is collected by an ABI PRISM 3700 DNA Sequencer. (Applied Biosystems, Foster City, Calif.).

[0349] The number of times a sequence is represented in a library is determined by performing sequence identity analysis on the cloned cDNA sequences and assigning transcript identity to each isolated clone. First, each sequence is checked to determine if it is a bacterial, ribosomal, or mitochondrial contaminant. Such sequences are excluded from the subsequent analysis. Second, sequence artifacts, such as vector and repetitive elements, are masked and/or removed from each sequence.

[0350] The remaining sequences are compared via BLAST (Altschul et. al, J. Mol. Biol., 215:40, 1990) to GenBank and EST databases for gene identification and are compared with each other via FastA (Pearson & Lipman, PNAS, 85:2444, 1988) to calculate the frequency of cDNA appearance in the normalized cDNA library. The sequences are also searched against the GenBank and GeneSeq nucleotide databases using the BLASTN program (BLASTN 1.3MP: Altschul et al., J. Mol. Bio. 215:403, 1990). Fourth, the sequences are analyzed against a non-redundant protein (NRP) database with the BLASTX program (BLASTX 1.3MP: Altschul et al., supra). This protein database is a combination of the Swiss-Prot, PIR, and NCBI GenPept protein databases. The BLASTX program is run using the default BLOSUM-62 substitution matrix with the filter parameter: “xnu+seg”. The score cutoff utilized is 75. Assembly of overlapping clones into contigs is done using the program Sequencher (Gene Codes Corp.; Ann Arbor, Mich.). The assembled contigs are analyzed using the programs in the GCG package (Genetic Computer Group, University Research Park, 575 Science Drive, Madison, Wis. 53711) Suite Version 10.1.

### Example 4

### Detection of CA-Sequences in Human Cancer Cells and Tissues.

[0351] DNA from prostate and breast cancer tissues and other human cancer tissues, human colon, normal human tissues including non-cancerous prostate, and from other human cell lines are extracted following the procedure of Delli Bovi et al. (1986, Cancer Res. 46:6333-6338). The DNA is resuspended in a solution containing 0.05 M Tris HCI buffer, pH 7.8, and 0.1 mM EDTA, and the amount of DNA recovered is determined by microfluorometry using Hoechst 33258 dye. Cesarone, C. et al., Anal Biochem 100:188-197 (1979).

[0352] Polymerase chain reaction (PCR) is performed using Taq polymerase following the conditions recommended by the manufacturer (Perkin Elmer Cetus) with regard to buffer, Mg²⁺, and nucleotide concentrations. Thermocycling is performed in a DNA cycler by denaturation at 94° C. for 3 min. followed by either 35 or 50 cycles of 94° C. for 1.5 min., 50° C. for 2 min. and 72° C. for 3 min. The ability of the PCR to amplify the selected regions of the CA gene is tested by using a cloned CA polynucleotide(s) as a positive template(s). Optimal Mg²⁺, primer concentrations and requirements for the different cycling temperatures are determined with these templates. The master mix recommended by the manufacturer is used. To detect possible contamination of the master mix components, reactions without template are routinely tested.

[0353] Southern blotting and hybridization are performed as described by Southern, E. M., (J. Mol. Biol. 98:503-517, 1975), using the cloned sequences labeled by the random primer procedure (Feinberg, A. P., et al., 1983, Anal. Biochem. 132:6-13). Prehybridization and hybridization are performed in a solution containing 6×SSPE, 5% Denhardt's, 0.5% SDS, 50% formamide, 100 μg/ml denaturated salmon testis DNA, incubated for 18 hrs at 42° C., followed by washings with 2×SSC and 0.5% SDS at room temperature and at 37° C. and finally in 0.1×SSC with 0.5% SDS at 68° C. for 30 min (Sambrook et al., 1989, in “Molecular Cloning: A Laboratory Manual”, Cold Spring Harbor Lab. Press). For paraffin-embedded tissue sections the conditions described by Wright and Manos (1990, in “PCR Protocols”, Innis et al., eds., Academic Press, pp. 153-158) are followed using primers designed to detect a 250 bp sequence.

### Example 5

### Detection of CA Sequences in Human Cancer Cells and Tissues

[0354] DNA from human cancer tissues, normal human tissues and from other human cell lines is extracted following the procedure of Delli Bovi et al. (1986, Cancer Res. 46:6333-6338). The DNA is resuspended in a solution containing 0.05 M Tris HC1 buffer, pH 7.8, and 0.1 mM EDTA, and the amount of DNA recovered is determined by microfluorometry using Hoechst 33258 dye. Cesarone, C. et al., Anal Biochem 100:188-1971(1979).

[0355] Polymerase chain reaction (PCR) is performed using Taq polymerase following the conditions recommended by the manufacturer (Perkin Elmer Cetus) with regard to buffer, Mg²⁺, and nucleotide concentrations. Thermocycling is performed in a DNA cycler by denaturation at 94° C. for 3 min. followed by either 35 or 50 cycles of 94° C. for 1.5 min., 50° C. for 2 min. and 72° C. for 3 min. The ability of the PCR to amplify the selected regions of CA genes is tested by using a cloned CA polynucleotide(s) as a positive template(s). Optimal Mg²⁺, primer concentrations and requirements for the different cycling temperatures are determined with these templates. The master mix recommended by the manufacturer is used. To detect possible contamination of the master mix components, reactions without template are routinely tested.

[0356] Southern blotting and hybridization are performed as described by Southern, E. M., (J. Mol. Biol. 98:503-517, 1975), using the cloned sequences labeled by the random primer procedure (Feinberg, A. P., et al., 1983, Anal. Biochem. 132:6-13). Prehybridization and hybridization are performed in a solution containing 6×SSPE, 5% Denhardt's, 0.5% SDS, 50% formamide, 100 μg/ml denaturated salmon testis DNA, incubated for 18 hrs at 42° C., followed by washings with 2×SSC and 0.5% SDS at room temperature and at 37° C. and finally in 0.1×SSC with 0.5% SDS at 68° C. for 30 min (Sambrook et al., 1989, in “Molecular Cloning: A Laboratory Manual”, Cold Spring Harbor Lab. Press). For paraffin-embedded tissue sections the conditions described by Wright and Manos (1990, in “PCR Protocols”, Innis et al., eds., Academic Press, pp. 153-158) are followed using primers designed to detect a 250 bp sequence.

### Example 6

### Expression of Cloned Polynucleotides in Host Cells

[0357] To study the protein products of CA genes, restriction fragments from CA DNA are cloned into the expression vector pMT2 (Sambrook, et al., Molecular Cloning: A Laboratory Manual, Cold Spring Harbor Laboratory Press pp 16.17-16.22 (1989)) and transfected into COS cells grown in DMEM supplemented with 10% FCS. Transfections are performed employing calcium phosphate techniques (Sambrook, et al (1989) pp. 16.32-16.40, supra) and cell lysates are prepared forty-eight hours after transfection from both transfected and untransfected COS cells. Lysates are subjected to analysis by immunoblotting using anti-peptide antibody.

[0358] In immunoblotting experiments, preparation of cell lysates and electrophoresis are performed according to standard procedures. Protein concentration is determined using BioRad protein assay solutions. After semi-dry electrophoretic transfer to nitrocellulose, the membranes are blocked in 500 mM NaCl, 20 mM Tris, pH 7.5, 0.05% Tween-20 (TTBS) with 5% dry milk. After washing in TTBS and incubation with secondary antibodies (Amersham), enhanced chemiluminescence (ECL) protocols (Amersham) are performed as described by the manufacturer to facilitate detection.

### Example 7

### Generation of Antibodies against Polypeptides

[0359] Polypeptides, unique to CA genes are synthesized or isolated from bacterial or other (e.g., yeast, baculovirus) expression systems and conjugated to rabbit serum albumin (RSA) with m-maleimido benzoic acid N-hydroxysuccinimide ester (MBS) (Pierce, Rockford, Ill.). Immunization protocols with these peptides are performed according to standard methods. Initially, a pre-bleed of the rabbits is performed prior to immunization. The first immunization includes Freund's complete adjuvant and 500 μg conjugated peptide or 100 μg purified peptide. All subsequent immunizations, performed four weeks after the previous injection, include Freund's incomplete adjuvant with the same amount of protein. Bleeds are conducted seven to ten days after the immunizations.

[0360] For affinity purification of the antibodies, the corresponding CA polypeptide is conjugated to RSA with MBS, and coupled to CNBr-activated Sepharose (Pharmacia, Uppsala, Sweden). Antiserum is diluted 10-fold in 10 mM Tris-HCI, pH 7.5, and incubated overnight with the affinity matrix. After washing, bound antibodies are eluted from the resin with 100 mM glycine, pH 2.5.

### Example 8

### Generation of Monoclonal Antibodies against a CA Polypeptide

[0361] A non-denaturing adjuvant (Ribi, R730, Corixa, Hamilton Mont.) is rehydrated to 4ml in phosphate buffered saline. 100μl of this rehydrated adjuvant is then diluted with 400μl of Hank's Balanced Salt Solution and this is then gently mixed with the cell pellet used for immunization. Approximately 500 μg conjugated peptide or 100 μg purified peptide and Freund's complete are injected into Balb/c mice via foot-pad, once a week. After 6 weeks of weekly injection, a drop of blood is drawn from the tail of each immunized animal to test the titer of antibodies against CA polypeptides using FACS analysis. When the titer reaches at least 1:2000, the mice are sacrificed in a CO₂ chamber followed by cervical dislocation. Lymph nodes are harvested for hybridoma preparation. Lymphocytes from mice with the highest titer are fused with the mouse myeloma line X63-Ag8.653 using 35% polyethylene glycol 4000. On day 10 following the fusion, the hybridoma supernatants are screened for the presence of CAP-specific monoclonal antibodies by fluorescence activated cell sorting (FACS). Conditioned medium from each hybridoma is incubated for 30 minutes with a combined aliquot of PC3, Colo-205, LnCap, or Panc-1 cells. After incubation, the cell samples are washed, resuspended in 0.1 ml diluent and incubated with 1 μg/ml of FITC conjugated F(ab′)2 fragment of goat anti-mouse IgG for 30 min at 4° C. The cells are washed, resuspended in 0.5 ml FACS diluent and analyzed using a FACScan cell analyzer (Becton Dickinson; San Jose, Calif.). Hybridoma clones are selected for further expansion, cloning, and characterization based on their binding to the surface of one or more of cell lines which express the CA polypeptide as assessed by FACS. A hybridoma making a monoclonal antibody designated mAbCA which binds an antigen designated Ag-CA.x and an epitope on that antigen designated Ag-CA.x.1 is selected.

### Example 9

### ELISA Assay for Detecting CA Related Antigens

[0362] To test blood samples for antibodies that bind specifically to recombinantly produced CA antigens, the following procedure is employed. After a recombinant CA related protein is purified, the recombinant protein is diluted in PBS to a concentration of 5 μg/ml (500 ng/100 μl). 100 microliters of the diluted antigen solution is added to each well of a 96-well Inmulon 1 plate (Dynatech Laboratories, Chantilly, Va.), and the plate is then incubated for 1 hour at room temperature, or overnight at 4° C., and washed 3 times with 0.05% Tween 20 in PBS. Blocking to reduce nonspecific binding of antibodies is accomplished by adding to each well 200 μl of a 1% solution of bovine serum albumin in PBS/Tween 20 and incubation for 1 hour. After aspiration of the blocking solution, 100 μl of the primary antibody solution (anticoagulated whole blood, plasma, or serum), diluted in the range of 1/16 to 1/2048 in blocking solution, is added and incubated for 1 hour at room temperature or overnight at 4° C. The wells are then washed 3 times, and 100 μl of goat anti-human IgG antibody conjugated to horseradish peroxidase (Organon Teknika, Durham, N.C.), diluted 1/500 or 1/1000 in PBS/Tween 20, 100 μl of o-phenylenediamine dihydrochloride (OPD, Sigma) solution is added to each well and incubated for 5-15 minutes. The OPD solution is prepared by dissolving a 5 mg OPD tablet in 50 ml 1% methanol in H₂O and adding 50 μl 30% H₂O₂ immediately before use. The reaction is stopped by adding 25 1 of 4M H₂SO₄. Absorbances are read at 490 nm in a microplate reader (Bio-Rad).

### Example 10

### Identification and Characterization of CA Antigen on Cancer Cell Surface

[0363] A cell pellet of proximately 25 ul packed cell volume of a cancer cell preparation is lysed by first diluting the cells to 0.5 ml in water followed by freezing and thawing three times. The solution is centrifuged at 14,000 rpm. The resulting pellet, containing the cell membrane fragments, is resuspended in 50 μl of SDS sample buffer (Invitrogen, Carlsbad, Calif.). The sample is heated at 80° C. for 5 minutes and then centrifuged for 2 minutes at 14,000 rpm to remove any insoluble materials.

[0364] The samples are analyzed by Western blot using a 4 to 20% polyacrylamide gradient gel in Tris-Glycine SDS (Invitrogen; Carlsbad Calif.) following the manufacturer's directions. Ten microliters of membrane sample are applied to one lane on the polyacrylamide gel. A separate 10 μL sample is reduced first by the addition of 2 μL of dithiothreitol (100 mM) with heating at 80° C. for 2 minutes and then loaded into another lane. Pre-stained molecular weight markers SeeBlue Plus2 (Invitrogen; Carlsbad, Calif.) are used to assess molecular weight on the gel. The gel proteins are transferred to a nitrocellulose membrane using a transfer buffer of 14.4 g/l glycine, 3 g/l of Tris Base, 10% methanol, and 0.05% SDS. The membranes are blocked, probed with a CAP-specific monoclonal antibody (at a concentration of 0.5 ug/ml), and developed using the Invitrogen WesternBreeze Chromogenic Kit-AntiMouse according to the manufacturer's directions. In the reduced sample of the tumor cell membrane samples, a prominent band is observed migrating at a molecular weight within about 10% of the predicted molecular weight of the corresponding CA protein..

### Example 11

### Preparation of Vaccines

[0365] The present invention also relates to a method of stimulating an immune response against cells that express CA polypeptides in a patient using CA polypeptides of the invention that act as an antigen produced by or associated with a malignant cell. This aspect of the invention provides a method of stimulating an immune response in a human against cancer cells or cells that express CA polynucleotides and polypeptides. The method comprises the step of administering to a human an immunogenic amount of a polypeptide comprising: (a) the amino acid sequence of a huma CA protein or (b) a mutein or variant of a polypeptide comprising the amino acid sequence of a human endogenous retrovirus CA protein.

### Example 12

### Generation of Transgenic Animals expressing Polypeptides as a Means for Testing Therapeutics

[0366] CA nucleic acids are used to generate genetically modified non-human animals, or site specific gene modifications thereof, in cell lines, for the study of function or regulation of prostate tumor-related genes, or to create animal models of diseases, including prostate cancer. The term “transgenic” is intended to encompass genetically modified animals having an exogenous CA gene(s) that is stably transmitted in the host cells where the gene(s) may be altered in sequence to produce a modified protein, or having an exogenous CA LTR promoter operably linked to a reporter gene. Transgenic animals may be made through a nucleic acid construct randomly integrated into the genome. Vectors for stable integration include plasmids, retroviruses and other animal viruses, YACs, and the like. Of interest are transgenic mammals, e.g. cows, pigs, goats, horses, etc., and particularly rodents, e.g. rats, mice, etc.

[0367] The modified cells' or animals are useful in the study of CA gene function and regulation. For example, a series of small deletions and/or substitutions may be made in the CA genes to determine the role of different genes in tumorigenesis. Specific constructs of interest include, but are not limited to, antisense constructs to block CA gene expression, expression of dominant negative CA gene mutations, and over-expression of a CA gene. Expression of a CA gene or variants thereof in cells or tissues where it is not normally expressed or at abnormal times of development is provided. In addition, by providing expression of proteins derived from CA in cells in which it is otherwise not normally produced, changes in cellular behavior can be induced.

[0368] DNA constructs for random integration need not include regions of homology to mediate recombination. Conveniently, markers for positive and negative selection are included. For various techniques for transfecting mammalian cells, see Keown et al., Methods in Enzymology 185:527-537 (1990).

[0369] For embryonic stem (ES) cells, an ES cell line is employed, or embryonic cells are obtained freshly from a host, e.g. mouse, rat, guinea pig, etc. Such cells are grown on an appropriate fibroblast-feeder layer or grown in the presence of appropriate growth factors, such as leukemia inhibiting factor (LIF). When ES cells are transformed, they may be used to produce transgenic animals. After transformation, the cells are plated onto a feeder layer in an appropriate medium. Cells containing the construct may be detected by employing a selective medium. After sufficient time for colonies to grow, they are picked and analyzed for the occurrence of integration of the construct. Those colonies that are positive may then be used for embryo manipulation and blastocyst injection. Blastocysts are obtained from 4 to 6 week old superovulated females. The ES cells are trypsinized, and the modified cells are injected into the blastocoel of the blastocyst. After injection, the blastocysts are returned to each uterine horn of pseudopregnant females. Females are then allowed to go to term and the resulting chimeric animals screened for cells bearing the construct. By providing for a different phenotype of the blastocyst and the ES cells, chimeric progeny can be readily detected.

[0370] The chimeric animals are screened for the presence of the modified gene and males and females having the modification are mated to produce homozygous progeny. If the gene alterations cause lethality at some point in development, tissues or organs are maintained as allogeneic or congenic grafts or transplants, or in in vitro culture. The transgenic animals may be any non-human mammal, such as laboratory animals, domestic animals, etc. The transgenic animals are used in functional studies, drug screening, etc., e.g. to determine the effect of a candidate drug on prostate cancer, to test potential therapeutics or treatment regimens, etc.

### Example 13

### Diagnostic Imaging Using CA Specific Antibodies

[0371] The present invention encompasses the use of antibodies to CA polypeptides to accurately stage cancer patients at initial presentation and for early detection of metastatic spread of cancer. Radioimmunoscintigraphy using monoclonal antibodies specific for CA polypeptides can provide an additional cancer-specific diagnostic test. The monoclonal antibodies of the instant invention are used for histopathological diagnosis of carcinomas.

[0372] Subcutaneous human xenografts of cancer cells in nude mice is used to test whether a technetium-99m (^{99m}Tc)-labeled monoclonal antibody of the invention can successfully image the xenografted cancer by external gamma scintography as described for seminoma cells by Marks, et al., Brit. J. Urol. 75:225 (1995). Each monoclonal antibody specific for a CA polypeptide is purified from ascitic fluid of BALB/c mice bearing hybridoma tumors by affinity chromatography on protein A-Sepharose. Purified antibodies, including control monoclonal antibodies such as an avidin-specific monoclonal antibody (Skea, et al., J. Immunol. 151:3557 (1993)) are labeled with ^{99m}Tc following reduction, using the methods of Mather, et al., J. Nucl. Med. 31:692 (1990) and Zhang et al., Nucl. Med. Biol. 19:607 (1992). Nude mice bearing human cancer cells are injected intraperitoneally with 200-500 μCi of ^{99m}Tc-labeled antibody. Twenty-four hours after injection, images of the mice are obtained using a Siemens ZLC3700 gamma camera equipped with a 6 mm pinhole collimator set approximately 8 cm from the animal. To determine monoclonal antibody biodistribution following imaging, the normal organs and tumors are removed, weighed, and the radioactivity of the tissues and a sample of the injectate are measured. Additionally, CA-specific antibodies conjugated to antitumor compounds are used for cancer-specific chemotherapy.

### Example 14

### Immunohistochemical Methods

[0373] Frozen tissue samples from cancer patients are embedded in an optimum cutting temperature (OCT) compound and quick-frozen in isopentane with dry ice. Cryosections are cut with a Leica 3050 CM mictrotome at thickness of 5 μm and thaw-mounted on vectabound-coated slides. The sections are fixed with ethanol at −20° C. and allowed to air dry overnight at room temperature. The fixed sections are stored at −80° C. until use. For immunohistochemistry, the tissue sections are retrieved and first incubated in blocking buffer (PBS, 5% normal goat serum, 0.1% Tween 20) for 30 minutes at room temperature, and then incubated with the CA protein-specific monoclonal antibody and control monoclonal antibodies diluted in blocking buffer (1 μg/ml) for 120 minutes. The sections are then washed three times with the blocking buffer. The bound monoclonal antibodies are detected with a goat anti-mouse IgG+IgM (H+L) F(ab′)²-peroxidase conjugates and the peroxidase substrate diaminobenzidine (1 mg/ml, Sigma Catalog No. D 5637) in 0.1 M sodium acetate buffer pH 5.05 and 0.003% hydrogen peroxide (Sigma cat. No. H1009). The stained slides are counter-stained with hematoxylin and examined under Nikon microscope.

[0374] Monoclonal antibody against a CA protein (antigen) is used to test reactivity with various cell lines from different types of tissues. Cells from different established cell lines are removed from the growth surface without using proteases, packed and embedded in OCT compound. The cells are frozen and sectioned, then stained using a standard IHC protocol. The CellArray™ technology is described in WO 01/43869. Normal tissue (human) obtained by surgical resection are frozen and mounted. Cryosections are cut with a Leica 3050 CM mictrotome at thickness of 5 μm and thaw-mounted on vectabound-coated slides. The sections are fixed with ethanol at −20° C. and allowed to air dry overnight at room temperature. PolyMICA™ Detection kit is used to determine binding of a CA-specific monoclonal antibody to normal tissue. Primary monoclonal antibody is used at a final concentration of 1 μg/ml.

[0375] All publications and patent applications cited in this specification are herein incorporated by reference as if each individual publication or patent application were specifically and individually indicated to be incorporated by reference.

[0376] Although the foregoing invention has been described in some detail by way of illustration and example for purposes of clarity of understanding, it will be readily apparent to those of ordinary skill in the art in light of the teachings of this invention that certain changes and modifications may be made thereto without departing from the spirit or scope of the appended claims.

What is claimed is:

1. An isolated nucleic acid comprising at least 10 contiguous nucleotides of a sequence selected from the group consisting of the polynucleotide sequences of SEQ ID NOS: 5, 7, 13, 19, 21, 23, 25, 31, 37, 39, 45, 47, 49, 51, 53, 59, 61, 67, 69, 71, 77, 83, 85, 87, 89, 95, 97, 99, 101, 103, 109, 111, 113, 115, 117, 119, 121, 123, 129, 131, 133, 139, 141, 147, 149, 155, 161, 163, 165, 171, 173 and 175 shown in Tables 1-18, or its complement.

2. A host cell comprising a recombinant nucleic acid of claim 1.

3. An expression vector comprising the isolated nucleic acid according to claim 1.

4. A host cell comprising the expression vector of claim 3.

5. The polynucleotide according to claim 1, wherein said polynucleotide, or its complement or a fragment thereof, further comprises a detectable label.

6. The polynucleotide according to claim 1, wherein said polynucleotide, or its complement or a fragment thereof, is attached to a solid support.

7. The polynucleotide according to claim 1, wherein said polynucleotide, or its complement or a fragment thereof, is prepared at least in part by chemical synthesis.

8. The polynucleotide according to claim 1, wherein said polynucleotide, or its complement or a fragment thereof, is an antisense fragment.

9. The polynucleotide according to claim 1, wherein said polynucleotide, or its complement or a fragment thereof, is single stranded.

10. The polynucleotide according to claim 1, wherein said polynucleotide, or its complement or a fragment thereof, is double stranded.

11. The polynucleotide according to claim 1, comprising at least 15 contiguous nucleotides.

12. The polynucleotide according to claim 1, comprising at least 20 contiguous nucleotides.

13. A microarray for detecting a cancer associated (CA) nucleic acid comprising:
at least one probe comprising at least 10 contiguous nucleotides of a sequence selected from the group consisting of the polynucleotide sequences SEQ ID NOS: 5, 7, 13, 19, 21, 23, 25, 31, 37, 39, 45, 47, 49, 51, 53, 59, 61, 67, 69, 71, 77, 83, 85, 87, 89, 95, 97, 99, 101, 103, 109, 111, 113, 115, 117, 119, 121, 123, 129, 131, 133, 139, 141, 147, 149, 155, 161, 163, 165, 171, 173 and 175 shown in Tables 1-18, or its complement.

14. The microarray according to claim 13, comprising at least 15 contiguous nucleotides.

15. The microarray according to claim 13, comprising at least 20 contiguous nucleotides.

16. An isolated polypeptide, encoded within an open reading frame of a CA sequence selected from the group consisting of the polynucleotide sequences of SEQ ID NOS: 4, 12, 18, 30, 36, 44, 58, 66, 76, 82, 94, 108, 128, 138, 146, 154, 160 and 170 shown in Tables 1-18, or its complement.

17. The polypeptide of claim 16, wherein said polypeptide comprises the amino acid sequence encoded by a polynucleotide selected from the group consisting of SEQ ID NOS: 5, 7, 13, 19, 21, 23, 25, 31, 37, 39, 45, 47, 49, 51, 53, 59, 61, 67, 69, 71, 77, 83, 85, 87, 89, 95, 97, 99, 101, 103, 109, 111, 113, 115, 117, 119, 121, 123, 129, 131, 133, 139, 141, 147, 149, 155, 161, 163, 165, 171, 173 and 175 shown in Tables 1-18.

18. The polypeptide of claim 16, wherein said polypeptide comprises the amino acid sequence encoded by a polypeptide selected from the group consisting of SEQ ID NOS: 6, 8, 14, 20, 22, 24, 26, 32, 38, 40, 46, 48, 50, 52, 54, 60, 62, 68, 70, 72, 78, 84, 86, 88, 90, 96, 98, 100, 102, 104, 110, 112, 114, 116, 118, 120, 122, 124, 130, 132, 134, 140, 142, 148, 150, 156, 162, 164, 166, 172, 174 and 176 shown in Tables 1-18.

19. The polypeptide of claim 16, wherein said polypeptide comprises the amino acid sequence of an epitope of the amino acid sequence of a CA polypeptide selected from the group consisting of SEQ ID NOS: 6, 8, 14, 20, 22, 24, 26, 32, 38, 40, 46, 48, 50, 52, 54, 60, 62, 68, 70, 72, 78, 84, 86, 88, 90, 96, 98, 100, 102, 104, 110, 112, 114, 116, 118, 120, 122, 124, 130, 132, 134, 140, 142, 148, 150, 156, 162, 164, 166, 172, 174 and 176 shown in Tables 1- 18.

20. The polypeptide of claim 16, wherein said polypeptide is expressed on a cell surface, wherein the CA protein selected from the group consisting of SEQ ID NOS: 6, 8, 14, 20, 22, 24, 26, 32, 38, 40, 46, 48, 50, 52, 54, 60, 62, 68, 70, 72, 78, 84, 86, 88, 90, 96, 98, 100, 102, 104, 110, 112, 114, 116, 118, 120, 122, 124, 130, 132, 134, 140, 142, 148, 150, 156, 162, 164, 166, 172, 174 and 176.

21. The polypeptide of claim 16, wherein said polypeptide or fragment thereof is attached to a solid support.

22. An isolated antibody or antigen binding fragment thereof, that binds to a polypeptide according to any one of claims 16-20.

23. The isolated antibody or antigen binding fragment thereof according the claim 22, wherein said antibody or fragment thereof is attached to a solid support.

24. The isolated antibody or antigen binding fragment thereof according the claim 22, wherein said antibody is a monoclonal antibody.

25. The isolated antibody or antigen binding fragment thereof according the claim 22, wherein said antibody is a polyclonal antibody.

26. The isolated antibody or antigen binding fragment thereof according the claim 22, wherein said antibody or fragment thereof further comprises a detectable label.

27. An isolated antibody that binds to a polypeptide, or antigen binding fragment thereof, according to any of claims 16-20, prepared by a method comprising the steps of: (i) immunizing a host animal with a composition comprising said polypeptide, or antigen binding fragment thereof, and (ii) collecting cells from said host expressing antibodies against the antigen or antigen binding fragment thereof.

28. The monoclonal antibody according to claim 24, wherein the monoclonal antibody binds to the extracellular domain of the CA protein.

29. The monoclonal antibody according to claim 24, wherein the monoclonal antibody binds to at least one human cancer cell line.

30. The monoclonal antibody according to claim 24, wherein the monoclonal antibody is prepared by a process comprising:
(a) providing a hybridoma capable of producing the monoclonal antibody; and
(b) culturing the hybridoma under conditions that provide for the production of the monoclonal antibody by the hybridoma.

31. A hybridoma that produces the monoclonal antibody according to claim 24.

32. The antibody according to claim 22, wherein the antibody is a humanized antibody.

33. The antibody according to claim 22, wherein the CAP is expressed on a cancer cell surface but not on a normal cell surface.

34. The antibody according to claim 22, wherein the CAP.. is. differentially expressed on a cancer cell surface relative to a normal cell surface.

35. The antibody according to claim 22, wherein the antibody is linked to a therapeutic agent.

36. The. antibody according to claim 24, wherein the antibody is linked to a therapeutic agent.

37. A pharmaceutical composition comprising the antibody according to claim 22 and a pharmaceutically acceptable excipient.

38. A pharmaceutical composition comprising the antibody according to claim 35 and a pharmaceutically acceptable excipient.

39. A pharmaceutical composition comprising the antibody according to claim 36 and a pharmaceutically acceptable excipient.

40. A kit for detecting cancer cells comprising the antibody according to claim 22.

41. A kit for detecting cancer cells comprising the monoclonal antibody according to claim 24.

42. A method for detecting a presence or an absence of cancer cells in an individual, the method comprising:
contacting cells from the individual with the antibody according to any of claims 22 or 24;
and detecting a complex of a CAP from the cancer cells and the antibody,
wherein detection of the complex correlates with the presence of cancer cells in the individual.

43. A method for inhibiting growth of cancer cells in an individual, the method comprising: administering to the individual an effective amount of a pharmaceutical composition according to any of claims 37, 38, or 39.

44. A method for delivering a therapeutic agent to cancer cells in an individual, the method comprising: administering to the individual an effective amount of a pharmaceutical composition according to any of claims 37, 38, or 39.

45. A kit for diagnosing the presence of cancer in a test sample, said kit comprising at least one polynucleotide that selectively hybridizes to a CA polynucleotide sequence selected from the group consisting of the polynucleotide sequences SEQ ID NOS: 4, 12, 18, 30, 36, 44, 58, 66, 76, 82, 94, 108, 128, 138, 146, 154, 160 and 170 shown in Tables 1-18, or its complement.

46. A kit for diagnosing the presence of cancer in a test sample, said kit comprising at least one polynucleotide that selectively hybridizes to the sequence of a polynucleotide sequence selected from the group consisting of the polynucleotide sequences SEQ ID NOS: 5, 7, 13, 19, 21, 23, 25, 31, 37, 39, 45, 47, 49, 51, 53, 59, 61, 67, 69, 71, 77, 83, 85, 87, 89, 95, 97, 99, 101, 103, 109, 111, 113, 115, 117, 119, 121, 123, 129, 131, 133, 139, 141, 147, 149, 155, 161, 163, 165, 171, 173 and 175 shown in Tables 1-18, a fragment thereof, or their complement.

47. An electronic library comprising a polynucleotide, or fragment thereof, comprising a CA polynucleotide sequence selected from the group consisting of the polynucleotide sequences of SEQ ID NOS: 4, 12, 18, 30, 36, 44, 58, 66, 76, 82, 94, 108, 128, 138, 146, 154, 160 and 170 shown in Tables 1-18, or its complement.

48. An electronic library comprising a polynucleotide, or fragment thereof, comprising a CA polynucleotide sequence selected from the group consisting of the polynucleotide sequences of SEQ ID NOS: 5, 7, 13, 19, 21, 23, 25, 31, 37, 39, 45, 47, 49, 51, 53, 59, 61, 67, 69, 71, 77, 83, 85, 87, 89, 95, 97, 99, 101, 103, 109, 111, 113, 115, 117, 119, 121, 123, 129, 131, 133, 139, 141, 147, 149, 155, 161, 163, 165, 171, 173 and 175 shown in Tables 1-18.

49. An electronic library comprising a polypeptide, or fragment thereof, comprising a CA polypeptide sequence selected from the group consisting of the polypeptide sequences of SEQ ID NOS: 6, 8, 14, 20, 22, 24, 26, 32, 38, 40, 46, 48, 50, 52, 54, 60, 62, 68, 70, 72, 78, 84, 86, 88, 90, 96, 98, 100, 102, 104, 110, 112, 114, 116, 118, 120, 122, 124, 130, 132, 134, 140 142, 148, 150, 156, 162, 164, 166, 172, 174 and 176 shown in Tables 1-18.

50. A method of screening for anticancer activity comprising:
(a) providing a cell that expresses a cancer associated (CA) gene encoded by a nucleic acid sequence selected from the group consisting of the sequences SEQ ID NOS: 4, 12, 18, 30, 36, 44, 58, 66, 76, 82, 94, 108, 128, 138, 146, 154, 160 and 170 shown in Tables 1- 1 8, or fragment thereof;
(b) contacting a tissue sample derived from a cancer cell with an anticancer drug candidate; and
(c) monitoring an effect of the anticancer drug candidate on an expression of the CA polynucleotide in the tissue sample.

51. The method of screening for anticancer activity according to claim 50, wherein the CA gene comprises at least one nucleic acid sequence selected from the group consisting ofthe sequences SEQ ID NOS: 5, 7, 13, 19, 21, 23, 25, 31, 37, 39, 45, 47, 49, 51, 53, 59, 61, 67, 69, 71, 77, 83, 85, 87, 89, 95, 97, 99, 101, 103, 109, 111, 113, 115, 117, 119, 121, 123, 129, 131, 133, 139, 141, 147, 149, 155, 161, 163, 165, 171, 173 and 175 shown in Tables 1-18.

52. The method of screening for anticancer activity according to claim 50, further comprising:
(d) comparing the level of expression in the absence of said drug candidate to the level of expression in the presence of the drug candidate.

53. The method of screening for anticancer activity according to claim 51, wherein the drug candidate is an inhibitor of transcription and further wherein the nucleic acid sequence is selected from the group consisting of SEQ ID NOS: 5, 7, 13, 19, 21, 23, 25, 31, 37, 39, 45, 47, 49, 51, 53, 59, 61, 67, 69, 71, 77, 83, 85, 87, 89, 95, 97, 99, 101,103, 109, 111, 113, 115, 117, 119, 121, 123, 129, 131, 133, 139, 141, 147, 149, 155, 161, 163, 165, 171, 173 and 175 shown in Tables 1-18.

54. A method for detecting cancer associated with expression of a polypeptide in a test cell sample, comprising the steps of:
(i) detecting a level of expression of at least one polypeptide selected from the group consisting of SEQ ID NOS: 6, 8, 14, 20, 22, 24, 26, 32, 38, 40, 46, 48, 50, 52, 54, 60, 62, 68, 70, 72, 78, 84, 86, 88, 90, 96, 98, 100, 102, 104,.110, 112, 114, 116, 118, 120, 122, 124, 130, 132, 134, 140, 142, 148, 150, 156, 162, 164, 166, 172, 174 and 176 shown in Tables 1-18, or a fragment thereof; and
(ii) comparing the level of expression of the polypeptide in the test sample with a level of expression of polypeptide in a normal cell sample, wherein an altered level of expression of the polypeptide in the test cell sample relative to the level of polypeptide expression in the normal cell sample is indicative of the presence of cancer in the test cell sample.

55. A method for detecting cancer associated with expression of a polypeptide in a test cell sample, comprising the steps of:
(i) detecting a level of activity of at least one polypeptide selected from the group consisting of SEQ ID NOS: 6, 8, 14, 20, 22, 24, 26, 32, 38, 40, 46, 48, 50, 52, 54, 60, 62, 68, 70, 72, 78, 84, 86, 88, 90, 96, 98, 100, 102, 104, 110, 112, 114, 116, 118, 120, 122, 124, 130, 132, 134, 140, 142, 148, 150, 156, 162, 164, 166, 172, 174 and 176 shown in Tables 1-18, or a fragment thereof, wherein said activity corresponds to at least one activity for the polypeptide listed in Table 20; and
(ii) comparing the level of activity of the polypeptide in the test sample with a level of activity of polypeptide in a normal cell sample, wherein an altered level of activity of the polypeptide in the test cell sample relative to the level of polypeptide activity in the normal cell sample is indicative of the presence of cancer in the test cell sample.

56. A method for detecting cancer associated with the presence of an antibody in a test serum sample, comprising the steps of:
(i) detecting a level of an antibody against an antigenic polypeptide selected from the group consisting of SEQ ID NOS: 6, 8, 14, 20, 22, 24, 26, 32, 38, 40, 46, 48, 50, 52, 54, 60, 62, 68, 70, 72, 78, 84, 86, 88, 90, 96, 98, 100, 102, 104, 110, 112, 114, 116, 118, 120, 122, 124, 130, 132, 134, 140, 142, 148, 150, 156, 162, 164, 166, 172, 174 and 176 shown in Tables 1-18, or antigenic fragment thereof; and
(ii) comparing said level of said antibody in the test sample with a level of said antibody in the control sample, wherein an altered level of antibody in said test sample relative to the level of antibody in the control sample is indicative of the presence of cancer in the test serum sample.

57. A method for screening for a bioactive agent capable of modulating the activity of a CA protein (CAP), wherein said CAP is encoded by a nucleic acid comprising a nucleic acid sequence selected from the group consisting of the polynucleotide sequences SEQ ID NOS: 5, 7, 13, 19, 21, 23, 25, 31, 37, 39, 45, 47, 49, 51, 53, 59, 61, 67, 69, 71, 77, 83, 85, 87, 89, 95, 97, 99, 101, 103, 109, 111, 113, 115, 117, 119, 121, 123, 129, 131, 133, 139, 141, 147, 149, 155, 161, 163, 165, 171, 173 and 175 shown in Tables 1-18, said method comprising:
a) combining said CAP and a candidate bioactive agent; and
b) determining the effect of the candidate agent on the bioactivity of said CAP.

58. The method of screening for the bioactive agent according to claim 57, wherein the bioactive agent affects the expression of the CA protein (CAP).

59. The method of screening for the bioactive agent according to claim 57, wherein the bioactive agent affects the activity of the CA protein (CAP), wherein such activity is selected from the activities listed in Table 20.

60. The method of screening for the bioactive agent according to claim 57, wherein the bioactive agent is a modulator of an activity selected from the group consisting of: transport, ATP binding, protein metabolism, cell adhesion, signalling, protein kinase, and signal transduction.

61. A method for diagnosing cancer comprising:
a) determining the expression of one or more genes comprising a nucleic acid sequence selected from the group consisting of the human genomic and mRNA sequences outlined in Tables 1-1 8, in a first tissue type of a first individual; and
b) comparing said expression of said gene(s) from a second normal tissue type from said first individual or a second unaffected individual;
wherein a difference in said expression indicates that the first individual has cancer.

62. A method for treating cancers comprising administering to a patient an inhibitor of a CA protein (CAP), wherein said CAP is encoded by a nucleic acid comprising a nucleic acid sequence selected from the group consisting of the human nucleic acid sequences in Tables 1-18.

63. The method for treating cancers according to claim 62, wherein the inhibitor of a CA protein (CAP) binds to the CA protein.

64. The method for treating cancers according to claim 62, wherein the inhibitor is a modulator of transport and further wherein the CAP sequence is selected from the group consisting of SEQ ID NOS: 68, 70, 72, 84, 86, 88, 90, 130, 132, 134, 162, 164, 166, 172, 174 and 176 shown in Tables 1-18.

65. The method for treating cancers according to claim 62, wherein the inhibitor of a CA protein (CAP) is a G-protein coupled receptor (GPCR) antagonist and further wherein the CAP sequence is selected from the group consisting of SEQ ID NOS: 130, 132 and 134 shown in Tables 1-18.

66. The method for treating cancers according to claim 62, wherein the inhibitor is a modulator of protein metabolism and further wherein the CAP sequence is selected from the group consisting of SEQ ID NOS: 46, 52, 54, 96 and 98 shown in Tables 1-18.

67. The method for treating cancers according to claim 62, wherein the inhibitor is a protein kinase antagonist and further wherein the CAP sequence is selected from the group consisting of SEQ ID NOS: 102, 104, 110, 124, 140,142, 148, 162 and 164 shown in Tables 1-18.

68. The method for treating cancers according to claim 62, wherein the inhibitor is an modulator of cell adhesion and further wherein the CAP sequence is selected from the group consisting of SEQ ID NOS: 6, 8, 78, 110, 116, 120, 122, 124, 148 and 156 shown in Tables 1-18.

69. The method for treating cancers according to claim 62, wherein the inhibitor is a modulator of signal transduction and further wherein the CAP sequence is selected from the group consisting of SEQ ID NOS: 60, 62, 98, 100, 102, 104 and 156 shown in Tables. 1-18.

The application's sequence listing, which the Patent Office published only in electronic form, follows.

SEQUENCE LISTING (176 sequences)

SEQ ID NO: 1 - DNA, 310122 bp, Mus musculus
  misc_feature (1)...(310122): n = A,T,C or G
cctgtagtaagaaagtgactaaagccttgtaggcggggccctgacctagcagggctagtgcctttgtgagaagagatgccctcacacactccggtggcctctcctctttttttttttccttgtggtgctgggggttgaactcatggtttttcacactctggatctgcccaaccagtaggcagtctgtccctcccctcctgtcctttgtcccatgcaactcaaaggaaagatcacaaagaggaccataccagaaggtagcaggcagccattggcaagtcctgttggcacctcaatctcagaggtgaaagtttcaacttctgttgtttaagccgggcactgtgtggcgtcttgtgatgccagccggagctggcaaatatgcctgccaggccaccaggatcatgcttactcaccatggtcaatcgtctggaaagctacacattctacaagatgcaatgcgattacaaaccggcggctctttggaagttgaaaactccttcagtggaaggaaggtgcctttgacgtatttggtatctgaagattagcgcccctcctctcccgccttagacaccccaaagcgcgtgcattagcctgtggctgagcaaaatcgtgcaacacaacctattttatagcaaagggcagaatttcttacataggtagtgagtacttccttctaagtggaaaagtaaaccatttgtacattttcacagtattgtaaagtaagcgcgtgtgcacgcacacacacgacttttatgataagtcatatgcttttattatttaaaagacaatgaggattgccttttaaccctatcatctaagaaggtgtgtgaatctattctaagaccggtattagttaccaagagcagattcactagatgtggctctctagaaaaagatattgagcctggaaagcggttggaaaagttacacccaatagttggacttcggcttttgaatccctcagtgggaaagcatttactgctattcaagtggaagatttggcgacgctgggtttaccctcctgaacttatcacacttcaaaagcatgagggagtttcatttgtcctgtgaataaaaaataaaattaggtcaggtgatgtttgaaggcttggcttccttcacaagtgcatttagtcaccgagcagtcactcagaggggaggtatggccccgtgagtgacctgggagacatttttcttttctttttcttcttcttctggaaataccctgaggtgccatctggattctgaccattttccttcttccacatggtgttggctggtctcttcctcagctctccttgcaaagttagcccatccatagactccaggactctggccaagacactggtaattgtggctgttcttagatctacctgtgcctgctgcccatccaggtccaagttttcctctcaggtggagcacagatgctccatgtgcaacgagcccaacgcttccctccatccttcatcattctgttcaccggtcatcttgtgacagagttttagcatgtagccttgacgggcctggaattccctacatagaggatggcctcacacttacagtaatcctcctgcctcagtctcctgagcagctgggattgcaggtgtacaccaccatgccagggcttgctttctcttcatgaaaggcttccatttggtccagtggcttcagccattttctacaatcacggtagactatctgaagacaatttggacaatgcaaaggatagatagacagacagtctcgactataattgccaccattgggtcctacttttctatcactgtaataaaacactattaccaaggcaacttataggaagaaaggatttatttggacttatggtcccagagggataatgttccatgatggtggaacagaaacttagtggtaagagcaggaagctgagggttcctatctcgaactaaatcaaggagagagagagagagagagagagagagagagagagagagagagagagagagagaacctgaaacgctgcttcaaagcctgcccaagtgacatatgccctctatcaagaccacatcatccaaacagtgccaccgtcagggtctcaaatgcccgaagctacagaggacatccccttcaaaccaccacatacagcaaacatagtaaaagcccagcttcctttttatgtgctgtgtgcttatagatgcaatttagttaacagacctgcctgggatcagatcaaggaattcacgtttcacttgtgtatgctacaggtgtctgcttgcagatggtgtgctatccttggataatacacttactgaaagtgctgaccccaatagcaagtggctacgctatggattgcagtgtgtgtctgcatgatctaattgtcaaggtctttgacgaacgccgaagaaaacctgtctgggtttgggatttctgtgccccatgagcaggacaggatggatccacaggatgagccgactcgtgtggatgaacccgaactctgaagaggttcttttagggaggtctgaggtgcttatgaagataactctgatctgcccttcccatcccagactcccacatttactctggctactctttgaggatttgaaatgagagtcagggagatggctcagtaaagtgctcacctttgcaaacacaagggcctgagttccacatccaggacccacataaaacaaatgacaaaacccagcacttgcaattctagaactggagagatggagactggtctgagactcattagcccaggctgtttagacagttccaggccagtgagagaccctcaaaaaagaagatgctcagtgcctggggggtgccatgaaaggttgtcctctgttccccccccccagatgccctccacctgtacatagcacatttataagcatgcacacaaacatacagacatgcaaacagaattggagacttatgcgaacttcctcataaacaatggggttcaaacgtgattacattgttcaatgacataaaatatagtagttcccatgaagctcaagaggaaggaagaccaaagagtggatgcttcagtcctacttagaagggggaacaagataatcaagggaagtagagggagggagggacttgggaggaagagtgaagggagaggggaaaaagaggggcagaatcaggtataggaggagatggtggagatgtacagagggccaggaaattgaacagaggtgtgtagcaatggggaatggggaactgggggtagctaccagaaagtcccagatgcctggaaagcaagagcctcccaggaccccatggggatggcattagctgaaataccccataaagaggagggaaaacctgttgagaccacatctagaggttaggcatggccccctggttgacagatggggccacccaccaatctgcaaaattttaactcagaattgctcctgattaaaggaaatacagggacaaagagtagaacagagactgaagggaagaccatccagagactgccccccccccccccgggatccatcccacatgcagacaccaaacccagacactattgctgatgccaagaagtgcttgctgacaggagcttgatatagctgtctcctcagaggctctgccagatcctgaccaatacaaatgtgaatgctcgcagccaaccattggaccgagtccaaggaccccaatggaggagttaggggaaggactgaaagagctgaaggggccttacctggcatcaatgggagggaaggcccttggtcctgtgaaggcttgatggcctagtgtagaggaatgctagggtgatgaggaaggagtgggtaggtgggtgggtgagcaccctcatagaagcaggatggggggttgggatagggggttttcagaggggaaaatgggaaaggggataacatttgaaatgtaaacaagtaaaatatccaattaaaaagaagaaaaaaaattagtggtttccttttttggtatttttagcttagtaaatatccagatatctagagttctttcttcctacaaaacacctcaaattgttgaattaaatataaaactgagcaagagatagcttggctggtaagaagataatattcagaggctaaaaataatgaaaatttctcacacaggggacaaatgagtgacagagtcagccccagccatgggcgtgtctggatctacctcacacttgcctgggaatgcagagtctgggagaccatcggactaagggccccagatcaagaccaactccttaggaagtgaactgggatagcctgctccattgaaagaacatccaaagctgttctggtttgttttctattgctgtgataaacaccatgactaagtctttcctgtttgggttgtgactcgtggtagaatgtaagttaaaaaaaaaaggaaaggcagccttcaggtgcacaaaccagtctctgttgtgtgatatctacctatcgtctatctacatatcatctatatctattctctgtcatctatctatctatctatctatctatctatctatctatcatctatatctattctgtcatctatccatttgtcacttatatctgcctacctaatcatggggtcattctcatctacctacttatcatctatatctatgtatctatcatttatcatctatctgttatctatctacccatcatctatatctgttatctgtaatctatctatcattatatatgtctactatctatcatctatctagcattatatctgtctactacctatcatctatcactatatctgtctactatcaatctctcaatcaatcacctatcatctatatctgtttatccatctatccgtcatctatctatcatctatatctgttatctgtcttctatctatcactatatatgtctactgtctattatctatctctctatcatctatgtctgtgtactatctatcatctatatctatttatcatctatctatctatctatcactatactatctactagctcatctacctccttacctattcatccacctacctattatctatcatctatctacctatgatcatctatcacttatctgtcatctacctatcagtccctatataaaccagacattaggccacagcacaggtagatcagaagtgcccaggccagtcccagaaaaaagcacaatttgtctatggaaaaatatattccaaacaaagataaaattccaaggaacatgaatttgcaaccaaagcttacaaaacttatggaaataagctacacggagagagagcaaacaggggctgcaacgtccacatacctatgtgatcaaagccatattaaccacaaacctaaaggaagcaaccagagtgtggtgaggagctggacatggcggccaaatgtgaagtcacagcgtccggggcggggcagaaggagtcgtgagagttcagggtcatctgggttatgtagcaaggctttgtcagtactagtaaagacagagacgataacaagattgaatgggatgcggctcacagatgaatatgtgcttaggtgtgcaaagatcctggattaatcccaacacagaaacacaaggaccacacacagctcttcagttaacagtgaacaggctggcagctcccaccccacgcgcacacacacacacacacacacacacacacacacacacacggctcttccctctcaaatttgtatgcttctctataaagccactaagttcactatatgctcctcctctgtgtatagggacaactgctagagcctgggcatcctatccagggtcaccagtctgaagaaaatgaactccctcctccagtggccagctgctgccaatagctcctcagctaggggtggagattgtaagcccctcctccatcagctaggnnnnnnnnnnnnnnnnnnnnnnnnnnnnnnnnnnnnnnnnnnnnnnnnnnnnnnnnnnnnnnnnnnnnnnnnnnnnnnnnnnnnnnnnnnnnnnnnnnnnnnnnnnnnnnnnnntggggaataggtattccatttagggctgagcaccgcacagtctcttgttctctgagctctgacttgtgagtctctattaaccaccatctattgcaaaaggaagcttttaagatgagaacggccttaatctatgggtgcaaagggagaggaacactgagttgtcttcttggacaaaaggtgcagtttctaaaaaggcatagcgccaagaagtcaatctgtctcccatgtgggaaggtttgaaaagaatgcttcccctgtgtttctcatctacatcctcaactggatgggtctcattggagtcaccaaggagacctaccgatagacatgtctgcgtccagggaggtttggctggggtgaatgtggccagtaccatcctataggctgggattcaagagtaataaactaaaagggggaaaggaaagccagctgagaggtgttatagcccatccctgctgtgtgtcccagctgtgtgcttctgaggacgcaagccatgcccaccctcctacctccctcccctgctgtgatgggctttgcactcagaaccgagagtgacagtcaatgcttctccctctgagagtcacagacgcaccatcacaccatcgctgtcgttagacagaaaagcttgttccgacaggcaggaaaccgagctcactgctggctgctgctgtccgataacacgaataactaatcaccatcctaccttacaatttctaaaatgctgccaacagttcatcggtgtgtttcaaaggcttgccagtttgttagcatcatcttcgcgctgacttacgacaggacaactggtcagacctggaaagtaactccatgtgttttatctcagagtctatggctttcctgccataatgtcacatgaccagaaccacaatacagattgggggtctctttcccaggggcagggcttcgtaatctcctgatgcttaacaaacgattgctgggccttaccccttagtgaacccaacccagctcactgcttgtgaatttatagttttatttattttacttttaggtagttccctggaactggagttaccaatggttatgggacactgtgggtttggaattgaacctgggtccccgacaagagcaccacacactcttagtggttgagccagtgtctctagacccaaatctgtttttttaatccctggattctgatgtatggccatgtttagaaacccctgaaatgaaaggccaatacaacagtttgtgtgtgtgtgtgttttttaaaccagtataactttgatgtttagtttaaagactgtaattggtgtgttttagaccaacagacctgaaactcttttaaagattcacttatttttattttaagtgtatcattgtttgcctgcatatgtgtatgggcacagcatgcatctagtgcctgggaaggccagaagaggacataggatcttctggggctgaagtcacagatggttgtgaaccaatatgtaggcgctgagagtcgaactcaggtcctctgcaagagtggcaaaggctttaacctctgagcatggtctccagctcccagttcctaaccttttaaagtctaccttacctcttaagaattcactaaaaatctatagctctttcactgaggannnnnnnnnnnnnnnnnnnncacacacacacacacacacacacacactttaacatataacttaaggtaccatattaataagcattaagatcagttttatacaacataaaatcacctgggggggggaatctcaactaattgtcttcatcagatttgtctgtgggcatggttgttagctggtgaatgagggctccgactgtgagtgacaccagttcctgagcaggtgacctatgccatatataaagctagccgtgcatggcgggggggggggggggtgaggagcaagccagcgtgaagagcatagttctttcatgatttctccctcagctctggcatggcttcctgccccatctctctcccgtgagactaacctgtgagctgggatacttcctttcctgccccgtctctctcccgtgagactaacctgtaatggcttcctgccccgtctctctcctgtgagactaacctgtgagctgggatacttcctttcctgccccaagttgctctggatcagagtgttgctttacagcccaggaagtaaactaagacaggtggatatagcacttatgctgtgtagttttgtatcaacatggcacaaactaaggtcatttgagaggagggagcattgcttgtgaaaatgcttccctccacaagatcttaattggtgattgatgagggagggcccagcccagtgtgggttgtgccattcctaactgtgatagtcctgggttctacaagaaagcaggctgagcaaaccatggggaacaagccagtaagcagcacccctccatggcccctgcaccagctcctgcctccagattcctgccctgttttgagttcctgtcctgactcccttccatgatgaacagtacaagctgaatcaaccccttcctctgaaacttgcttttggacatggtgtttcattgcagcaatactgaccacaagtaagacagcagtagtgcatccgagctatgcaaattacctgactgcagtggtttaagacagcaacattgatcatctaacaatgctggacaggtcatgggtctcgctggcctgcgttcctggaaggggtagaggagaagacatttctctgtccccagtttttgaagctgcctggcttctttacctcatggacccttccctccagctcccaagctagcggtgatctggcttcctttgtcacagcccttctgatgacagctggaagaggctcttcacctgtaaagatccccgtgtttagactgctggcgagtggataactctggaatgtgcaccccccccccaccccaccttgcctaccctaggctttgactgttgttgtaaggataagcctgattagaaagaaaaagataaaggcgtcgtgtgtgtttagtatgaatgagactttggaagtggagagggtgggaagggatggggagggggttgtgattttaccagagtaaagagttagttcaacaataacattaaacttggaatagtcaacttcatagagtcagggataaatgaaacttgccgggggctggactggnnnnnnnnnnnnnnnnnnnnnnnnnnnnnnnnnnnnnnnnnnnnnnnnnnnnnnnnnnnnnnnnnnnnnnnnnnnnnnnnnnnnnnnnnnnnnnnnnnnnnnnnnnnnnnnnnnnnnnnnnnnnnnnnnnnnnnnnnnnnnnnnnnnnnnnnnnnnnnnnnnnnnnnnnnnnnnnnnnnnnnnnnnnnnnnnnnnnnnnnnnnnnnnnnnnnnnnnnnnnnnnnnnnnnnnnnnnnnnnnnnnnnnnnnnnnnnnnnnnnnnnnnnnnnnnnnnnnnnnnnnnnnnnnnnnnnnnnnnnaagttggaaagcgctggccaggtcagggagtatggaagaacgctctgctctcttccacatgactaattcttacagcaactgactggcggtcttgagcggttgcctctgaagaagagcttccagatgggcagggccagaatatttacccatccttggctcgggtagctttgggtctttgtgtgtgagagagagactttcagtgtaagacaaaaggagagagacccagccagcttggacacagcagagcctaggacattgagaggatgcagttcaccgaggtccagaacctggacccgggggtgcgcctgagaccgcgtccagcagggggcgctgcggacccgtcccgcccgggccgcccgggccgcccaccccgcgggcgcgcctctccgcagtccagtgccgcccgggcccgggacccgctccttccgagagcgcagacctctcggcgggcatcgagaggacgcggggcgctggcggccgtaccctggccttgctccggctctcgctgtagcccatcgccgcgtcccgggcttagactcggagcgtacgnnnnnnnnnnnnnnnnnnnnnnnnnnnnnnnnnnnnnnnnnnnnnnnnnnnnnnnnnncgcggaccggcgccggagggctccgcgcgctgctgctggcgctggtggccgcgggggtcccggccggcgcctacaacctggacgcgcagcgcccggtacgcttccagggcccctcaggctccttcttcggctacgcggtgctggagcacttccacgacaacacgcgctggtaagtgtctcccgcggatcctcgaccctggcgtgggcaccccgtggtcccccaagttggccgccgcctttccggcctcttccactccacctcccgcggggccgatttaaatgtccgggcggccacgctgacatcctggcctgctctccgaggcccggggcgtccctggggtccctgtcctccctgggcagtcagacgcagcttcgctctcgccaaagcaaagttacttggctgtctgccttccaggggccaccgcgggctggccatctgccccagatccccggggggcccctaggaggccaggctgctcttggggaccacttcatgtaactctagggcagcagcatgcaggaagcagagaaacaaggggtgtggtgggagtgggtcctggtggcttaggaatctccagaagaggtacccaggggccccacaaagttctgagaggatctgggatgcagagaggacccccaaggagcagactgtgtggctggtgggcagcctggagctctcccacgtgtctagagacaagatttaggaagctgaagtttttaatcaaggggtacagttttgaaccagcgagatgggtgggcctgcagaaaagaataagtctctccctcattaagcatcaatagtgaagttaactgaccccacagcaggagcgcttagagaaggcggatagaccacttccttggaatgaacgagccacaccatgcaccacgcccacctattcaaggcagctagagttcagtagctccccagcctcattttagatgatgttactgtggacccaggagatggctggttcacgttgagggtgctatcccgtgagcgagcatctttagaagcagcaggccgggagatggagactggcagtgtgtgtgcttggacatgtaacttactgggagtctctgctcggaattggacaggggccgaggcaatcgggggcttgtggatgcgggtctttcagaaccctggagaaagagaactttgtgactggctttattaacactttcgtgtatttaggagagcggcctccaagagaaccagctttcaaagtccttgtgtgtagctctcctctgcatcccttcctgacattgattctagtcacagttaccagccaaggctgcttcctgcagttgccaaacccttccttttcagacagcagggcagaacactttcctatgttccaaaggctccaggtctgccatgggctctgggcttggtacagatagattatggctgaatagaaagagtttgtagagctgggtgtggtggcgcacgcctttaatcccaacacttgggaggcagaggcaggtggatttctgagttcgaagccagcctggtctacagagtgagttccaggacagccaggctacacagagaaaccctgtctcaaaaaaccaaaaaaaaaaaaaaaaaaaaaaaaaaaaaagagtttgtagaatacacccagaaccccacacagtgtgatcccggcacaaagcacatgggaggaactttcagaaattgaatggctgttctgggtggggggctactaatgaaagggcaggcagctgtgggagccagtgggaactgctggctatggctggcctctgtgccctgcaacaatctggttccagggacaggagccaggcttctgtcacctgggtttggatgaaccccaggtcacagcctctctgtctgttgttaactatataggagcagagacgaggtgctcagcttgctttgttatgcacgaggttgtgaacagattttgcagtgacaaagggtttgacctgatgctcaggcacccaggaccgcactgtaagggtggccattctgggacttgaccttgtcaggagagggtcaggcatttctgtggtgacaagcagctggcctcagaagtacctctcctgcccaccaaccactccctgcactggagtgctgctggtccctcagatttttagcagccctctgggggaaaaaaaaaaaaaatatatatatatgtatatgtatatgtatatatatatatatatatatgtatatatataaagcgtgtgtatgtgttttacatatattataataaaccatatacatatattacacgtaatatataatataactatatgaatatattatatatattatatatatatattctctttgaagcagattgtattctcactacagtgctgcagtctcttgttgaattctcttgctgcttaagaaaacctgtcctccataccctttcttccttcctttcccctacatttccctcttggctcctaaataaacctcttctgatgtgactcccagtgggggcttgtggagtttaaagcaggagaaactcccatttcttctcttctccttttccctggagtgtgaggtcaatggagccccgactgaagccccgggcttactcttatttctgtacgttgagaataatcttagaggtagccgctggcctagttttgtgaaatatgcatctaccctaaatctttgcctttacttacaactctggggttggttgattgacttaatgactgaatgaaagtctctcagtattaggtagtcccggagcccattgtcctctaaacttaccgggtcatttccagttgtttataattgtaacaacatatgtaagcattctcacagtgaaacactgtggacgttcttaattatttccttccaatcaattcctggaatcagaattccccagtcagctaggatgacagttttacagtattctgtattgtattacaaaggttcccgtgaaatgggaaacatgggggggattcaggacttggggtttggtagctgcttagccagaggctggtgtggtgcgggggaagagcagaaaaaattcgtggagaaacttggaaagtttagagtccaaaggtggggaatgaaaggggtttctataggagaaaggacactgaaacctgggcaggaaaggatgaccgatgttaagtaacattgcatcgtctgtccctcggccagatgagatggtctttagcttctcagttgtgatgtgacttgggaccttcgtttcatgttaactggctcctggttgtgttgtgcacagggcagagaatctgctggaaagaacagggagaacccagacaccaggtggcagagctgaggagtccgggtttgttaccggtttctgtcactggaacaaatacccctagtaaactgacaaagagaggaggttcgttttggctcacagtgtggattctgactggagtccgtggttgttggccctggtgcttcttagctctgtcaggattggggacacatcgtggtggaagttctcgaagggcaaaaatgagaaagagacaggggtcgggctgtcctttttaagagtaagacttcccacagacctaaccccataaaggtttaccaccacccagcagtgacaagctgggtctgagcctggtctacagggttttctataagacccacaggtgcatgtgtgtcacagagcacacaaagtgtctctgcagtgaagctgtcagctcttgggtctgtaactaagttcttcatggtctcaaattattccttcttgagggaagtcaatgcctgcatgagaacacgagtgaccttgcctctcagaacccccgtgttaagtctggctcctgaaaccgtatccccactcatgacacaaccaggcccagctttgttcaaagtactattgatcagactcttgtcaccataccctggacagcaagaattgtccccgtggataaaccgtaataacccggtggcatcggtaacagttttgatgcagacatgaaagtgactgagctgctgctgctgctgctgcttcttcttcttcttcttcttcttcttcttcttcttcttcttcttcttcttcttcttcttcttcttcttcttcttcttctcttcttcttccccttccctcccctcctcctcctcctcctccccttcctccctcctgacacccatagagtgtctgcacactcagaactctcctgtccccaccctctccaaccctgattcttctggcatcctttgaacaacagaagtagatgccagagaacatagacaaagccaatttctgtccccgtctctagcagtttctcagctgcagaaccaacaactgtaacactctgagttataaataaatggagcctggctgccccggcaccccccccccccccatgctctagagtccaaagtggttgggtgcgcttgcttcctctctggcgacgtgcttcctgcttctcctgggacagcaaaactgctgtgctcaggcacggagggagctcgcggaagcggcaggctggcagagcatcattgagcgaggaatcggagcagctccaacatgcggttcgcatttagagctgagaatccaaagtgccgatgtgctgcctgccaggtgatgttgacacctgccagagtattgtgatttacataaaaatggactgaaactagacaaaatcaagaattcagtctcccagtcacgtatgagtagtcacatggctatgtctgggagagcccgaatagggaaatgtttatcaggcccagaaggctctaatgactaaagtcttaaagacctaggaaagacttgaaggaaactcaaaagcaacaacaaaaaggttaatccttagcatatttaactattaaagcctcaggaagatgtgtttatcaaaaacttgtggagcatggatggggacaagctgtcttttcaactgtgaaattttgaagcgcctgtcgtgtaccgagagctaatggaaacatcatccgctgctttctggggttctcacctgcgcctcaggcaaaatatcagctgtatcataggctccaactgaggggaggcaggcgtggggtgtttattctgagggaagagggagattcctaagatgaaggatttagaaggggaccttgggatttggggctccgttctccaatcccacctggccttgtcaatctctgcgaggaacaccggaactggtggtgttaatcctgccggtctcataaactctccgaccaatgtaggctcattgcgcatgctcgaagagctcatctactcacctcggagcttgcaggggaaggcatgcaatcacttccccagaggctctcctgggcacttgtgctcaaactgagccccccttgctccactttctcaaccaggggtccctgttcaaagggaaccccaaaagtagcttcagaagtatttccccgaagatcccgaggaacaggcaagggtgctgtttccccggctagtgctgaatcaccttattacccaagggagaacctgccagggcggaagtctcctcagccgtcaggaacagctgtgagtgtgagagagcaaagggctgtccccagcccgctcctgttccctgtgatatgcggctgtccagaagcgagcgccttctgataatgtgtgtgacctgtctttggaaaaccgttctcgtgtttatttaaagcagacaaagtgttcttcggaaccgtttacctctaatggagttgagtgtaactttaaaaggcaaactgagttctatcagagtgttgctgggtaaggccaacaggtcagccgcatctataggcataattgaattttgttaaatgtgtgtgtgtgttgcgtgtgcacatgtgtcagcacatactagaggccagaggacaacctgagttgtccctcctcagacactgcccactttgctttacctgtcagggtctctcactggcctggagctggccaagcaggctagactggctgaccagcaagctctaggaatcccagagccatgattataagtataatgtcactacacctggctttttaatgtgggttttgggggccgaactcagggcctcagagttgtaaggcaaacacttggccaactgagtcggctccccaggccattagctgagtgttatgccctgctccttccagacagccctggagatgtaagaattgatgattggcttttgggagtgactcagcagagcctgcattatccttgccaccagttggctcttgagggtctctgttcctgatacgaggggcctcgggagaggggctttggaggcccagcaggcttcctgactttatatcactgaggtctatgaactgtaaatctttttaagcaagtggatttggctgaccaccaaggcagaataaatcgttttatcccacctttctctgtgccagaggaagtcttagagagcgagagcaaggactaagcctggaagtagagagtgtgagactgaaacaaagggctcactgtgttgtgggttgaaattagcaacaatcgctacaccaacagggaggagaaggacccctgggtggcctggaaggcatcagaggaggcaacagtcaccttcacgcaggtgtcaccagtctcaggagcactgtgtgctattcagacaggagggagcttcctcgttccatggagggagctgggagacccaggatggatgtggatgggcaaacaaggtaggaagcgagggcaacatcctggagtatcccatcttttcaagaacacttaactgaatgccagaaagacttgatgtgacagtagggaccttgaattagagacctatgggattgggggtcctagatattggagtgtcctccctattcatggtcttgcatggctgggagcaggtagttcctacagccacaggaattgtggctcctgccccgggctctgcacaagtatagaaagtaagctgtcactagtcagtttttaaaaatcacccctgtgaccaaatacctgacagaaaccacgtgagggaggagacatttcctttggtaatgtccacacctcctttgtccagtgcacatgggtagagtgttgtggtgatggaggggtgtggctcaggcacctttttaaaaaaagatatcatgtaggggatctacttccctggatagctgggtagctcaacaatggctttctgtattcaggagaggcggagaggttggtagctgcttagtctgtgaagtgccatgccttatcaggcccaggcccaagctggtgatctggaagattctcagagaggcggacacatgtcttcatttggctatgcaaggctgtaggagctggtttctgatatcagcagaggttagtgccagcagcagtgggtacagcaggacagaacctactgcaggacagacattcaccaacaggaatgaaagcggggcaggcaagcagctcaggggagcttactgcacctcacagtgacagggagcatactgggagacaaaaggggccgagcaaaatgtgtcttccaaagacacgtctggtctccaaccaggccctgcctcctgccttccccccagtggtgccatagagagtctgaaaggatggagccatccattaggtcagagctctcagtgtccagccatctctgtaaatgttatcagcgacaccccagacggagttttactaatttatacattggcatttaagctaacagttgagagtaacctctgtggatggcaagtatgctgctggccacataggcacagggacctgggttccacaaaaagcaggacatggtgccatgtcatttgtcatggctgccactgagaagccagagacaagcagatccctggggcctgagtgagttccaggccagtgagaacaaacatctcacacaaagatgcacagtgcctgagaaatgagtgaatctaagtgtgtcctctggcctttacacacctgtgtatatgtgcacacacacaggcactaacaatcacagctgtctggcctttacacacctgcgaatatgtgcgcacacacacaagcactaaccatcacagctgtctggcctttacacacctgtgtatacacacacacacacacacacacacacagaggcactaaccatcacagctgtctggcctttacacacctgtgtatatgtgcacacacacaagcactaaccatcactgctgcttggcctttacacacctgtgtatatgtgcacacacacaggcactaaccatcacagctgcttggcctttacacacctgtgtatatgtgcacacacacaagcactaaccatcacagctgtctgcctttacacacctgtgtatatgtacacacacacacacacagaggcactaaccatcacagctgtctggcctttacacacctgtgtatatgtgcacacacacaagcactaaccatcactgctgcttggcctttacacacctgtgtatatgtgcacacacacaggcactaaccatcacagctgcttggcctttacacacctgtgtatatgtgcacacacacaagcactaaccatcacagctgtctgcctttacacacctgtgtatatgtacacacacacacacacagaggcactaaccatcacagctgtctggcctttacacacctgtgtatatgtgcacacacacaagcactaaccattacagctgcttggcctttacacacctgcttacatgtacacacacacacacacacacacacacacacacacgcatgcacgcactaaacaccacactgcctgcagccccgaggggctgtagagatgttgaggattgtatagttttaccatgtgtagctgttagaatgtgaaagcctttctctgctttccttggagaaagaaaggatcggaaacaacaggaggatatgtctgcccccactttgatctccaggggtctaagcttgctgtatgggacctgacatgggaccacagcctgtgtcccaagccaggctcagtcacccatcctccattagccaattaaaactgccaaactagtagtgaaaagcagaaagatgtttgttcaatgtgaacagactggggagggtggcagacgatccaggaacgctccctctgcccaagtctgtcttcaggtcttgaagtgaggttactgtttaaatggagggccgagctatgcatgtcaaggaggtcctggctaaggtatgttcctgcctatcattcccccccccccccaggaagatgggtccccaggatgtcaccacaggatgtcaccactgaaatctctttctgagagacaagttcttcccctggctgagccataccttagcctttttttttttcatgtcaatttgacatatacttgtatctctttatgtccacgtgaaaacgatagccaggtaataataatgcctaacatgatacagttctcctctgtacaactgcaaatccataagtcgccatttaataccatttaatatacttacttgatcacaacatttagcttcattcatcttcctggtggggcttttttctttgaaccttacattttatatatttcctttcttgaaattcctaggggaattccagtttctggtgtgtgtgtgtgtgtgtgtgtgtgtgtgtgtgtgtgtgtgtgcactgtgttagttcaatagccaacttctgggatacaaatgtcactcagcatatcttcaaccctgccaggttcctttggaacttgacagtctcagccgtctgagaacacagtccttggctgtgactcctcctttatctgaccccctgagcacatctgttaagagcagtggcctctgaggtccctccatccttgcatgacccacctcactccatgccttcttcccgtcagctggactcagaactctatcagcttcactgactgatggctctgcttcccttcgtttaccccaagccatttttaccacctttgatggatgcttttgtgtgctggaggcctactactgtggctgaggcacagagacaccaagccacctgtccaagattacacagcaagtacatgtgtggcgttcctacttgaacccaagctgccctactgctttgtagatcaccatacctcctactctcccttcaccccaaccaagcccttatttaaggaggtatgctcccaagcaggaaagagatggtacaatacctctaacgggaacaattttgtgagtctttacaaaagaggctctaattcacccactttgtggtgtggggtcgccaaacactttgacatctgctgtttccctttgtggctcatcatattgctatgctagggagacaccatgaaatctctctattctagaggtaaagaaaagaaaggccagggaacccatcaaggtcacacggctggagaaaccagtcagtttctgggacagagcagtagttatttttcttgtggttgcaactgagcacctgacaagaagcaattaaggaaggaagtgtaaaataatatgaattacgtgtatctacgtctagcttcaaaggattgagactcaaactatgattcatttactagactctgcaattactgtgggatgacccctagtctaattctctaacgctagactggctacttccccaactgtgctctctggatacttgctgtttgagtcttcctgggttattattgctccagcagtctggggttctggggaggcatttcacacaggcacgtgctgctggtccatcatgactaacggagacctcctgctctctccatttccccctcctccatgctcccctccctccccctctcttcctctctcctttctccttcttctgtgtgtgacccttacctgtgacccccaaccccgaaactcaaaactccacctctctctcttctctccagtaattagttgtaggcatttttatttaaccaatggttttaaattggggagtaaggtttacaaaacatagactggtgtacatgtgaatttgttcatcgtggggcaaccagatcttggggtgcagaatttatcatatgagtacaagcaacaccagaccaaccccaagaaggaagcatttgattttgctcatatttcaaggatgtacagtccaccatggtgggaaaggcacggtagtcacactgtatccacagcctggaagtggttggtcacactgtatccacagcctggaagtggctggtcacactgtatccacagcctggaagtggctggtcacactgtatccacagcctggaagtggctgcctcacactgtatccacagcctggaagtggctggtcacactgtaaccacagcctggaagtggctggtcacactgtatccacagcctggaagtggctggtcacactgtatccacagcctggaagtggctggtcacactgtaaccacagcctggaagtggctggtcacactgtagcccagcctggaagcagggagatggatgctggtacacagttcacctttaacttcagtctttagtcttagggatggtcctgctcacatgtgggataggtcttccctcctcagttaattctttctggaaacatcttcatggtcatacccagaagtgtgtctccatggtgaacctaaacctagccaagttgacagtcaagactaaccggcaaatgaagggatttcccagcacctacatttctcccagccctcagtaatggatctgtggtcctggctggggatgagagtcctttggaggaaggaaaggacagcaggaagcaagagggacagaaatctttctcagcagccgaccacgatgaccagattagactcaggggcaaatgatgagggatagggttactgaagctcagagcccttaaaaaataaaccattgtttccaatgaccctgaaacccaatggctgtcagcagttaccatcctgaggctcaggattccatggctgtcaggttaggctgggatcagcaagtattctgttctgagcctggctccctcatgtctctcatgttggctggttggccagttggtgcaggatagacttcagctgggtggcccttctctgctctccatgactctcatcatccagcaggctaacctgagctggacacaaggtggctgggcagggtgccaggagagtcagtagaaacacacccaggcccaggagtcagcccttcatctcccctcacatcttagtggctaatgcaagtgtcaggaagaaggaagcagacatcacctttcagtgggaggagctgtagggttctgtggaacaggacaagggtacaggaagggtggagggcagtggctgcttccctaatgtgaatggtggtgaaatcactcgaatcgtccctggatttctgggatgtcagcggaaagtctgaagtgatgctgcccagtgagcagaaaatggagctgaggtctaagggcctgcaaattcttaggggtgcagccaaggacagcttagaactagcacaagggaggtgtctaagtgcttgccctggtactgcctggtatctaagcccttcactgagtccctgctctgtcccaggcaccacactctataacattctcttgaccaaacctcacaagagtcccattgcgtctattttcatcccccctttccatagcagaggaaaactgaggctcagagtgatcaagaaacacattggaggccacaaagcttgtcagtggtagggggagaatttggtcagtgcatcttaaacattatcgagagtaactgggccacaaagcgtagaatacagggagaaggctagggatacagttgatatggtaggatgcccctgtcatttcagcactgcctataccaggtatggtgctcctctactgtaatctcaccattcaggaggtagaggcatgcagatcaggagttcaaggtcatccttggctagataggaagctcaagaaccaggctaatgtacaaaagactctatctccaaaaatggagagagcggggaagatgattcaatccatgaaatgcttgctgtgcaatcatgagaacctgagtttgattcctaacacttaaaagaagtaacatagtatggcataggcctgcaatcccagggctgagaagccacacataagggatactgggactcactggccagccagtctaataaatcagtgatctccagattcagcgagagaccttgtctcaaaaacaagattgaggaagacaccggcattgacctctgatgtatacatgcatactcacagtgtgtgtgctgcctacacatagacacacacaaatgatcacacatgtatgtacacttacctccatacacagacacactatcatgtacacacatatgtgcatgcttctctgaacacacagatgaacaccaaaatgaacacatacatatgcatgcttacctgtacacacagacaccccccacatgtgcatgcttacctgcacacacagacacacacatgtgcatgcttacctgcacacacagacaccccacacacacatgtgcatgcttacctgtacacagagacacactcccacacatgtgcatgcttacctgcacacacagacaccccatactcacatgtgcatgcttacctgcacacacagacacactcccacacatgtgcatgcttacctgcacacatagacaccccatactcacatgtgcatacttacctgtacacacagacacacacacatgtgcatgcttacctgcacacacagacatatctccacacatgtggatgcttacctgcacacacagacacacacacatgtgcatgcttacctgcacacacagacaccccatactcacatgtgcatgcttacctgcacacacagacacactcccacacatgtgcatgcttacctgcacacatagacaccccatactcacatgtgcatacttacctgtacacacagacacacacacatgtgcatgcttacctgcacacacagacatatctccacacatgtggatgcttacctgcacacacagacacacacacatgtgcatgcttacctgcacacacagacaccccacacacacatgtgcatgcttacctgcacacacagacacactcccacatatgtacatgcttatctgcacacacagatacacaccatgtacacacaaccacaaacagcccgggtggagctgttagtttgaagtgcccagcaagcccactgctaaaccacctgcaaccttggtttcctgagacttaaagaggaacttcctgaggcatttctggtccacggctcctggtggtgagcacttgccttctccctctgagacgaagcctgcagtatggttgcaagggtccagcacggttctccactctgcttagctgtcttgtgtccagtgagaggcaggcagtggttcctgggggttctctgcagtacatacacactgactaagctgcgttcctgtaactggaacatagatccctgggggagcattggtttggaatcagatgcatgaaaacaaacttaacggggttggaagtttgtaatccccactcattgttctcgaactggctgtaattttgccctgtggtatggccgctgtggcgtctgtggggagggagggagcctcaaggcactgctgctcccaggcattctctaggaaggcagctctgcctcagcctagcccctgatacctgctctccaaggaactgacctgtgagaggagagtcaaccttggtctgcacaggcacgcacgctccggtccacatacacaaacctcagcctattttaagtaagtttacgcttttgtattgggtctcattcatagctaggctgggaagcacgtctctggctattaggaaacagctgcagggataggagaaagagtgcttccggacgtgggttctgggctcggaagcctctactactgggtacagcaccttaacccagcctccccgagtggaatacgcacaagaagctgcctgggtggatttgccttagtctggagccaggctcccatgatccttgatgttgccagtggctaagcagacaggcatgtgtttccaaagaggttttggaaaccagggaggcagacctttggttagcaccatgctgccaatgtcagtgtctatgaaacccaaggccaggactggagttcacctcctccgttctgtgagcccgagggaggagaaaaagtcactctccatgcaccagaccccagtctttaagctacagactcaaggccaagttccaacctcggagcccacggagcatccctgggcttccctggcatggtcatacactagcatagcagaagggtactgaataccagctggcttccttttcctccctcctactgagcagaagcagggttggtacccgatgctatggggcacgtgctgcatccaggcagttagggtctagggcaagtttcaggagcagccttgactgcctgcatcttcatctgtgaaatggggataatgttagcagttcctataggtgctctcacaggaccacagttgaaggaacaagcaggggtgggaacaccttgatgtttatttgatgggagctggggacatataggtcctttgatagggtacatggtcttctctggggtaccacaaggatgtttcaactacttggaatatggcttttgtaacccagaggacaaagaatgaaaacgaaggtggcatcttttcagtagcgcaccctgaactctgagctgtcgcggtctccgtctctcagggtccagttggccagcagccagctgaatggacttcagaggagccgcactccaaggctggcctgctgctggagttgtcttgctggactgtggcctaggtaaagcgccagcaccgggctgccaaggaagccacaatgttctgtaaacacggaggcaagcacactctccagtatgccattctgtgtgtgtcaggcacgtgcacagacacgcgtgtctctttagctcacatcacaggatctgagaaaacctttcctgtggggatgctggttagagggatgaacaggggatgctagcagggtttgaatcacagctgttgttagaactatttagaactttgggcttggaagagcattggagtctaccgggtcccttctctgctttagattctgacagacattttacccccaagtcttggttctgcgttggaagaagcagatctgagaattctgctgtccaggctcctcccagcctggcacgctaggactgtgtctgagctggaaggagtggaaccacggacggttccagggttgtggtgttaatgctggggacatggtggacccacagcctgcttcttcctgtagctgcttcccgactcctgtgggccatgggcttctctctcttctttacttattgtgactttaaagttattctttctgggagaattcttctctacaacctgtttggtcatatccacccctcacttctcctggatcccttctccccatttccctcctccttcccatctccccctcctttcccattcccctctccctcaacttcattttcttttcttaaaaaaaaaaccttttaattaaatttacttatatttattttgagacaggttctttacatagctgatggtcctggaagtaaaccagactggcttcaaacttacagagatccccctgcctctgtttcctctgtgctgagattaaatgtgtgtgccacagtgtctaactcctttttgtcttaaaaaaaaaaaattacccgctgagtcgggtgcttcccatatgttcagcgagggtgtaggtctatccactggatcatgggcaaccaaccaagggtcagctctttgaaggaaaatgattctctgcctccactcctcggtagccatccttggccaaccgctcctcatggagaagtgtggccttgtgagcccctcccccaccgaggcaggcaggctgactggcttgttcctgtgcactgtgcaggcagtgacaggtgctctgagttcatgggcgtaaggtttccctcgttttcagaatattctttttcccagcagccccctgaccgcctcttacactctttccagcctgcttccttgatgtcccctgggccttggggagtgggggtgtgataaagacatccatttctgactgagcacctcagtcactccctctctgcactctgaccagacgtgcgtctctgtatctgtcaccaccgcagacacttctttggtgagacctaacttatctatgggtggaaggataggtgtgcagaaggcagctggacacaacggtagcttctctattttatctttggcgtgtggggctggagatgctaccctgggcctcgggcaggagctctgccactgagtgacaccccagcccctagtgtaaaatgacttacaaatggttgtttactggggctgatgggagacttgagtctgtgggaggcttgggacgcagcacaaggattttacatttatactcctcgccctcagggctggacatggcaggctgtagatgctttagccgttttaagttgtcaatctgataattcttttcacctgtgaaaacaacgggttctctgagggaggctctttgactcgctccagtggctcaaactcagccccagaggaaagggggtggggaattatcccttagtgtggctttcctctcgggtttgattcccagtgccattatggatttgagttagagcatccacaggctggccaaacctccttgtgtggctgagccaggtggtgaatgtggcctgcttgggaaaggacttctgtagttcccatggacatagcctgctcggggacgcttcatttgaggcatatcatggaggggctgaaggagtgtgaactgccctagcagaggtcctgcagggacacatggtaaggctgctggatggtgggggtggagatgtgggtggggagctggctcattgtaagctcttctcatacgccagcaagaagcaactctctataggagctaacatatactttccagggttaatgtgggaagagagatttctttgcaaggatggtgtgtgtgtgtgtgtgtgtgtgtgtgtgtgtgtgtgtgtgtgtctggggtcctcagggctcccccaggttctggggtaggaattaagacagaacctacccatggggcctgacaccaggtctctggtgtttaattagtgacagtgtccatgagcctttgttgaagtctgctgaggatttcagacatcagttgtaacatccgtcagccctctttgccaatctctctgcctcactaaagcattggcagggaaggtgccagacaccatgacacccgagtagcggggagctgactggatgaatgagaccccaagaagaaggtggcccctggaacagagcaaggggatctggggccagctttctctaccccagggaggctcctaactctactccgcagagaagcctaacagtggtgtcttatatcccaaggcctgctgtatttaatatcctggggtggtcagatttgtcctgcttcctgggtgctagaaacaaaggccagcccaagtccccactgcgcaggcactaggaatccacagctcttggagcggcagggtggaatttgtcctaagtgtcctgccctcgagcagtgccttttcctagtggctcactgctcagcacacattgtgcccagttgttatttagtcttctgcactgtagatcttttgtgatggacccccgcagtggggaggtggagacaggctcccttgggtctcattggatttgtgagggccaggccaggaagagaccctgttttgaaacaaaagatggatagaacccaaagaatgacaaccagaggtgacctctgctcacatatacacatgaatgcacacacatgggggcacatgcgtgtatacatacacatgtacacttacaactcacgaatgaatgcacacacttaaagtttagggcagatttatttctgtaactcaaagtgaacttaatgttgcttccctctttgtgtttggcacccaccaggcccagactgatccgactcctccctagcctatcctccctcccctcccccccttacttatccctctggtaaccggtaactagtaaaagtgagagcctgttcagttacctaccgatggccttagtcagggtgatgacaggctatgaccacaggcaacctattgagggaagggtttgtttggcttgtatttcacatcattgtccattattgatgcaagtcggcaggaattcagaaagggcaggaatctggaggcaggagctgatgcagaggccatggaggggtgctgcttactagctcacttctcatcctttgttctgattgctttcttataaaacccaggaccaccagctcaggggcggccctgcccacagtgggctggacctacccccatcaatcactaattaataaattagcctgtaggcttgcctacaccccactcttacagaagcattttcttaattggggctccttccccctctgatgactctggctgtgtcaagtttacaaaggtttgcgtttcttttagttggttgttttacttaagctgtgtgtgtgtgtgtgtctgtgtgtgtgtgtgtgtgtgtgtgtgtgtgtttcctgatgcctattcagattgctcactcttgcctagacaaagatgtaaccccctgccttttcttctccagcactggtttgtgaccacacgctctttctttttgatgtgcagggtcctcgtgggtgcaccgaaggcagattctaaatatagcacttcagtaaagtctcctggagctgtgtttaagtgtcgtgtccataccaaccctgaccggagatgcaccgagctggacatggctcgaggtgggtggacatgcttgtcagggtagaaatgggagcaacaccttcatgctttgttctttttctacttaggacagcctcatcacttgccggcctaccctctctccctcttttcctccctccatcttacagatgtgtattgagatgctataagctattaggcactgaacaaagcaaagaaggagcctgtcaccccgggcctggaaaaccagtagtcagaatagacattaaaataaacaatagactaagagaaatccagagggaaggtgtgcgccggggaagctctatattggaggttggaaacggcttccttggggatcttgctgtgtatggaaggtagctagctgggaagtccaggaagtgcagtctccagcaaggacagtgttgtcacaggagaggtgagcaggggagggagaaagttggaaaggacaactgccaggtaggagggactacaccacacagggcctcactggacaggttaaatgacagatttcactctctgtgtgctgccagaggccattcagatcagcttttatgtcttgcatggtgaagggcatgattggatggactgtggtactcacttttttctagtagataatgtagatctactggatcagtctccatggatcggctctggtccagctgtagacactggggattgcttgcactggattgctctgagaagactgagataggagaggcaagcacagaaagacacgggcagaagagccaggtgacttgctagatgcttccaggccttgctcccctaaagccctttatcacccaggcctctgccaccacttctggcatgtctggggagacaactcagggggtgttggttatgaaagagcaaggatctgagcccattccttagaatccacagaaagagctgcgtgagcctgcatgagcttgtagtcccagggttgagaaggtggagatgagacgactcctgtgggatctctggtcagactatgtagctaatcctgtgagctccaagttcagcaagagactctgtctcaaagcataaagcagagagcaacagaggaagacccctgacgtcagcctctgcacttgtcatgcatggagatatatatgaatgcacacccttccaacatgtggcacacacacacatgtttgcatacctccaatatgtgtacacacatgcaaacatgtaaacatacccacacatggatgcacccttcaacatgtgcatatgcacacatgcaaacttgtaaacacacacacacacacatatacacacccttcaaagccaaaaagagtctcgattttatttatcagaagagacttgggtgtgtgggatcttctctgtgaggtgtttgttacagtggcttcccagaacaacatcaatgggaacaccttttccttcacgagaatgttgttgtggaaaaagaaggagctgaattaaacagcaacattttgttacaagtttccatggagttgacattgtgttataggtacaaaactttgagtgcccaggaccaccctttgaaaagcagccagctgcaccattcctcaatccaaagctgacctcttttctccctccagggaggactcgtggtgcgccctgtgggaagacctgcaggggagaccgggatgacgagtggatgggggtgagcctggcccggcagcccagagcagatggccgtgttttggtaagacctctggggagagggtgacttgggacagagcaccctaagcatgaaggactgaccccataggaaaggtggctagcacagaagccagaacacagcgttaaggctatctgttgtgcattgctgctctgagatctgtcccacctgcactttcaggccacatgtatctgcatgaagcagggacagctaagaggttcaacacaaaactgtaaagtcacttaaaacattgtgagataacttttgtgggatttaaaaatacctcaattgtgtggttctgagtgtgacccttgtaggtgacagtattgggttgccatgtcaaagtctgacatgcctagaacctgttctttgtattacctttagacatattgggctgaggatgtaactcagtggtagggagctttcttttgtttgttttcgagacagggcttctctgtgtagccctggctgtcctggaactcactctgtagaccaggctaacctcaaannnnnnnnnnnnnnnnnnnnnnnnnnnnnnnnnnnnnnnnnnnnnnnnnnnnnnnnnnnnnnnnnnnnnnnnnnnnnnnnnnnnnnnnnnnnnnnnnnnnnnnnnnnnnnnnnnnnnnnnnnnnnnnnnnnnnnnnnnctgcccagccctggtagcatgccttcttaacatgcatgagaccataattaatcccaggaagcagagagagagagagagagagagagagagagagagagagagagagagagagagaggagagagacatgagacagagacagagagagacagagaaagaccgagactgaatgagacagagagacagagtaaggcagagagacagaaacagagagtgagacagacaaacacaaagacaagagagagagagagagagagagagagagagacagacagacagacagacagaatatgagaatataggtagaaagaagtttgtaagcctggcgtggtggcgcacacctttaatcccagcactcgggaggcacaggcaggcggatttcagagttcgaggccagcctggtttttcatctactcaaccccccacatcccagaggcaactgctgtcttgcaaacattgctgttggtttttctagaactttacatgaatgtaattcaagtgttcaattcctgggccaggcacagtgaaaggagagaagtgactcccatgagtcaccctctgaagtgtgcacacacacacagacacacacatacacatgcagacatatacatacacatataacatatacacacatatatatacatgcacacatatatacatgcacacacatacacacatacatatacacacacacatatatatacatgcatacacacatatacacatacacacatgcatatacacaaacacatatacatgcatacacatgcacacatacacatacatgtatgcacacaaacatacacatgcacacacattcatgtgcacacactgacacacacacactaagtacatgttaaacagacaaacaagcctctaactgtgacagagacttgattattaaccattttctcttttttcacatgtccttttctgttgcgtactcaggcatgcatacctcacagtctgctgatgttttcacacacatacatccaggcatcccatggtcagcaccctgcagactccttctgccctttcccaggcagctggtgccctgtagggtggtcctcttcagacttcctatgaagtctgccgtcggctttcctcgaaggctgtaggatgatttgtgtttgaaaagttcaaggtcaagaagggaaagtgagtccagctgctgtatctcaggggtttcctttgggccacaagctgtcaaagctgggggctttatggatgtttgttcccaggggaaatgggctttcctcaaggatacaggccagacgtttctagtccctctgaggaactctgttctgtgttgatctcctcaacccgacctcagcacacttaagagacccccacattgttgggtccttgggagagagagcggctggatgctgtcaccagaattataaggcctccctgctggacaccactgtaggtctcattgccccctcccccatttctgctggccttggattctagtcctttaatccctgtttcagcaggccatggatgatggccaagccaccacattcttctaggcatggtggcctgaccccacagggtgactcagccccaaagagccatatctcttgtctcccattcttgggaaaaagatgggagaaaccaagcatgtatattccccagaggggacgcaaagctgtggttcagaaccaatatggaaggggagaaggaggaggaagaggaggaggaggaggaagctggggacagcaaggcatgagatgcccctccaggcactgaatctagagatagcctgttctgccaagatatactaacttagggatgtgagactttagtgtggttgagagtttgcttgcaaaagtgcaagaccaagaccaagctgtgccagttggtacgagactctattcagtttaggggcttaaagcaacagtgaggagcatgggagacatttgccccaaagccaaggaggcagggttcaaaatttgtgggatgtggcgctgcagataatcctagctaagtaattgggctagatttctgttttacacaatgcttgaaccattcatttgatcagtcactccctaagggtgctggggaaggaggggtaggcacgagggggtatctgaggtctctattcctgttgtcgtcacgcatataacatgtgaagcagcaccccagccttgaagagtattacgtgctctgaggaaacgtgtgctttctttgggcacgcatgtttctgataaatgaaaagctcacttctctgctaaaatcaggagacaacatcagaagtgcgtgagaaaacattgttgtacaacagcatctctagaactctccatctcacagatgccaaatcttgtatctctcaaacacaactcccttcctcctgccccctgcttcctggtaatcatcattctaattttgaagtactcaacatgtcagatcccctgcagataggagcgggctggattcgtcatcttgggttggcttctgccatttaacgtagtgtcttcactgctcagctctgtcgtaacatatatgacagcattcttttcttttcttttcttttcttttcttttcttttcttttcttttcttttcttttcttttcttctcttctcttctcttctcttctcttctcttctcttctcttctcttctcttttcttttcttttctttcttttctcaagaccaagtgatactttatcacacgtgcacagtgctttctctgtttgttcatggatgcatgtttaggtggcttctagctccttgccattatgaataaagttgctacaaacactagcaaagatttattagacatgctgggtgtggtggtgcacgcctttaatcccagcactcgggaggcagaggcaggcagatttctgagttcgaggccagcctggtctacaaagtgagttccaggacagccagggctacacagagaaagccctgtcttgaaaaaccagaaaaaaaatttattagacaccccactttcccttccttttgggtacgtatgtggaagtgcgactatcagatcatgtggtaattttgctttccattgttgggaataccttggcactctgttcctctaaagttcacaaaccattttgtgtttggccagcatgcagaaagttccagagacaactaattgttcaactgcttgctattggcatcttgtgtactgaagatagaatccacagcctcaggcatgctaagcacttgttctgttactgagccacacccccagcacattctatttccctttaaatagtagccaccctaaagagtgtgaggtgatatttcatgatggtttgtgtgtgtgcatctatgttagtgttatttaaatccatttcttttttttttaatgtctcatttttgtctgtgaaatatttctgggaatcaaaaaaattttttttaaattgaaggtagagaaggcattttgatccctcaggaaaactttgtggcacaggataaaacctgtctccctagggatacagccttgatttcaaggatagggtggtggaggggacagctgtgacttcgagagagtaaatcatctcaatgacaaatggtctcagcgggatcaatgctgccaagacccagaatgtcaagctggccaaccaggctaaccttggcccagtggctgcctatcttgggtctgtggataaggtggttccttctagtttccaccagggacaaatgatccctactaccaatgctaccatggtactgaaagcaagttcccttcccacactgttcccgcacccctggagtgcagagatggtgttgtcaggaatagggaagaaggcttagtcagccatgctgcataagcataaaaactggagtccagatctccagtaccatgcaaaagctgggcacagccactcatgactgcgctcgtagccctggccagccagccagactgatgagagccagcttcagtgggagattctatttcaaaaaatatataaagatagaaagtaagggcggaaggtactttatattattaacctctgggcgcacgcacgcacgcacacacacacacacacacacacacacacacacacacacacacacacacacctcgaacattcagaaccacaatctttcctcatcagagctgccaagcctcagataaggaattatctaaacggctcaatatttttttctgggtggaagcagcgctttccggctctaactccgctgtttcctttctgaatgtcagggctctctctggccctctcatctgcttacttcccttgtgtcttcttcaaagccacccagtatgttcctgtggctattcctgtcgctgcttcctggtttgctgcgtgcgtacgtgtgaatgagtgctctgccaaaatataacatgtgaagaaaagtgcacaggtcacgagaacatactctgatgagtttgctgtaggtaaacatctgccaaacaacattcccagcgctaaccaccccagagcctcttcccctgtgccccccccagttacccccacccccaccccggcccagggaggcacagtgtctttgggagaattccgtgacagctcagccttgctttaatcctgtgcccactgcgtctcgatggccggggtgtgaccgagctgtgcattgcagacctggaagcatggcaaagcttgttcatctgtggacaacaagtgcaggtgtgtgagggtgggagggacagacaggcatttgtcaccaagccaccctccaggaagaacatgctgtattcacacaacaaagaaggcctttgaagggaattggagaattttcttcctcttcttattgcttgggaggataatcagtccttctaacttgagatgtgtgagggccaagatttggggtgatggtagggtccttagtcttttcctagggtgctttagaagatgaatttaaacagggtattgcctcctgaatctcctcctcgtctccacctccctccttcccctcacctttccccctccatctctgttctccctctccccttccttatcctcttccttcctttcctcctcctcttcctctgtctcttccttctccatgttgttttctctttcccccttctctccttcctcattttcttccctcatcttacatcttgttcactccccttagagcacacagtacctctgggttacccccatagcccaagaacataggctctggccacttccagagcaatctcttcttccttatccttcaccactccctgcccttccttacaactcactccccaaatcgaccgagtcacgatgctttgcagttcctcggaatcttgctctttttgtacaggatgcaggtcagacgggctcacgtgcgtgaggatgatctggctaagcacagtgttttcttcttataatttatattcagagttcctttctattttctggagtggggtctgtctttgacctttgatctctgtcctcccagaatattgtaaattagatgagtgtaaaatgtagtatttgggtctcctagggattcttcaaggtcacccttaaacagtttatgggatggaaagcagacaatataataaacatcggtgatgctgtccatgtgtgcagctggcttccagacacaccacgataaacttcggcctctctaactcagcatgctataggtaacgagagctctcaagctgtgggccaagcccttcaactagaataaagcctatttgctcagaaactgggtgatctaagagactcagatttacaaactgtaagaactaagtcagaatccaaaaatgaaaaaatctgctagtcagccctttctattcacgggttctgtgtctgtggattccatgggctatgggtttgatagctccagattcgaccaattgtgatcaaaactgatttttaaatctgcatatgctctacgaatgggcagacctttcccttgtattcattctccaaatggcgtgatgtaacaatttctgtgttgactgcactgttataagtatagagatgattttaagcatgtagggactggggagatggctcagtgagcaagagcacctcattctgcaagtgtcgggatctaagttctaatccccagcgcccatgtaaaaaccatgtatagtcacacatgccagtagcccgagcatggcgctggggagcagagaagctgactctaggttccgtgagagactctgccacaaggcagtaagataccacacacacataccacacaggagggatatctctatgtagaagtatgggacaactattgaccttgtgatctttcctgtttctcactaagtgctgtctccatctgctgagaaatgtctctttttttccctcacaatgcaagaatcaagtggggagggaagataatatagtgaagtaggagagacagctgatctgtcattggctatctcaaacatggcacagagtgtggccaagctcaggtctccagtgccctactgaggtcccctttgggcagagtggcttatcagggccccccagtggcagcgtcactggagggaaaaagagcagagagcttagatgacaatgatcttatcattcaacaagtgaggaagagcccatacagaggccttgggtgtcccattccagctaggtgccagggcctcatgggacgggttataagaatagccactgtccctgcttctcaatcaggaatccagaatctgatgatagaaaggccttatagaaagatgaagcacaggagcagctagatccagtcctggtctcagcattgactgtgttacccagccactccctgctacttagcaatcccatgaagaacatagaagtcctgggcccatgagatgactcaatgggtaaaagtgtttgttgtacaaacccggtgacctgagttcaattcctgggaccacataaaggagagaaccggctacacaaagttgacctccaacctctacatgggtgctgtggccgagcactgccttgccatcattctcttaataataacatagttgtaaagatttaggaaactgactcagtcactgttctattgctgtgaagagacaccatgaccgaggcaactcttaaaaaagaaagcatttaatcagggcttgcttgaagtttttggaggtttagtcccttatcatcatgacaggggacatgatggtgtgcatggtactggatcagtagctgaaagctgtatcctgatccacaggcagagagaaacactctcacttggcctgggcttttgaaacctcaaagccttcccccagtgatatacttcctcccacaaggccacagctctgatccttctaatctgttcaaatagtgccatcccctaatgattaagcattcaaatatatgagtctatttgggccattcttatccaaaccaccacaaaaaaatagaaagtgagaggcctagctgaggcctggctgcctctctgacatcttcttacttcagagtctctccactcattgtctttctttccctgtgacttccaaacctaatgctctgctcacgtcctttgcaccaaatgcttctctttccggaagcgtctcccttcttttgctcagtgtggagggtgttgtccactctctaggctttccctgccctctgcctagaagccacgtctcactccaagactcagtagcccactgtcttctgtcgttctgtctctgtgctcaggtccagctattgatcactctctcctccagtgactctcaggagctggttcttctccatttcatttttctgatgccttgatgtgaacttcaatctccctccctccctctctgtccctttaggcctgtgcccatcgttggaagaacatctactacgaagcagaccacatcctgccccatggattctgctacctcatcccttccaacctccaggccaaaggcaaggtgctgattccctgctacgaaggtaagtgtggattggttctctctcagcgcggtgacctccttgctgggtgacttcagcaatccccagccctctccctcacaccactgcctcagcttctctcaggctttccacacactggtgtgagagcagggttatctgtccccagatcgactctggcatcaatgtcatgtccatggaagaggcaactgcaagggggacagtggtctaggccctgcccagccctgctcctgccacagagactactgtgttcattaccagttccagggataagatttagtcaaacaattcagctgttctcttagctttctggaattaccacatgctatagggccttgggaaacttattatccttttctgaacctgagagtccttatcagaaaggcaaggaacgggttcaggtgatcaatacagcactgccataaagccaggatcgtcattggacttctagaaaagtcctggatgttctaggctgtgggaagagaagatccagtctctataaagccataacatggcagaagttgaccaaccagccccctcattcagttcttatggcatacacttctgaccatcctcgggtgtctgtcagaactagtcagagagcattccttgggtctagacaacacttggtatcagtctactgtcactgtgtaacaatacatctctaagtcaaacaataataaacatgattttttttttaaatttatacaactccacacaggcttagtgcgctctgattgtggatttgagtcgggtccattctacatgttgtcttctgagaccatgagctctgtggggtgtgtttgtgagcacagggtcactcggggtcttctgcgatgccctgcttagagctgcacattcttgggcaaaactgagccaacctagttctggtgagctgctgagccaggtccctctctaagtgcaaaaggctgtttgatttttcattgcttcccacttacacctttggaaagaggtctaagtggcctgggtccgcactgccttgtgcttccctgggcttccttaggttttgttctcgtggtcatcaagaggggttctgacactaaggatattgtaaatcatttttgtctcatggggggcagggggaccccatggcactatgtggaactcagaagcccccagcaggacattctgtgaacggttctctacagaaaggtcagcagggacttaagtggaggcacagcccctcttcttgtgtgagggtgggctgttttcataccttcattctttctctgcttgaggctgggccagatggggagactgaaatctggccctgttcatctctatattgtcctagtgggacaaaaactcttcatcctaaacacccatgatatagccacaggtgtagctcagttggtagaatgactgcccagcatatgtgaagttctgggatttttatcttcctggccagcttgggaacatgaatgagcccctgtcacaaatgaatgaatgaatgaatgaatgagtgaatgagtgttatcagtcaagtagcagagaacatacatgagtaccagccaggacatttggttttcacccacccgtctcagcactttccacatcctatacagctcactcactggtccccaaacacaaacacatgggacaggccagcccacccaggtcagctgagccctagctcttgcgtagctgtatgatcgagaaatcagcatcgttatcatttgccatgagggattaaaattgttacgcagaggtagctgacagatgcagggctccgcttgggagctcagagtcctcctgcagcagtggcctaggtttctttgctttgtatatttctttactccatgatggtcaaatggagccagagaagatttaaccagagaacatattagcaagatgtttgctcccacctgacttttcttccttaaggacacgcatacatattcaaatttgtacgttgggaaaaacaacaacaacaacaaacccaaaacaaaaacccaaccacagtaaggagaggggccagtatagggagtactgggaccaagagcagctgctgaggaaatctgaggaccggacaatggttctgtgtacttggatctgtaaaatgggaggggtggtgatgctcagatttctcaggaagactggggtagtggggtgagggggtgggggtagggattagatgagaggcaggcccgcagtgagaaggccctgtcctgtcctgttggttttggagatctctacttccttgttttgtggttgaaacgaaaccagctttggctcctaaaacaaccattattttctcttaatgtggaaaacctcggtgatgcaagctccctgttgcaggtgggggtcacattatggttaaggacaatgggagcatttagagtctgataggacctttcagatgtcatctagaccggcttgcagggtatcaaggtccagagagataagcatggcttgcaagtctgagttttcactatgtggagggtgagttgcacagtggttagaacaaaacccaggactccaaatgccagaacctgagtcctgcctctctacagctccctctcattaacaccaagtgccaatgaggatgtaaattctgtgcccagcttaagtgatcaatacttttgggttcttacagcagtgtctggtgtgtattccctatgctgaacatattgcatacattaatatgcttgttataggctaatgagccaggtactaagcgaagtttatgagtcattacaaggtgactgacttgtgtttaaggagtagagatcatttagttgtgttaagtggctcacgagcatcacaaaagccaacacacacagtcccagaagagagagcagtggggcattgtagatagaatgaagaagagaggggagtatgtgaggagagaaggggaaccagtgggaatggggagggacacaggagggccatagtgaaggaagggataccagaaaagtgtgtactaatatatacacgagagatggggagatggctcagtggttaaaggaccagagtctagatccccatatacatggcacgcgaatgtggcacacccctggaaggcagagacagaggggcccccacggaagactggctagtgagaccaagctattttggtgagctctgggtttgattgagaaggcctaaatcaggggaaagggcagaagaggacttgaggatgatttctgatactaatcttgggcctttatctgcatgtacacacacacacacacacacagacacacgaatacatcaatacacatatgcacatgcacaccatacatatgaaaaatatacatgcttgaaaacatcataattaaacttattttttataataattagaacatggattaaaaatacaactcttccagttgcatcccagtcaaggagacacggaggcaggcttatttcattgtatgattgaggaattggaaacctgtttaaagcttacagtctgctgaagtcagggaagtgagggacagaggcactgcactgtgagtcatggcagcaggcagggcaaggtttggagagactcctccttccaggtttacttcctgtgcagtgggggcagatgcatgagggccaagacaggtttgctgggggctgctgtgccacaccacatctcttggtgcagttagaggtcttgccagtgcaatggatgctggcatgcctccactcctctttgggctgttctagggagatcatgagaaattccagaggactgtgctcagagagcctgcctgttgctctgtagtgatgcctccttgttgggcttcgggagggtcagctgtacagactcccaaagattggaaggtcggtttggtagactaaactttctgggccacctttctaaaatgtcttgagcttttttgtttttaaaaaggttaattcttaagtgtctttgtgtgtgtgtgtgtgtgtgtgtgtgtgtgtttgttgtggtatgtgtagtgagtatgtatgtagtgtgtgtatgtatgtgtggtatatggtgtggtgtgtgaatggtgtatgtnnnnnnnnnnnnnnnnnnnnnnnnnnnnnnnnnnnnnnnnnnnnnnnnnnnnnnnnnnnnnnnnnnnnnnnnnnnnnnnnnnnnnnnnnnnnnnnnnnnnnnnnnnnnnnnnnnnnnnnnnnnnnnnnnnnnnnnnnnnnnnnnnnnnnnnnnnnnnnnnnnnnnnnnnnnnnnnnnnnnnnnnnnnnnnnnnnnnnnnnnnnnnnnnnnnnnnnnnnnnnnnnnnnnnnnnnnnnnnnnnnnnnnnnnnnnnnnnnnnnnnnnnnnnnnnnnnnnnnnnnnnnnnnnnnnnnnnnnnnnnnnnnnnnnnnnnnnnnnnnnnnnnnnnnnnnnnnnnnnnnnnnnnnnnnnnnnnnnnnnnnnnnnnnnnnnnnnnnnnnnnnnnnnnnnnnnnnnnnnnnnnnnnnnnnnnnnnnnnnnnnnnnnnnnnnnnnnnnnnnnnnnnnnnnnnnnnnnnnnnnnnnnnnnnnnnnnnnnnnnnnnnnnnnnnnnnnnnnnnnnnnnnnnnnnnnnnnnnnnnnnnnnnnnnnnnnnnnnnnnnnnnnnnnnnnnnnnnnnnnnnnnnnnnnnnnnnnnnnnnnnncccactcccactttttggtcctggcattcccctgtatggaggcatataaagtttgcatgaccaatgggcctctctttccactgatggccgactaggccatcttttgatacatatgcagctagagacaagagctccggggtactggttagttcatattgttgttccacctatagggttgcagatccctttagctccttgggtactttctctagcttctccattggggaccctgtgatccatccaatagctgactatgagcatccacttctgtgtttgctaggccccagcatagtctcacaagagacagctatatcagggtcctttcagcaaaatattgctagtgtatgcaatggtgtcagcgtttggaggctgattatgggatggatccctggatatggcagtctctagatggtctatctttttcttcaaaaacactggtctcgtttggcatgggacattttctcatggcttctcagctgcttcctgctggatgggagaggctatcagagcatcctgttggaaccaggaaatacagaaggaattgaaaatcaaaaaggactaggacataaaatcagataaactcacagtgcatccctacagcaacacatcgcgtttacacctgtctcgaccgcagacagtatcattatggccaaatgttgtctttgtcagaatgtgggagaagataagaacttaacatcatgatttggggagattaccagaaaaacagagtgagcactatcaaacattagttacttaaacaaaccaggatgcttttagaagagttatcttattttaaattgtgtgtgtgtgtgtgtgtgtgtgtgtgggcaggtacatgtgagtgcaatgcctttggaggctggcggtcagatcgcttaagctatgtctccagtcaccacaccaggatatttaaagcctctccaaacttaagtcagttcatgtgataaaatcaagtacagatacttcttttgtccgttatccttgaatccaccaaggcaagaagccagaactcagcatgagactgtaagcaactcatggtttttattgtgatggggaaaaaaatatctcatgagtctggggtgacttgagagcagcctagaagaattccaaaaagtgttctccggctgagagaggagccgtgagaggaccagctggtaaaggcacttgctgctaagcaccaggccccacgtggtaggagagaattgatttccataagctgccctttgacctgcacatgtgtgcactagcatgtgcacatgcccttgccctgcaaacaaacacacaaatgataaataaatgtagattttgtttgttagtagcaatgacaataccattatatttcaggatgtggtggcaccaaacattcacataattgacagtttttgttcctccattctgataaggtgacgttgcacaagcttggaaggtctcagtgtcctctcctgtaaagtggggtgatcagtacctcctgacaaggaatttggggtgttttaagtgtccaataccttccaaactcaataaatgagaattttccggttgactttcaaatcccgtaatattcttcagctgtctcaaggggtgtccactggatgcttctttagtcaactgataactaaggacagagagctgggttgcattaaaatcatctgaagagctggaaaggttcgtaattgcttgtttgtggagtcaggtgtcactatgaagctgagactaactggtcttatatcctcctctctcggcctcccagctgctgaagtcacaggcacgcaccaccatgcctgggttacattttcttaaatagctttgaggatcttatctgtgtaatccagttgttaagcctttggttccggttaaatagaaaggatctgaggttgcgtgccaatgttcttaaatctgaatgttaaggttctgggttgatcaatttttcttgtgctttaaaattgatttcaattctcagggcagctgagcatttatttcccatgtgcatttcttaaggctgtggtcattcccactggaagaaccagaccaaggcattcaattgtgaagacattttttcctctcttcttaatgctgaagggcaggaccccacaggggataaaaatcaattatgatccatttacaaatcaaaagcagtcgaggtttgggtgtgcatttcttttgtttttagaaggaattgtaaaaggctatgcaatccacttaagaattcaagccccttccatttttattaaataatgagccctgcttttacagaggcctttctgttttctaaagagcatttgcaaacattacctcacttaaataaatatggtgaattaaacagtaagatgctactcaatattttatacagttaagagagggtcctggggctggagagatggccctgttggtaaagtgcttgctgcataggcatgaagaccccactcaatctccagagcccatgtttttttaaatgccactttcaaaatgcactctggactgcagctctgaagaggttcagataggcggatcactggacctcactgcttggtggccagacagcctagataaactggagggctacaggttcagtgagagacctgtctcaggataacgtgaggagtgactgaggaagatctagtgttaccatctcacctccacatgcatgagtgcacatacatatacatccacacagatacacactcacacactcatgcacacacactgacactcagtctcatatacatactcacacactcacacacactcacaaacgcacacacacttatgcacacatacactcaatttcatatatatacacattcatgcacacacagttacagtctctctctcatgcacacacacactcacactcagtctcatatacacactcttacactcatgcacacactcacacacacacacttatgcacacacacactcagtctcatatacacactcacacactcataaacacacagtcacagtctctctctctctctcactcacacacacacacacaaatggagactggctccacaggacagtcatggctgaaaggagaagctcagaggtctatgaaaatgatgctgggattcatgagagtctaagtttcttattggagccaagacctttagacaaaaatggatcctatacctcaaaaaaaaaaaaaaaactttccacacattgagcaggattgctgtttaaattgtatcttctaacattacagatgcccacagtttctaagtctcttttaaaagtgcacgtgtgtggcttagcatcttgaggattgttgtctgagaagcacccagatcagaatccacttgacaataaataccttttaggagctagaaggtaggacggccacttgaacctgtaattatacttgtgaacacaacattgggggggggtcagcattttcttgttgttttgtgagacagagtcctgctgtgtagctctgactgccttggacctcgctgtggaggccggtctggctttggacccgtggtgatctcctggctttgccttctgggtgctacagttactggcttgtgtccctctgcctgatcaatgttcatgttcctgttgtagagatgagaaaactggggtgcagagaaagctgatgaaggtcttactgaaggtgtattaagcacagggagggttgttggcccttaaagtgcagcgtaggtttccctagatggcctgtttctgttggcacattgattcctttgtgatcaatgagggcacaaggaaagatatccagttactacgttatgatctgatggcttttcaggacattgtagacttctagtgtcacacttcagtttgtttgtttggttggttggttggttggctttgttttcttagatgtaacctagaggtgagccctgcagtcactgagagcagacagcattagcctggtgaaactcagccagaggcaggcaggtttgctctgcagcccgggtctctctcagtcccccacattcagctttcatagcttagctgctcatgtcctatcactggttatgacaggagcgattcacccgtcagttctcagctggagctagctctcactgcaatgtgactgtctcatgcccaggaggaaatgtaacccagtgtggaccaagctgaatagatgctcgctgttacgcagcttgcaggctgacgcttctgaagtgggaggaggcaaaatcttgctttctaatcctgagtggaagcaaccattaatgggctaaaaatgtttattttacttttagttatgtgtgtgtatgtgtgtgtgtgtgtgtgcatgtgtgcgcatacacatgtgtgtaggtaggtatgtgcatatgagtccagtgcctgtgacagccagaagggggtgtcggattccctggacctagaagtctaactatatcaagagcagtcagtaactgctcttaacagttgagccatctctccagacgcttttccttgtaatatttaattgcccaacatatgcataacaatgaacattgtaaccatttttgaagtgtgcctcattcttgtctacactgggcagctgccacctctctccagaagtcttgcgtggttcctatcatcggaaaccatccctggtcaacagcagttttccatctctttcgtctccagctcctggcaagaacctccccactttctgcatgagagctcactctgggtacaagcagaaccttccactgtgtgacttgccaacttcatttagccctgtctcctcagggcatgctccatgtcctagaatgcatcagcacgcctttccatttcaaggcagcataatattcctttgtagccatacagtagcattttaaacaacccgttttcccgtgatggtaaaccttcctctggaaagacagcatgagaggcggcagaaatgggtgagatagatatcatcagccccgccctttgctgctgactgaggctaacgcagcagccctgctgtgttagctgaactgctggctgtgaacaaagtcgccctgacctacaaaatggatgtaaaaggtcaaaagtattaaatattccctgtaatgcttttcttctcgtcaaatgcccttcttgcttaattgcttgatgcagttggctttcaggacttgccacagtctactcgggaactgcttcaagacctttttccttcttcctctctaacctcgctattaatagcataactcttatttcccacgtagacggaagtccatcagaacggaaggtagtttatctcttccctttgggggaggtaaatgcccgttttattactaacgacctgtccgctaataagcacagacccctaaatttttgctttatcttcagttactgagagatttatcgctccttggtgatctttggaaataatttaaggctagaaagctattttcccagatactttattttctagctgagctggacaactggaaaatgactttgggatcagtgtgttaagaccagttttgagcaggagattaatgtgcctactgtgtgagcatgagctgacttcagaccctcagtacccacataaagacctgggtcttcatgtctgattcctgggctgggctgggagactcaccagccatgctagccacatccgggagttcggggttcagtaagagatcttgtcaaaaaatagaaagtgattgtggaagacacctaaggtaaactttgatctccctgcgcgcatacatgggcaagggcatctgcatacgctggctttgccaaaagctaaacatagagctatcatatgagtactctactgtcctatttctgtctgtatacatatatgaaggactctacactcacagggacatctgcatatccatgctcactgtggtgccagccaaagggctaaggtataagacagactagatgccattcaaaaggatgcacgcagaaagttgtatatgcatatgcacacacaagcatatgtgtgtatgaattgactcattaaaaagtgaaattctgttgtttaatacaaattagataaagcctgagaccatcatttgagtgaaataagtcagacttataaagacaaattgtaggcgtttgtgttttttgtgggttgtcataattagtttctgccagcttagcacaaacctagacataaatcggaagacagaatctcagagaggaattgcatctctcagaatggcctgtgatcaagtctgtttcttggttgctgatggctgtggctccagcctagtgtgagcagggcccccaggagcaggtgtcctgggctggataagagtgaccctgagcaagccatgggggaagcaagccagtggacggcacctctctgttctccgcttctgttcctgccttttctccctgtctcagcttccataggtgatgggttgtgagctgtaaagtgaaataaagcatgtttctcctcgagctgttttaggccagtgtttcatcacagccacaacctaggtcctagaagtttttatagacacacaagagcacgtgtgtacctgtgtcattgaggtagatgcatgttctatcctgtaacagcgggagggagcctagtactttgctgttctctctgtgtggctatgtctgtggggacaactcgagactgagtgagcaagcccagggtcacctggactcactgcctttgtgtttgtgcagaaaggtcttcctgggaacacagggggctggaggtcatctccagctcctcctggcttcctccaccctgtgtttcctggactgctcaatggagacaagggtgtgactcatgttcttgggctcagctctactggggccagccccttgcccctggctctacccagacctcttccatagctttgtgcttagggcattcctccaactcaagtctagataagcagaacaaagtgtttacgttttttatttgaaagaacattttaagtatttgactagattagcccaactctctgggtactagacccttagcgtctgtaagatattgtctctgagtttgtttggtttagacacagtgtctcatgctgcccttaatgatcttgaactcttgatcctcctgcctccaccacctgaatgctagggttttagacatgtgccaccatgcccaattcatagggaacccaggcctttggcatgcacacaagcattctaccagaagaactatgtgcccagtcccatgatgttgtgtctagtttcctgttactgaaaaggattggggtgtctgggcttagcaatggggggggggttacgccgccatggcttgccattgctgcgcctagagacagagaggggctaagggtccttggtaaagctgtccactctgttcagaaggcttcactctgctcagtggccatgagtacaggcacggtgacgtcccattgctgtagcatttgggaatgggatgtctcatgtgtgctatgtgactgctctcaggtcttcagagataatcagggatggtcatagcaagagtgccgtggactgaagagatggatgctctgtcctgcttctctgacagtctacagagaacacagagctgctcagggtagagtcagtgtgggaagcccagaaggatctgtgctgaggatctccccatcatcgcacccttgtatgtccttagatcttggggttagtggtagcattggctctggaatccacgattctcagcacttggggtgtagagccttttcaaattgtgctgaatagcactaagggagcatgactggtggaaggtgggaagggtaaacgagaaggccatggggtacagagagattcagagttcaggaccttggtggcaggagagccaccatgcatggtccttgtgcacatctacttgggtctctagtccagtgcaagtgtgtgaccaggtgacagagcacagtcaagtacagtggggtaaatgataccagcctggcattcaggacatttaggcaaataaactcatcatttttgtgatgggaagtctatcatttgtgtgtcgttacatgtacctgtaaggtcacctgggcagagaagctgagggggcatctggaaggttgtagattcctagggcatctagaagagagtaacctagaagagagtaaccaggccaccattgtccccgaatgtgtgtggtcagggtgggacaggaggccaaaggaaaatacacagtcctgcttcacattgagagagctcgtgacaaagtcatagaggtttcggggaggctgggatgtgacctgtcctctagaacgaatttctgggtagtagggtccaggtggagccccacaattgccctccctctggagcttccagacctagtaaccagaaatgactaagctcctgctggcctgccccatacaccctaaccctggaataggacaatgccagcttggagaaatggtggctggtctccaaacagtgtcccctgctacctgaggctggagtgctagtgacaatatccccctgtaggacattagcctgggccaggatggggctgtcttagaaaccttggctctcagcacagggaacactctcccaatttggaaggcattgatagaggcgtggtgatgtgtctttgtgaactgtctttagagtctccgctataaagagactccaagggctttgaaaagaataccatttgcacataattgctattgtgtaaaatttataaggctgaacagtgtcaggcaagatgttctcattgggctcttaatgtccgagtctccttgatcgtcttgtggtcaagagttacagccacagggctagggggaagctcagactgtaaagtgcttagcctgcaagcatgagaacccaagttccaccccctgagggatgcggtggtttgggcttgtcatctcagagtcactggtggaccagcctagcgtagccagtgatcttgaggttcacctcaaaaaccaaaggtggatggctctggaagactagtgcccaaggctgtccacctcccttcatacacgatctcactagtacacctgagtgttaacctgcatccaaacactggatccaaaaaggaacacacacacacacacacacacacacacacacacacacacacacacgcaagaattacagtggcttgtttagctttagagtctgtaaggtgaaaaaacccatttacccgacattccgagctttatacctaactgcttaagatgaacatttcaatcgttttttgctgttgttctatttttaaaaagacttgttttatttgtgtgtgtgtgcgcgtgcgcacatgcacgcgtgcacgtgttcgtacatgcatggctgtcttagttagggttttactgctgtgaagagacaccatgaccaaggcaactcttataaggacaacatttaattggtgctggcttacaggttcagaggttcagtccattatcatcaaggtgggagcatggcagcctccaggcagtcatggtgcaggaggagctgagaggtctacctcttgttctgaaggcagctagcagaatactggcttccaggcagctaggatgagggtcttaaaacccacatccatagtgacacacctactctaacagggccacaccttctaatagtgctgctccttgggccaagcatatacaaaccatcacagtgtgtgtgtgtactcacatatgtgcaggtgccagaggaaggtgtccaataccctgggaggcagttgtgagtggctgagcacgggtgctggggattaaactcagatcttcaggaagagcagcaggcgtccttcactgctgagccatctctctagctagtcccacattgtgctgtttgaggcaagatttattttccctttgtaccatctccatgccctgcaattgacatagggtttatttctttgcccatatcttctaccctcagcccccagtgtaagattctgggctgcgtctggcagccgggagtcttctgcatagtgaccggacgggacaaggcgggaagaactgagttagcctcacagaagagcggtctaactcagttaactttctgttgtaatttagccgggattaatggtcacttactggaaaaacgttcccggctctgtggtgtgttgctggaaactgaatttctccctctatttccccagagtctttttttcccttctgcctggagctcacacttggagcttcaggaagcagagtcctgttgcaatcatgacttccttgttccttcatattatttatttagtgtctttcaaaacgtaattccattacctttaatggtactagagactcactaagagcctggggacagtgcagggggtcactgggttatttactgggctgccccaccctgttagtctccagctatattattgccacaccatcggaaaagctcgaggggcctctcatgtctttacctccttgtctttacccccgagatgacttcagtcagtcagtcaacctcttgatcttgcaaaatcactcactttgaaaaacccccattaggccacagagataaaagaccatgggttaagtagctgtgtgacccttggtgacttgctttacctctctgagaattggcactcttagctcttgaagaacggagagatatgtttcgagggacaggaagcccacagaaatgatgggagggagggaagaaggcaaagcctgggacctgacaaatgaccctcaggtggcctccctgctcctgcatgacttagagcaaaacagcaacagaaatgtcccttatgttgaatggtgtgcctgtggctgcatgatcaattatgtttatgtgtgttagcgtgtgcgcatgtgtgcaatcctgcacgtggaaggcagaagtcagcctcatatgccacctaccttgatttttgagacaggtccctcactggctttgagtctcaccacacagacatcaggggttctcctgtgtctggctctctagcactgggattacaagtgtgcacgagctctgcctttttggaaacactgtttctggggactgaacatggcccacatgcttccaccattcagctaattccccaggcctggctcagtctccttctggcccctggggctctctgtgcttcttacacacaaggcagatgaggctgagtacacacactaggtctgcacatctctagagtgtgactatgtgttgggacccgtcttctcttcctcagcccacaggtggatggctggcttctggttgctcaggagaagacagactgccagagactgccctgctctgggggtgggaggagctggcttccttccaggggactccacatgggaatgtccacagacttccatttctaaatcctgtttttaactccctgggccctctagggaccttagtcctctctgaagtcaatggcgtaattgtcaccagcctcctggctaatgactgtgactgtcactcccctttctcctcatgaatggaggtaaatcctctgggacacttggcagcctggctacctgatggcttcagagcctggatttttgagtcttggagcactaactaagactttctttctgtgcctcagcctggattgtatccctgggccaagccataagaggcatgggggaaagtggccagatgggcacatggctgacacatcctgacatggctgtggtctgcttttctctctcctttcctccagagtataagaagaagtatggggaagaacatggctcctgccaggccggaatagcaggcttcttcacagaggtgggtgtgaaccatgtggcttttatttctcttcccttcttggtgtttggtccttttcattttgtggttgggatagccccgggagatgggatatctgttatcctgggtagtgtagattctgatgtgactctgcacagtgtttacccagagcccacacggaacccccacagtgtcctgagtgagtagactctgctgtttctagcaggggaagttatctaaacctgagaagggcacccagctgggatggctgggtggagggctgggctggctcgtgggtgaatctctacagaagctggctccatctgagatctgtggaagaagctgatagcagtttgaagatgtgtcagtcacctgggtgtctcctcacaccatatccacgtccttagcagagagactcaattttacacacatcgagctctccagtgcttgaattccaaaagcctctactctggtatgtccccaggtgacagggatagaattattgtttacagctaggacattttttaggcactgttttctctatcagaaatacacttccttattttgtgcatgtgcatatgtgtatgggtaagcctattgtggctcgtgtatggaggtcaaagggcaacttgcacaagttggttctcttcttccaccatgtgtatatgtgtgtgtgtgtgtgtgtgtgcaagtgagtgcagtgtccacaaaggccagaagagggcatcagatcccctggttggttgtgagctgcctgatgtgggtgcttcgaactgaaagcaggtcctctggaagggcagcaagcattcttaactgctgggtcgtctatctttccaggccctgttgtttgtttctttgtttgtttgtttttattgctatcaaatatgcataatgtacattctcccatttaaccatttcaaagccagtggcttttaatgaattcactactctggaggttttttcccctccagcctgggttcttccttgagtggcaccatatgtttctgcccagcagcctgagggatttagcaaagtgaaacctgaccttctgaccccatggcctcctattacctggaagacagaagctcacattctttgtcactgcccagggcctgactcttgggggccctgtgtcttttcctcctggaggaacatgcaccacattgagggggcaggaaagggagagctctctgaccccagggctttctttctgaagaacggctccacagtatcaggagtaaaactgtttaccttttcagagaggctctcagagtcaaagagaaggcagatggtgatacagtgtctagcccagaggcaacaaagaaaccacagacagtttcaccagctgcactctcaaactagtggacaccaggtgctttgcttccaaccctgccttcagtagcttgccacacccattcacaccagtgtcttttcccattctctctaccagcatgtgccccagcatctccatgggttgagcccaacacaaaataaaaatgcatttaaaacattataaatttacttttgcaaatgtatcacatttgcacagttcttaagcaggcatgccaagttctgttctgttacaatgtcaaaaggatggacctgcctggtctacacagagttccatactgggttctgggattggcaccaccatttgtcatagctcttgaagttaagaggagaatctccccctacctccctctcctagcccacaagcctacagttcaccagtgagacacgttttctctctgcatccttcctccccaccccagagcccttgtcatctttgcccaggctggcctcccaacaggcagcgaaggcatcatggttgtccagtgtcttcccatctgcttttgatgaaacctaaactctgtccttccctcagcctcctacctttctggcactctagagtagcatctgagggtgttcaacagttgagttttggtatatcctgttttcagcatgagtatgaggtactgggctactcagagctgcttcaagaacatttttgggcacagaggctcgccttgggcagagttactcagctccgggtgatgtggagatatttcccttgaggatagaggagagggtttattcatggccgaaatcagaactcactaagctcttgaccagaactaaaggacaaggattcatgttggggagatatcttttgccctgtctggtaagttggagaggttgggacattagagattgttagaagggagattgcatagggtggtaaggttgggacattagagatttttagaagggagattgcaaagggtggggaggcagggatgtataggagcagcctgggcagcagtgtaaggtaagagctaccagaagaagggaacagggacttggagcctgagaaaatctcagcaccttgtcatgggactcctgggctctgcagagaaacaggaacagagcgttgggagcacaggagaggatggtaactctgagtgggaggacccctccctctaccacatagttctccagtcctagccattgtctcccagcttgcctgggtctcagccttagctttgcttcccaggccttggcccctgcaaacggcagttctttgaactctctgcctccctcatttctgaaacttcagctgtcggcaactgaacaggaaatgcagttgaaagggtcaggcaggctggttcccctcctctgccctccggctgacctccacactaggctaccatgagctgtagcttgctggacgtggccacgatgggtcagagcattcccacccaagatgtctgtttgacctgtggtcagtgtccctgaggacatcaatcctctgcaagttaaatgcctcacgtccttgaggataaaggactgctttaaccactttgtagaccagaatggcagaggtgatattctccaggcttttagagaagacatgggctgacccaccatggagatgtcagggggacatttcttggttcagatttaatagtatatggtggcaggcagacaaaggctggtggctcctttcagtcacatctaggtgacactgtaccataaaggaaactggagaaaggcccacagtgtttattgagggactggatttaagcagccacgacttttgcttgtgtgcatttgtgtgcaacaccagcattgactgcttcttacatggagaagagtttagaattgatcacactttcctgacatttgagaatggaaccaaaaaggaccctgccaccagccaccagccaccagccaccagccaccagccaccagccaccagccaccagccaccagccaccagccaccagccaccagccaccagccactgtgaatagaaaaatccaaaccccagggcttccaggaaggcagtatctatctctcttgagtacagtgggggcgtcacagctttggctgagcttgccggcttggacagagatgagacaatgtgacagcttagacagagatgagacaatgtgacagcttagacagagatgagacaatgtgacagctaaaagaagagggggaagagcaggagctttgtcttcgtgttccaatttttaaattttattgtttttattcatgtgtatatacatgtgcatatgtatgcataatatacagtacatgcatctatagaggccaaaagtcagcttcatgtgccgtcactgtttcttgggagccgttcaccttatttttttgagtcagggtctctcaatgaaagacctgaaatttgtcaattaggctgactgactagtgaaccccggcctttctaatcgtccccagtgctggtgttataggaacatgcctccacgcctggtgttggggactgtcaagtccccatgcttccaggcaagtgcttaggagctggctctccagccccgctttaaggaatgagactactttgtttagaagattactttgtttatgtactttgtaacacttaagagatgtcaggagatattaggtatctacttagctttccttctagatgaaggcaaatcccaggaaaacatcccttccctcacccagggccctgcagagtctttgcaggctcctgctgctctcaaagatttggtcaagaacaagtcgcagatgaaaagaattgtgtttacaactggtcctaaggccatcactcatgctcctctgtgccctcagtgcttgggcattgattacaattcctttttaagctccaggccagaaaaatagtctctctcctctaaggaactcatggtttatctttcaaacaccctttgagaaccagcagtgttcttataccagtgggaggggaggaagtggatgggtatcttaattaggggttttgtttgtttgtttgttttgtttttttgttttgtttttttgtttttgtttttgttgttgtttttttttcaagacagggtttctatgtatagccctggctgtcctggaactcactctgtagaccaggctggcctcgaactcagaaatccacctgcctctgcctcccaagtgctgggattaagggtgtgtgccaccacgccggccttaattagagttttaatgctgtgaacagacaccatgaccaaggcaactctcataaggactacatttaattagggctggtttacaggttcagaggttcagtctattatcaccaaggcaggagcatggcagcatccaggcagccatggtgtaggagatgctgagagttctccatcttcatctgaaggctactaggagaagactgacttccaggcagctagcatgaggatcttaaagcccatacccacagtgacacacctactccaacaaggccacacctccaaatagtgccactccctggaccaagcaaattcaaaccaggacaatgtttgagcgattgtgcactgtgccaccttttcccggagagcacggaaacgatctgttctcatgaaggaagaaaggagagaggatgagatagaagagaaaatggcttcccataggtctatggcccagtgaggaaggggccataaacacgtggagactcagcctcctggtctgtgtctgtgtattcatctagatatgtcactcaaaatttaataatctcgataaaaactcatgtaccccgagacagtctctccgcaccttatgtcttctgttagagtttttgttttgctttatatagttattttcttttttaaaacttgcttgagtgtctgcatatgtgtatctgcaccatgtgtgttcatgctgtattttttgtttgtttgtttaattattaacttacaaaagcattaggtttcgttgctatttttttgatgaaatttgtttttgttgttcctttaacatattttccatatttaaaatcttactactttatcattgtgtgtgcatatggacacacttgatgtttgtatgcatgtatgcaggtgagcctgccacaggacatactgcgtgattgaggacaacttcaggagtcagttctctccttccaccttggagtttgggggtggaacttgggtggtcaggcttttgcgaaacttcttttaccaacggagtcattttcccggccaataccggttagctctgaactcgctaagtagccaaggctggacctgaacccctgctgggatcacaggagtgcaccaccacgctaggcttgatagtgctgtattctcaagcactgttcgctggagtcacgaggtttaggaacagcatctcttgctcaccgttctgaattttatcttagggtgaagctgggggtggggacatgcagctgcttcagtggccaaaacagggacttggtctgtctctcattctctctccttgcttagtaatttcatatttatgcctggaaatcctagcaacatgatagactccagattgcccagggcctggtaccatatgtgttgccataacgaggcatttcgaatttctttgctgtgactatggctctcgatgtgtcacctaatcctctctgactccctttggatttgtctctctaggaactggtggtcatgggtgccccaggctcgttttattgggctgggacactcaaggtgctgaacctcacggacaacacatattttaagttgaacgatgaagcgattatgaacagacggtatacttatctgggtgagtagctggggagtccgtctatcgggaataaggtgaaccatgagggttctccattaccaagagctcatggagtatcactctattaatagagagaagcagtagttggcctttacacccatcagtctcattagtcacacttttattagcgttccttagcatctagttgcacacatgggtagtagagaggggaacaaaagaggaaggcggtccaaactgggtggttttctcaaaatctgatgggtgagcttccagggaacaagtgtttcctcgccttggtttggcagtcagtcacgtacagatggtcagatatgcaatatgcaataagcctgactgaaccctgactttccctggacatcattttaagtgatgcgtctgcttcctggtcatgagtagagacagtagaactgggaacttccatggcagcgagcaacctggtgctgagccttactcaaaggctctgagacttttctctctcttttttagttttttttttttaactatctagaaagaaggtcagcatggtttaacttagcagccaccaggcctgagtggtcctgggctgggtgcagtggcgtgtctccacattcttgctactccagagcacactgtctctgcaggaagtgtatgcaatcaaggacatttgagtcattctgcaccgcatagtgagatgccatgttggaaaaaaaggggggagagaaggaagaaaggcagaaggaagaaaggaaaaaaaagaaggaagaggagggaggaaaaaaaggagcaagggagaaagggaggaagggaaataggagaggaaaggttcggagagaagccatgttcctttaagaagtatggatcacggggatggcagcccatccctgtgattctagcattctggaggtagaagcaggaggatcacgaatttgaggtcaatttgggctacttagcaagaccttgtctccgaaaacaaaaataagacaaaacagagatgagctgcctttgtttgtgtgacagtaccaagtctctgttcttcagtccaggcctcaagtggaccgaaaaggaaacttaagttagaaaggttaatactgataaaataatgtgtctttcatggctgctgtatatgaatgaagccaagagaacatcctgaccccctttttgcatagagaattttccagaaagaccgtgttaggcaggtgtaaggagctggggacttgccattcccagcatgcctgtttggcggagttgcacagacccaacagcaatttataagctttgaggtgttccctcatccagttccttcatccaccacttgccaagcatttgctcagcgctgtgctggtgtgtgattccttctaatttccaaaacagccttacaagacagctatcaccactgccgtgtgcggttcatagaggaagaagtgtggaggcattatgcaacttggtggtgaatccagttacaaacccatggtttaagtgctgaaaccccaaccccagggtgtgctcttgcctctagtactgaatctccaatgaagctaggaacaccacgagggtgggggcttcacctcacattccagggtgatgtatatttgatgtatagatgggactcagcagtaagtcagggatgtcagggaaggcacaaggaagctgcagctggttggtggctttaggtttggggacaggtcctgagaactctgggacctgcggtttctctccgagacccttatctgctgcagggattagcatggagcagttgaggagggccatcactcatggcagtcttgggtaaagtgagcagtcgggagaggtcaaccatgtggaaaacaggagatagccatgctaaagtgatcgcagctgacacgtgtcacaacagtcagggtataatcggagcagtggggttggaggtcatgagaaagcttgaatgatagacaacaggcacagtttggactggcggaggtgtgagtttggccttccagatggttttcagaaagcaagagacatttaaatcaagctcccacagccattttccattgtttctgggttcctttcagacccagactcactggctccctctctgctcacctgtccatacatctgtccatcattggttcttactcttctcttaaaaaggacatgacatagcttctaacgttagcttctctggagtcagacacattgggtttgaattttgcttcataatcttgggaatgtttgtttaaccatgtattatctatgatacaacaaaaaatctatgtctatatctatagcaataaaagagaatattaaaatattttgtagtattaggaatcgaacacagagccttgtagataccaagtaagccctagtctaccactgagctgaccccaagccctctgctcattttcttgacttggacgggttttgcactgtaggaatatgtgtggtcactcatggagttgtaccctttagcatgtggactgtgtcgttagaatgacatttctccaaattaaaaaacacatggagtatctagcaccctactttttccatggagcacagtctgaaggcatgatcctcccggtatccctgtgaacgtgcctttctgtgagataagatatttaatacgaaaacattggcggttgccatttgtcttctagaaggtccatgtcccaagaataacaagaacgtactgtctacacagatacctaggaaacactttcttctgctgattattttttccttatctgacctcctttcccaagtgtgtctttgctttctatctatcctgttcaggctatgcagtgacggctggccacttctctcatccatccatcactgatgtggtagggggtgccccacaggatgaaggcattggaaaggtaaggagagaagcagagggggggggtgcatgcatccctggaggggatttctagtttactttgccccagcactctccagataggctgatgtgtaagtgaccggctgacagggagccctgtcttcctctgcccacactgagttcaccttgaaagcttagagtgtacatgttattctttgccaattctcttcttggcaactgactttgctgacatcatgggcccccccatccccacccaagagggagatctgcatccggttctatacaagttcaaataccgccatcttcccaagcctctgcctcgcttccgacccgatggaatccgatctcatctgcaacgtctttggagctctgtgatagcaggtttttgcttgtttccccaatgtttcagggaaaaaaaaaacccactgtgttctcatgaccagtgtaactaaggttatactgggaatgtatagacttggctttctctaacgtatctccaagaaggtagaggacactgtgggactattgcctctaagggctcgctatggggagctgtggctgttgatattgtcagtcctgctcaggagtccacttttatcttgctggctgtactcatcactcttcttaatgctatgacggaatgcctgtcaggaagcaatttagggaaaggcgactttgtcatggcttagagtctgaggagatacactccatcatgatgcagaagatgtggcagcagacaggaagctgtctggtcgcattgtatccacgctccagaagcagaaagctaacctcaaggtcttcagcaacgctccacctcccaagcctccagatcagtgacatcagctgagagccaggtgttcttgcacatgagcctctggagaatatttaatgttcaaaccacagtgttggccaaacctgaacagtggtgtagactttgggcccgtagtccgatgggtagactggggatctgtctgaccattctcctggttcggagaagtggaatcctgagttctggaccaacaccatggttaatgagaaccttcagccaagaggtcagagaactcagaagcatcagctaacccgcttgcctgagatgcgctcgtgatgtcctctctacatattgtcttgggcaggaggcagcagtcgctgctcgtgcttcaggagtagggtgctgtggagagaggtcctttgaaaatgaaaccaaatgtcagggcgctgaagcagaggctgtggaggattgcatagttgaactctgataacttctgtccagaaccggctcatgtctgagtcacatgaattcctgtacatcatggaagaaaatgccccaatggtcatgacgcctcctggggaggaagtagggtcactggacttctccatggtgacctttaggatttgggtcatcttcattcctggcgtgagaacaccaaggccttcataccaacgtgctggtccttagccaaggaaagggccttctgctctgcttcttatctgctcatctttgcatcagatgtaagcagaggggctggagccatggctcagtgattaagagtgcttgctgccctcgtagatggctagggtttagttcccagaacccacgcaagcagctcacagtcccctgtcactccagctccaggagatccgatgctcttttccggcctcttcacacaccacgcacatgtggtatacattcaaacgcacacacaaacatagagagacagagacagacagacagacagacagacagacagacacacacacagagagagagacagagagagagagagtgcaagagagagtgagtgagcactggttgctcttgcagagaaccagagtaaggttcccagcacccacatggtggctcataaccatctgtaactccagttccagggtgtgggcagcaggcatgcatgtaatgtatacatacacatgcaggcagaattcatagtgctaagggctctggaaaaaaaatccacaataaagggatttatttaatgtttacttgtttattttcccaaactaagctcgtacagattccataattctaaatcctaagtggaatcagtttggggaggttatctccagtgccaacattcacccatttcatttgtcttaggttgggccatctgttaaagcttaactcctgggactgacagggttaatttaaagagaaggcttgtctatctcccaagggttgaatcacttggttctaactggggagacttctgggcctttttgtgcatggtttctataagctgtgtggttcaggagctgtggagatcctttctgccccaggattgcgggacgatttcttagcaagttgctgagagttctgttcacacctttgtcatcgttaatccgtgtgcacacagccgtgggagacaacaggaagacactgatgaataccttaatcagagcttcttccatcctgactagcatttgttttttaattccgcaggtttatatatttagagctgaccgaagatcagggaccttaataaagatctttcaggcatcaggaaaaaaggtgagttcttgatgtggtttatgtgagagccggctcccatcaaggacgtgcataacacagggcttctgcttgtctgaggagatggagcagatgagtttctacatggctaagctactggtgtgctttaaaaggtgttgtggcccaggcgctggcatgcaaatgaggcatgctctctctctgcccctcccttcacctttgtctccctctggctgtctcatgaatgcacatctccaacccacaaagatcagtactgtcaagggcaggcacagaagtgatcgatcactttcaagggacgcaggtggacggatgtttctcattgttcctgcctcatctgcctgatactgtcttctcctagaatcattgtcataccagggggacagctgtcacataaagaaaatacaaataaaaatcaccttagttttacgtacagggatgttcaatctacagcctctaggctgtgtgcaccacaggctagccatgaatgcagtacagcacaaattacaaagttccttagatactgtgaggtgggttttacactttatttgtttgtttgcttgcttgcttgattgtttgattttgtaactatattccaccatcctcagatgtaaactttttgggtagactttgtcttctcaggacattgagtataaaatgagcacaaagtcatttccaaagcctgtcttgaagaagagttctctacctgggacaccctaccattcccatctctctccctgcttcctgaaagtttccgttgtaacccatgagattaaatcagtaatcggttccgtgattcattcacttccttttcctgggcttcccatcctgcctgtgcttttgtagcatagaccagcaggaaggtgttgctgagcttaggggcttattgggataaggttgaggccaggaggattgcgggattgtatggaggctgttggaggatttagttgtctctgggacaaagcttgggatgtggaaaggagatgccaggacactttgcccacagtttctctgtcacaaggggaaacaatgattgtctcttcctggcccccttcccctggttctcactcattcctgcttggagttgttcttgctacacaacagcctggaaacatttcatggtgtcccaaccgtgaatggtattcggagttccaaacccctcacttacatatagatgttattctttcttatggttgcaattttagcagctttagtatgtacactcagtatatagtgatcataagctttgcatgaaaaaaaaatgtacccacaaactcgactttgcttttagctctgggaagtatgctagcatgtgttattttaacatttctcaaaccccaaaatattagcatcagaaagtaaccatgaaaaatttgcaaaataaattttctaagcaaccctaaagttggaaaagaaatagctaaatactattggtgataaattcaaaagagccctccaaacccaagtaggggtgactatcctataataagtggttggtggggtccactgtggataatgtgcctacacttggcagtgtgagcatcccttcagagtggctacagaccgggaatggtctccatgccggatgctgagtgttctattatctatcaggttaggtctggagcatggcttcctcggtcagttgtgtctcagtgagtcagctttgggcaatgatgtgtaagtggatgctgtagtctttgagaacccttgtctcagctgtctgaggagccaatgcactgggctctagggcagacacaggtctgtttgaatggcctcgttatggtaggatgagtcaggttgtttcatgcagagaatgaccggccaaggtactttatcccagctctgtagccatcttcctcctaagtctcctctccccctcccccttcccactcctcctctctccctccctctcccccttgccactctccctccttctgtgtgtgtgcgtgtgcgtgtgtgtgtgtgtggtcatgtggatatgtgcatgcatgcatgcatgctggtgtacatgtatgcatatgcatgcatatgtcttcctcattcactctctaccttatttttgagagaggccctcagttgggctggctggcctgtgagctccaggattatagatgctcagactcaggtcttcatgcttgcatggcaggtcaggtttactgcctgagctatctcttgggttccagcctttccctttctatagggttctgctctcagatcccttgccctgctctggagttacccctcatcataagcgtttccattctgtagatgccttctgcttattgctgcaagagattctcagctctctggctccccattatctcataggaagaggacatgacccctggggcctccaaagcgtgcctctagctttgcccttctgttcagagctacatagacaacaggaggttccagctcagaaagtcactcatacttctgcttttgtttggcaccacttcagttcaaattgtctggtgtcctgcctcccttccgggaagaatgaaaactaacaacaacaacaacaacagaaacaaacaaacaaacaaacaaaacagaaaagaggtctatttattgagttgacaccttataaaacaataaacacaagagccactactaagtctgtggctccgatgtgaagacagtcacgctccaagctgctggggagttaagtaactctggctccagaacatgtccttgacacgctgaagtgtcattggcttacatcagtgggtaaaattatctgcattttaaaaactgaaggatttgtgattggacacccatgaagacaccaagctaagtagcccactgggatttatctcctggggctcagcccaagggaacagctgttagatctgctcttcttgccttccctgggcttctaagcagctttcccaagtcctccagggccagtgttaactgcaggaaggaggttgcttctcttgcctctctcaaactccctgaggtcagctgccaacaagtctcacaaacagaagattccaggtctttctatttgaaagcatttatttaaaaacaacagtacattctcttttctttttgttagaagaggtttcaaaccagcagccctttagcgtgggcccagctgcacgcgtctgtttggcatgcacaggattcctttatacacttatcacaggtctgtatattagctgaggatctctcctttgccaggcaaagctctcatacactgtgctataatagccttagctcttttgtaaccattgctttaaacatttatttttataattttacactctgtgtacacgtgtgtgggtgtgggcacatgagtgctgctacacttttgagccggaggtagaggtgaaggtagaggggcttgtgagctgttcagtgtgggtgcaaggaacagaactcgggacctctgcaagagatagatgtatgctcttagccaccaagccgtctctccagcccccattttacttttgagggaggatcttgctaagcccttgtacttccggttcttctacctcaaccttctcagtagatgggatcacagccctggaccaccagtcctgtagcaattggtcttaaaaaaaaaaaaaaaaaagaatacattccagtcaacatttagatcttctcttgggaatggagaagcagatgggctgggagccagctctcctgctgatggtagtgagccacagctgtgtggggctacctcagccagtccctgggctccaggttgctgtggtctccggcactctgtgtcatgagttagacacatgatttacactcagacactgcttagctcatgtaagcacacttgagctgctagtcctcattttatttgttgcatccaggtaaaagcctggatctttggtctttgtgtttgagcctttagatataaaataacagatactggggccagggagctggcttgattggtagagtcttgttgcacgtggataaggaggagagtgcaatccttggatcacacagaatgcacatggtaaagccacaagtgatgtcatgctcctgtaacctcagtgctggggaggtggagacgggtatatgtacctgcacatgtatgtatgtgtgtacctgcacatgtatgtatgtacctgcacatgtatgtgtgtacctgcacatgtatgtgtgtgaacagacacacacatgtgcacacacacacacacacacacaatcaaataaagtagctggggctgattatttacattctgattcaagaagatgcagtacaaatgggccctgtgcccctatctgtcaaacagccttgagctacttgattctctgtcatgtcagcttgtgccccatctcttactccgtggaaggctagagaggctgtgtgccccatgtcatgttttcctgcctttttgtgttatgagatttcatgttcctacttgtgttgccttgtcaaatgtctggttttggagcacatatacaaacatgacatctcattctctgggagctagcctatttaccgttcccttacagggctctaggaaaggggcctgcagctggctagctttgagtgggaggtcctcaggagctggttatgtgctcattgctcggctgacacagcttctgaggggctgggaacatgtgcttcctaatctagtgggctgatgaagccagggccttggtgtataaagacagaccctgaacatgttgtcatgacgacttggttacagatgggctcttacttcggctcctccttgtgtgcagtcgacctgaacatggacggcctctctgacttgctcgtgggggctcccatgttttctgagatcagagatgaggggcaggtcaccgtctacctcaaccaaggacatgtgagtacaaagtgggcaatgaggaggtaggggttggggagtgacatcggtgtagtcatgtgacatgaacccactggaccccacctgagggaaggcgtgcactgggccatgttacccagaggagatgaaggcctgggtcctgcctggaaaagcttaatgatccattagtggatgattgtatacagtgtgacacttcagtgtgggacccagggagagtctcaatgactattggttatttccgattttcctgctttctctaagtgatgtcactgtgatatacacatggttgtaagggtctccgttttttcagatgagataaaccaaggctcggaaaggttagctcccttgtctctaaccttacagctaaaaagtaatgaggctgagattggagcctcagcaggctggcttcatcttctccaggctgtaccacctctctgagagttcctatgcctctttccggagagcgtagaggtgctaggctatctctgaggaatcccgaggaagcagtaggaattgagtagaaaggtgaagtggactgggcctgagcttccaacaggaagatgcgcatgtgggttgagcgtcgaggtagtaggacctttacctagttcagcaaggagttcatactggacaccagctgataaactggccaaaggctataagcataatgtcccttatcctgtagaatcacaaagtggggggagagagatgcaaagatgcctctctcccctctgcagctggtggaggggtgggggtggatgggttcttaagagggaggcggagcagcaaccagaagtggcaggggacccatgaggaagccgaatccaagtgtttaatcacacatgccccacccccatcttactactacatgaccactctatgcaccagggtcttctttctagtgacctatagcccactaggttagtaattatatggcactatgggtgagtgaagatgtaggtaggcccgagctcaaatctaaaccttgccaaatcttttaagcaaaggatgagcaagtagcttgaaattgacccgccccccccccccaatttcctcctctacaaagtaggaagtgccatatgctctaaccaggagggctgcaccgtatatgggtagatgtacacagaaggccttgggacttcccccaccacactaacaggaagagttacaagctggccatctgtgcccaagggttcttggatttagccaatcacagactaaacacaagggacaagaagtccattgtgtgctactaaacatgcttggacttcccttgccattgctccctgaatgatgtagtgtaaaacctatttgcatatcatttgcattgtattggacattgtgagtagtctagtcatggggtaaggacaggggagggaattcataggttctatgcaaatgtcactctgtttcatataagaaatttggacatctaaggttctggtatgttaggggccctgatgccagtactcccagacaccaaggaacatccatttttgtgttttgaggtggagtttcactaattcaataaatcaatcatcacatctttatatattttttttcaagctgtgaattctgtttatagtagtagaaatgtagtcacaacaaaagacagaccatggtgtggtggactatgggtagacggtaggcccaaagtgcctccacaccagggaggtctaaagattcttaagccggaagatgccatgttataatgatgtcctggtatttctatatcagttattcatggggaccatgggcattctcaaatggcttctgctgccatatacacccttgacccctctcagtgtttgcccaggaatctcaaagctgagctttaagattaatgtgatagacccctcaccccagaggtactgggtatagaaacaggaccctctgacaaggttactaatgcctgccctgtgcaaagcaacctcagggacttttaggaagaggcacaagagagggggaaatagacaaacgtgtactcttttggttaccagagtctacagttcttacccctcacctctctaccaaaagctagagtcaaaaatttgagagaggaaatagatttattcaaggccagccctgaggaaaagacaggagagttcttaatctcaaatcgacatcctggggtgggaggctcaagagtgcaaagacctcagacaccggcttcagggaggcactgggcgggacactgatgcgcggcagaggcctttcctctcagagcctgtctcctcgcttcctgaccttgacctaggagaccatcacatgcaacttcttttcaacaaacacagtcagttcacctgctctgaggaggggagaccctcagagactcctcctctttatgatttagaaaaccacaggaaaagggaaggtggcttaaaggtcaggtagggaattatggaagggcgcagaggtcacagtttcttgctctgctgcaccttaaaacagcgtcggatcagctgtggtggcacacgcctttaatcctatcattcagtaggcagaggcaggaggatctctgagtttgaggcccatctgatctacacaaagactagtcagagctatagcgtgagaccctgcctcaaagaagtcaaaaactgatttggggggaagagttaggctataaagagagctgagaagaaaggcatcgtggggatgaggagaggataggcttgcctgtctgagtttgcccaggagaggttcagtcattggctcacctgctattacctttcctctataacatatctcgggctgttccagactctcactgtatagatgaaaggccttattttgccatgaggagagatatttgggttcctgtggtgttgcccagctgtttcctgttcatagctgtaccctaagagggtggtgttctgagctccaagtttttattgtggtttttttttttgccccctcctccttcccccactcgatcctgtttcccagggagccctcgaggaacagctgaccctgactggagatgccgcctacaacgcgcactttggggagagcatcgccaacctgggcgacattgatgatgacgggttcccaggtgagcaggaccgcatagggtctctccaagtgcagccacttgtcacgctctgactttgtcccttgtttgtgactggctcctggattttctgctctacacccaaaggcacagcagctccatggggagagtgggcaactcttagagatggattggccaccagaatgcaccttttgtataatccattgtcatcagctccaccctctgtgccatgtgcttgctatggcctctgggactggtccacgggcttcttcccatcattgactctgtatctgggatgctctatcatgttgttaggggagtgaataaagagggtattagatatcgtcttccctgataatatcagcctggttgagtacagtgtgtgtcagaagaatgggtggtatatagacctaatgtccatttcttcttggacaatagtcccctccacagacttttggcttctctctctggtctttttagtacctcatcccctcaccatgtgtagagtatacagacattaggagctgcttctgcagggcagggatgtggcttgcttaggctagctgctcttcaagtccatcacactattggccacagatggtttcattagtgagagggctatcacctcagggtcaggggaatgcacagatcccacccttggtattacaggatcaggcatatggcgtactagaagccaagggtgggaaggaaggaagattctgggcattagccaccaactgtagaattgtgacagacgaaggttaggacaggtcctcttcatttgtgaatcttttatggattgcttccatgtccttccctcagaggatgaagagagacacttttcctaggagtaacctctcctcagcctttgtaaacttccaccttttaagtgttaggagaccatttgcccaatttaacgtttgaataatgaatagtggagaagttgtgacgagatagaattcagacatgatgactggggttgagaaagcctccatggcatctctaacagctgtctccccctcagatgtggctgtcggggcacctaaggaggaggactttgctggcgcagtctacatctatcatggtgatgccaatgggattgtccccaagtactcaatggtgagtgtgggagggaccgtgatgactctctacgtgtggtgtgtgtttgtatgtggggtgtgtgtgcacatgtgtgtgcaggtaagtgtatgtggtatacgtgtgtgtgtgagagagaaagagagagagaggacagagagagatacagagagagagacagacagacagacagacagacagacagagagaggatagagagagatacagagagagacagacagacagaaagagagagacagagagagagagagagattgatgctccactgtgaaccatgctatgggattgtggatttgggcttcctttcatatttttcactagtgaaaggaacaatcagttaattgataattgatagtttattaaatccagaaaaattgttatagactccccaatttacccaatttgagagtacatccaacatatgtaaaagaatatctaaattgtttttttcaaatattttatttttaattgtgtgtgtatataatatatatgtacacacacacacacacacacacacacacacggatgcagtgccttcagaggtcagaagagggtgaggtaggaagagggtgctggtttctctagaactggagttacctgtggttgtgagaagatgcagctgctgggaaccagaccttggtcctctgcagtgctgatctaactgctgatctgtctctccagccccaacagggacattttcatctagaattggagctgtttatttttacacttatttattttactctgtgtttgtgtgtgtgtgtgtgtgtgtgtgagagagagagagagagagagagagagagatgtataagtacacgctcatgcatgtgggggtcagaagacagcttgtgggagatggttttgttccaccatgtgccccagggattgaactcagggcagtgaagctttgtggtaagcacctttgcctgctcaacggcttgctcatccccacagcttcgtatataaaaagagagatgcaacttcctctatggttgacatctttgccaaaccaccggtgtactaagccagtggaatctaatttgtttttaatatttaactatttttggacagtgttgtgtgtagcccaggctggtctcaaacttacaaggtagtttagagcatcctttaatttctgattctccttcctctacccacaaagtgctaggattcctgtgtgtgccacgaaactccgctttatatggtgcgagtaatagagcccagagctttgtttatactgggcaagcattctaccccctgagccacatccccaggcctctgagaaacatattttaagatataatctagggacaaagggatgcacagagggcctgaaagttgtcacaggctattgtcaaacttggcatcgaaaccagggctaatcaaagtcccggtttcacatcccagacttggggacgtggaagtggcgaattctctatttttgcctcattagcacagtgctcaatcttgctgacggcatcaagctggcccatgggaaaaaaggaagtcaggctctcaacagaaacacagtcaggatatgtgtggtgtgtgtggagcggcttgtatctttctcccagcgggtcagtgacagaaaagaacacacgataagaactctgcagttagtgcttgcgagcctgcacgaggtcctgggttccacgttcagcaccccccacacaacacatggtgtcacatgtctggagtcccagtgctcaggacgcagaagcaggaagagcagaggtttgaggttatcctcagcaagtttgaggccagcctgggttataaaatcctcatcagcaaactcaaaataaaacaaaacaaaaacccccttttcagtcagcaaatatttgtaatcggacacttatgcactgagcacttcctgttcacacctgtacacagagatttgtatttttaaggctgagctatctttccagccctgggtttccttttttttttttttttttttttttggtttgtttgtttttggtttgttttttgtttgtttgtttgtttgttttacaaacccttgtgtcgagggctgactttcaatagatcgcagcgagggagctgctctgctacgtaggaaaccctgacccagaagcaggtcgtctacgaatggtttagcgccaggttccacgggcgagacggcggccccctttccggccgcaccccgtttcccaagaccaatggctctccgcaccggatccccggtcccgacacccggcaggggggtgggggcgggtttacatttttaaaatgtaacttcatattgattcttggattgattctttgtattgactgattttcacatcactcaccccattcccactcttcttcccattccatgtatccacctcggctcttgcaaccttcccaccaaaacaacaaaaaagtcccgttgttgacgctatagtgtgtcacagtgtggtccaaggtataccgtctgtccacacaacttaacttgcaaatgttcatctcaatgagccattggtctggttcaagcctctggcctctgctacagatcaatacagatcttccctaggacttctctggggtaccctgtcgttgccctgtgtcatggatatcttgcagctttggctctgcaaaactggtcccttcacgtgctgcagcagttcatagttagggtagatgttggggtgggccaactcaaagccttggatctgggcttaggtagtatcggaatttctcagctcccccacacccacgccaccagagacagctctcccatgcttacgctctcaggctggctcatccattgccacggcaggcaagggacagggccagctctttggttctcatgcccttggggccagctcacccgccctcacactaccagggccagctctcccatgctcacacccttaggctggctcacccaaaactcctagaaccagggccagttctactgtgcttcctgggcaaggtactggtcctgctccccccccccccaaccagtgctacagttggcaagggggaaaggaagggccagctctcctgctctaccacgatgcccagggggaggggggtggggccagctcttcacaacctcagatatcaacatggcctcaggcagcagcccagaccagggatatccactaggcctttggtggtaacagacctctgctactgtggggccatggacacagacatgacccaagtggcagcatgggccaggacctcaccacggccttaggtggcatcactggctactcgcagcaggctgttcctcactgccgtggagtcttttcactgtgcacacatccttctgcctctcttactcttccatctctccacattcacttgctcatcttagtggccctcaggcctctgggcatctggagttgtctcagaagtgctatgcccaacccatgcagagtggcaccaggcaggggtcatctgggacatgctctgcctacctgggccgtgtgagccaaggtctgtattttaggaagcatttgtaaatagggttacagtctctctcatgtttgtttgtttgtttgtttgttcgttcgttcattcattcattcattcattcatccattcattcattcatttgtgtgtatgtgtacatgtatgaatgtgtgtacacatgtgtgtatttatagtgttgtgtgtttggagcatgtgcacatacatgtgtgatacacacaggccagaggagggtgtgaggcacccctggtctgtcactctctccttccttcccttaagacactacagctaggatggtgtctttcaaggcccagcaatcctcctgcctccgtccctgttcaggctcatgtggcatacctgctttctatgtggccgctgagaatttgaacttgggtcctcatgttctacagcacgtgcccttgcccatagagcatctccccagccccgcagacacagtgtctacatgtacaacagtccttgcagcaaatctgagttagacggtggggccttgctaatgacttgggcctaggctctttctctctgccaacacctgcttagtcagagcttgacctcaactaagggaaaagtccttagggagattcacggagaggaggaggggctattgccagagagcctgtcatttctccaacctgaatcctcatcacagctgtgtgagacagatacacttcttcgccgttggctttctgatgagccccgcagagggtattggctttgcccagagtagctgccttcctcaactgcattttggaaaaaggcctgcccaaggaggttccataggaaaacctacagatatggggacttgtacacacacttcctggtgcgtccgtccacacagactgctcctttgtccttagatacaagtaaccatgggaacaacaaactataggtgattctgccagcttcattagaagctggaaacacagagtgtggcctccagggtttgggtcagggatgctttgtccccatgatgtcatctaaggagcccatccttaggtggagatgaggggtggggagttaagggggagggtcagtctccacacatcctcctggaagcttgtgcctggacctcggaggctaatcacacagaggggccacctgcaggagcccctgcctctcctctggcgtggctctccagtgttttgtttggttgctgggtggaagccttgcagaaagctgcagtgcacatttgtggttagagcggagcgtcttgtgggaagccgcgactggcagctggaaacggtgcccctgtcagcacgcaccctggcttgctgagcctttgcggctctttaaataaaaagggtggagagaaaatgaacaagagaaaaacagccatggtcacattttctaggcttgctaatatgtgtatgataaggccaatgatttaaaagggaaaaacaatcctttaatgacaggttcttccggacctggatcctggacagagagggcattgtgtttaagaactggaggaagaaatcagaaatgaatctaagcaatgggattgcttttctttggacccaaatggtattatttcttctggagaaattgtgagatcagagcctggacttctcccatgttcctctctaactcatgccacctccttgaggttaccatgaaaagtgttgattttaagatcctcagatgcctttctcaatccgagaaccccccgggtgggcatgtcgcagcggcccctgtgatctttctcctgccctaacagatgctgcacgtaaacctggacaagtggaggtttcccacagttcctggtttccatttacagttattagcaccgtgcagacttatcttcctggctttatagcataatggcctgcagatgtcagtggataacttaagcctgcatcgccaccccccaaatggaccacccctcgctctcccccactcccagccacagtatacccaagaaaggagaacccacagcaagatgcttccaatgttcttggcctccagagccgagatgtgcagcttcaaagcgtgggttttactcagatacacacacatttgtttagacaaagccatgtgggatgtgtggctgagccctgttaacaggcagtgtttttgcagtactgcctacagggcttcgagctgtcctttgatgctcacacatttccggccggatgccttaacagaagatggcaagccaccgtcttagatcatctctgggacagttccttgtagttatcagctgctgagggcaggggatagcctctcttcagcagagcccgtggacacgcccccagccccaccagggcttccccacagaatgactcaataagcatagagaaagaaaggcagagtgagccaaagctaccattcacattcctgttgttcagttccattcaaagacaccaaacttcttgagccagaaagtctcattttctgagatctgatcaattccactctttttttctgtccacggtggcctacttagctttttgtctccgtgattaaaaaaaaaaaaaaaaaaaaaagaccaaaacccgcgaggaaagggttgacttccgtttacagattataatccaccacagagagaaatcaaggcaggggcttgaagtagaaaccatggaaagatcactgcttatcagcctgctcactctgacttgcttggccagcttcctcagacagacaaggcccacctactggggatggccccgcccacagtgggctggcccctcctacattagaaaatgacacatagtcgcgcctataggtcaatctaatgaaggcaattcttcggttgatgttctctctttcccatgactgtagatttgtatcaagttgatacccgaagcaaactattgtgtagtgaagcccacggcagaaccgcgactgggggggggtctggcagtgtgacactgtattcttttgggtttttatttattttttaaaatttatttattttttatttttttattgggcatttatttcatttacatttccaatgctatcccaaaagtcccccacacgctcccccacccactcccacttcttggccctggcattcccctgtactggtgttcttttgttaaaagtatctttttactttctagttatgtgcatttgtgtatgttggggtgggggcctgtgcagtgaatgcagtcactgaggaagcagaagagggtactggttcaccctgaactggaatcgcaggcagttgcacccaaatgtgggtgctgggaaccaaactcggagccccggggaagaacactgtgctctaaccattggacaacccctccagccctgtattctttattaaaatgtgcatacggacgtgtgtgtgtgtgtgtgtgtgtgtgtatgtgtgtgtgtgtgtgtaatgaagctagaggacaattctagaggacaatttcaggcatcatcctcggctgcactgtccacaacctttgactcagggtctctaatagacctggggtctactgattaggaaggaggatgcccttgtcccctgaatccccccactaggattgcaagcacatcctaccatgcctgactttttatgtcgatgctggagccagatctcaggttcttgtgcttgcaagtcaagtgttttaccaggtgccccagacccaacaaatattcctgaacaaggctgtctgtcacgatgaagctaatggtgtataatatgtgacctggtagaggagtaatggatgtgacccgtgggttaaggtctttcagaagtggccgactccctccctgtactttctaggaggctcagcaccatgcagttctagatttaccaggtccaacagctgagccattgctataaagctcagaagtccatagacctcctagttggctgcctggagggtaagtttccacacaggtgtctttccagctggatacagtagtgacctgtccatcttaggagaggcaaatgcagtagttagtacctaactaagtaacaggagggaaggatgctcccgcatctcagccagttgtatctgggtcaaagcaaaggagacaagagagatggctcagtaaagtgcttgcctgccttgtaattccagcattagcgaagcaggttcagttggattgctgggcatgttggtcagtcagactagaccacttggtaagcttcataccattgagagacccagcctttatttgtcttgaacgtgtcaaaatcatagatgagccagcaagatggttcagtaggtacagacatttgctgccaagcccgacaacctacagttagttcccgggaccctcaaggagagaactggttctttgaggtcatcttctgtcctccgcatgtgtactgcagcctaggcaagccatgcacgcaaataaacaaatggaaaaaaaaataatgtctttaaaatcaaggcttaatagacattttgttggcaccaaacccaggcaaatttttaaatgaggacttctggctaaggcaagcaagaataaggaagtgtgtgatcttcaagtatctactatagaccttatggccaaatttacctatggttcctttcaacagcttcagacccagggccctgagggagctgggttccagcagtcccagtcctcactgcccccctgtgactccgagtttctattgtctgtttcagaagctgtctgggaggaggctaaacccgaccctgcggatgtttgggcagtccatatcagggggcattgatatggatggaaatggctatcctggtaagctgtttttctcaaaaccatgccagataaaagaagataggtgtgtgagataagataggttttcagtttagttagcagttgttctcacagctgaatgggagcttttgcctggtggcttcagctgccgtaagaaaatcctttatacaaagtcttgctaagaaaacccaaatccttggcaaaagatctgctttcaaatcactaaaaagcaatccacccaacacagattacagtaaactatatattcaaataaaatcatatctgctgttgcttaatgattaaagcttaatcattgtttaatgatatatttatatataatagtatgtgctagtaactacagaaaaatatacataaacaagatgaagttaatcttcatgacgtgtagtccaagatagccaacattttatcattttaatgtataactaatataaaagttattaatgagttaatttttaaaaattaggtcttttaaaatctgctatggattttacatatccagccctgtttccaggcctccgtacccacatgtggttggctgccacttaagacaatgtggctgtaattcttacaaagacattacacagccagacagcagcagtaggaagggctccctgaccacaaggctgggcctttgtcactgtggccctgaaccaaaggacagctggggctgctttccacaaggttctgagtctgaattcttgttctcagatgtcaccatcggagccttcctgtccgacagcgtggttctcctcaggtgagatgtctggctcttgctcgaagggccatgttcttcatgagtaacagccggagctttgttggggaggcctgggacagatcctatcagttggctctttcttttgtcttactccttgcaggctgaagggtctgtgcacacacaggaatgctccctttattctcggtcagtctttaccaccgagttccagagtgtgggcagggagctgagacctttctggggcctcttgacagggtttcgggtgatccaagagttgtttgcctttggtcatgaccacccccctttgttgacataaatacaaacattcttgttttttataagtaccagacactcaaagctctgggaaccctgtccagcctcggcttctatctttataaccaggatcgtcactcagttagtccttaatggcagggaccagggacctcctgtcactagcgcagcagaggtgagagacatgcacttgggcccaggacttgctaaagcctactgagcaccatctctacccgtgtatcatcttcagtatctcggcctctgtgagtcagaggaagcagaattttactttggagtgggagccaacggttttgttaataactcgatggcagaatgttctaaaataaactgctatggtcttccagctggaaaggatccagagcccatgtagccctccactacagatgctttgaatttagctctgccttctccatgcctcctcggagggacacgctctcctcttaaatgacataccccacaggaaagaaccagctgaccgctagaccgttctaaactttgaattgcccatgtgccagcaaaaataaccttgaagtcgggtatgacgtggagggcaggtggtgtgagttcaagccctacctctgtccttctaggtggagcctcttgggcaagccctttgacctctctgttccagggttttcctctgccaaagacaataacaggagtatttcccacaagctgtgggttgataacatgtaactgttagacacagcctggtatagagaaaagctggtcttgggtgggtatggttggtttgactttctgacattctgctttctggttttgtgtcatctacacagaagccctgcagtttcgaagagaacagtgcattccccagatgccaaagtcaaacctccctggttccttaaattatcaccctcatgactcggtttccactctttcctccctattctctggcatggccttcctcttgggcatggtggctctcctcttaggcatggtggctttcctcttggtcatggtggctttcctcttaggcatggtggctttcctcttaggcatggtggctttcctcttaggcaaggccacagtgaagagctgtgaagtgaagagctgggggagcctcagtggcaccctgtgaggcgtgtattcccctcacaatgacctgacagctccttgtggttctcagggtccctcttagaggaaacatgtcccctggattcttaggaagcagtcttgatacccagagcacttatttgtttttgtggtttgtttctgttgttgtttgtttttgttttacaaggcactgtttctctgtgtagctctggctgtcctggaactcactctgtagaccaggctgaccttgaactcacagagtccacagcctctgatttccaagtgcagggattaaaggcattgtttgtctcttaggctttatcattttttaaaattgaaaataaattctttttcctacaatatatcctgatcactgtttctgctccctcatctccttccagagcctccccacctccccatccatccaaccccaggccttctttctcttcctttccttagaaaacagagaaatcaaaacaaaacaaaagaaaaagaaaacatacccagtgtttaggagaaagagaaaaaccacaagaagcacacacaaatccgtaaaacccacagaatcgggaaccataacagataagcaaaagattaaaaagaacaaaaagctcaaagtgttatgagagaaaaaaaaatctctgaaaagcctgttgagttgattttgcgttgtcatctactgcgggcacgtggcctgcccctacgggtttatatactctcggagactccattggagaaaactgagttttcctatgcaaggagtgggatagcttctgagttagggtgggagatgaagctcgcttccccgctcagtgctgggacctcatctttattcccctgtgagctctgaatccaacgaagtttctgttcatctctctgccccatgagtacagatgttaagtgagttgccctcactgtggatgggagacctcagactccagcatggagcagaaggtggagtctggtgaggtggaatgccaggaagactgcacatgggtgagggagtgaggaccccacccctggacaacaatgagcccaagtgagcttcagaggaggatgggggtgccgccatcgcaggagtccatgccctcctcccccgctctccccacttatatacactgctctgttagcatgaaactgtgtgtgtatttgatgctagagactggacagagaacagggtggcaggcagtcctggttctggatctttgatcctagccagtgagccataaacaagtagatgatgatgcaggtaaccatgacgagtgcctccctcgcaccaggtactacatgagcgttttatgtacagtcctgtgcctagccagccataggcatgcactcagagggatgcttcagtaggtgatttcatcatggctgagtttcacagtatgtacttacagtaagctaacgcagctatgtggtgccatctatgggactgccatcatgcgtgcaatctgtcttcaccgctgtgcagtgcacgactatattcattgtgtgttctctttctttcttggattgtaatttgtatacagcaaaacgtagcagtttgggcatacggttcaatgagctctgactggtgtggatacccaagcaaattacaccaccatcaagacaaagtacatttctgccaccttgcacctttccgtatgctgttaaaagttaattcttattgttattgtgttggagaggctcacattaggacagcgttgtggaatgggttctgtccttctagctttatgtgggttctgagaagcaaactcatgacaagtgctttatctaccggtcttcctatgttctaatagcatctttctcccaataggcatctaccattgtggtttctgtcaccacaggtcactttcacctattccagaattccacataagtgaggttacaccgtatgcattctaatttctgagctctttcactcaacttgatgtttctgagatcttgtactcacagcgtgaactgacctctagccctctaaccagctccatggcgtgtgtactgctaataacctgctttatgggtggagaactaggggctttgcggtggtgagcttggttgtcagcttgacacacctgggaagaaagagaaccagtggaagaattgcttccatctggttggcctgtgagaagttttcctgattgctaattgatatgggagggcctggtccactgtgggcggtgtcatccctaaggcaggtgggtctgtctggtctgaacgtgaaagctagctgggcaagccagggggagaagctgatgaacagtgagccttgatggtttctacttcaagctcctgctttagctctccttgacattgggccataaattggaagctgaaataaacccctttctcctcctgttgcttttggtcatggtgtttatcgcagcaacaggaaagcaaattaagacaagctttgtagaaaattccagattctgataagggccggtaggaaaacacaacagggccacatggtcagaggcaacggtggtgtcacattcagccgaaaggaccaggtgggcatgtcctggcagaggtgatacccaaggtcagtgattgtattggctgatgcagcttttgggtattgtgtggcaggggcacacagctgtggttgagggaaggagactgggtgagagtgagagtggctattcctgaaggtgggttgcagatccacagatggttcagggacagtgcttcggggaagttagatttggagtttcttctgatttggggtgagccaagcaaagaggaatgtgtgtgtgtgcatgcctgcagagagcttctgggctcgctgcagttgcaggcgctgagggatgcacttgggatttggggaagctttgagctgtggctcagagagaatctgactgagcgtcttcatctgtgtggacgcagatgagcttcttggacagaggaaggcccggggctggttttataactaacctttccctgccccttccctgccaggagcacaagaacaccaccccatgagaactgtgccctagccacttttattatttgtctggaagtacaatgtgaagatttgatgtctctgccattgtaaagcactctagttacctgcttctttgaagtcttaaaagcacccctggctctgtcctcaggtgccccctctctgcctctgttatctctggggctggtgagtggcagatagggttcaccctaggagatggagcagctccgccctcaggaagtttgcacagggggcggggggggggggcacggtgttggtgctgtgttctggtgataggagcctactgccatgccaccaaagagcaaaggaaatgaccagagaggcttacgaaagattgttctcctcatccaaaaacaacacttgaagtggaaacaaaaaacccgagagacctgatgtaacagatgttggaaggagatgggcccaggagggctttgcccaccctttctttcaaaggaccctccctgctttgcaaggtttgcaaggtggcttgttgacattacacttggctcttcctcccagccccatgctctcagaaataagactcagactcaaaatatgtttacaacaccttgcccacatatctaggctcttcttgaactagaattaaaacaggataacccatttcttttaatcttcattttgtcacgtggctagttccctgtgctcaggtactatgcgtccagctcacatcttccagtgccttgctctttcccaaaatcctttctgccttccggatgtcccaccttccatttcctgcctaagccataggctataggctttttaatcgacaagtaatgcatccatacaatatgcaggatattctctctaaagtagttctggactgctccttctgtctcctgctcatcatgccatcatgttcagctgagctctctggaaagggaccttgccttctttctgacccgtggataaagggatggactctgtctggcctttcatcttcttttccaaagcctagcagtcaggagttgccagggtgtttctgtagaaaggagcctagctctctctctctgaagctttggatacttttctgtgctcccctgcccagaaatgggcttcagacttgtgggtgaggtttagaaagaaacagtagctatttttcttagtaatgcagcaggcagagataagtcatagggctgaggccacatatgtgtgcctgcactcgaacgaacacacacccacatacacacgagagagagagagagagagagagagagagagagagagagagggagagggagagggagagagagagagagagagagggagggagagagagggagagagagaaggagggatggagggagggatggagggaggggtggagggagggatggagggagggagggggagagagagagagagaaacacacagtagggaggcttcgcagccagcaggcttttatacagcattcctcagcttctttgttgcctacttcttattgctatgacaaaagcttggataaaaagcctaatgagtcaaggaaggaaaggtttgttttgacttgtaggttaagggtacagtccctttggagtcatggaggcaggggcatgaggcagggggtcacactgcatcatagttaggatgcagagggagccaaatgctgctacttggctccgtttctcctttttacccagcccaagacccccagcccatgggccacactttccccatgcagggtaggtcttcctacctcacttaacctgatctagaaatccgttctcgtgatgactccagaccctgtcaggttgacaaagttaatcaggacatcaattgtataccaatgagagtgtggtgatctactttatcagtagttctagcatcttcaggaagaaagaagaacatggagaggccaggatgttggtttctttcaggccttagtgctgcctgacttccttttgtcccatagccagatttgttcagagtcccccagttcactgcccggtcacagctgcccttccttctctgcaatggcggctacagcagggtcccctcatgccctccatcttctcagtgccttatgtggccaagttttcctttaatgttctctcatcctggagttggttggtcctctgttccctctgtcctgtcaccccagtgcatgttggttgatccttacatctttcccatgctcttggtgccccttaatctcgtgtcactccagatgcataaggccaggactcctgagaggtgaaaggttgggaggggagaaggtcaagccacagcttaggtgacacctccttgagcagatgtttatgatgggaaggagatgcctgcttctgtctcagcttttgtcttgatgccccaggggagtccagggatgctggccatccatcaggcactgggcgggtggtcatgtcagagagagggctgtgtttattgcatttcattttgtcctaaggccagacaggccttgaaatgttcggctggtaccagctgggactccattaatcaattcattttagagcataaccaatgcgttgatagacataaatgaaagaggatatttgaccaagtggatgagatagaagtttgccaagttctaactcacttagataaaaagggagaagcgactcagtgtatacccagtgttctccatctccctgtctatctctgtctctgtctctctcttccctgccacctgcttcctttggcttcgtaatgccggtacccaggctggcctggaactctgggaattccttctgagtcagttactgggattctggggttccagggtaagctgtcacagccagctctgtgtctagtctctgagtcccagtttatgttgtagaaacttctcgacagtgtctccccaacaagatggaaagcggaacttcttgggtgaaattttaaataatcgcccagcatctggtggctgatttatggcctcagccagctgtgtttcattaacaactaacttgcctttgttaccgggaagcaaaccattagtattttagggaatgtgctacttttaaaaccagaaaaaatacttacagagagcacactggcctttctctcttggggcatttcattctttaattaaatgctggctgaaggcccgggatctattctgcctgtgtagttcatgtttggttcgggaagctgctacttaacacaggttcccctccccctccttgtcctgcagggccagaccggtcatcacggtggatgtctccatcttcctgccaggctccatcaacatcacagcacctcagtgtcacgatggacaacagcctgtgaactgcctgaatgtcaccgtgtgcttccggttccatggcaagaatgtaccaggagaaatcggtaatgagtcacagtgtcgggactcgccagtcttagctgatgcgaggtgacaacccgggggatgctccaagttccctctcactttgagtcccagtgggctttgcaggcagggggtcttgtggactggatactcttcctctgcggctctgccttcctcttccctgctcatttacgtgtttcaagtttcacacacccttcagctctaggacaagaacctcttcctgcattctctccccaaatacatgaggaccagacgggaactcaccgggcggggcagagtgtgggctgctgagatggagtgcctgagcatcctctgcatgcaacactccatgcattgacataaggagatgataggaatctggaggccgcccactaagcttgcaccatcaactaggtacccgacacacagctgactttgggatctggaggtgaaggtttccaggactcaggtttttaagagtgtggtgttactctggcatctcagagagtttgggaaaagctcatattcagttagacattctcggacagtccagggagatggtgctgcacatggggttgggccctcccaaaatcaaccatcaatcaagaacactctctattagatatgaccacaaggcaaaatgaggtacatgcctcagttgagattccctctgatgatgagaggcagtgtcaactggagagctgtagctaattatggccacttccgtgtgaggtttgtgtgcaatctgagtgtgaaaagcactactctggagttcgtacttatgcacaacccccaaacctgcaaagcacacccacacgtgtagttccctcagctggacttaggacattccatccgttacatcaacatgctgatcagttgttagcaaacatttcacaggatgctgtaagcaattattatgttggaacggggaagggatggggagttgccaaacccaggccctcttgcccgataaatacatgcctatactcccaaacccctgaatcttaattttgttacacataaaagggatattttagagctctagaagatatgcaagcaatagttcacactgattctcattcaataaccatttactcaaatctacctgcgccctacaccaggaacagttccgagctgcaggcctgtggggagttctcgttgctctgttcctgatgtggtggtggacaccacttttatagttatgatttcggttctgtagaacattaaaatgagtggcatttgggagagcggagaaaccgagaagtgagtttaagggcaagaaggctcagagcgtgagactccagggctgagtgaggagatggggtggagcccctatgctttctcaaccggtgaccctttccggggccacagtcacacaacagcttttcacagaccactagggtctgagcttgaccatggtccttaaagtattgaaaggttgtggaaaggcaggctgaggagccacctgggcagtggtcagtggtgggtgtttgacccctgtgcattctccattcaggtcacttccctagcctctgtcacatgagtcactgaagacaaatgtccctttgtactctgcggctctctaggaatctttgccattagcaaccaggttggggcttgagttatagctgagtcttaaagaaagtgcttaacatgtgtgagacccagaattcaacccccagaagcacatgtatgtgcacacatggaagaactaagattcacgtgtggacgatattgaaattgatagggcagtaaggagaagtcccctcacttgtttttgtaagatgctgccctccggggacaaccaccatcacttcatctgaatagcaggaactactcaaggcccctgagatgaggttgttgtctgttccctcatagaaggaagaagagggaagtcactggactcacctgagactccagccatttgcgtccatacctcttagccatttgtatgtcattctgccctaattgcgcttggcctcacagtctctggcacgctggagtggccgtgggaggtcactggagaggtgaggaccatgcagctgtggggaagttgtcatctatgctggggtgacactttccagagtggctgttctgggatcacccacactcctgcaagaaccattctttcatgctctgtaagttagcccaacaatcctcctggttccctgttgggaattggttctctccccaagctggactttaggggatcatagtttgttctggactttgcttggcccttgaacccctctagaaaaggggtaggctttcatttacatccctttagggaatgaattcccaaactatcatctcattttcttctgtcattttcatgaaaatgagggacatctcaatcagaaatggagaatgagctggctgtggagcagagagtttagagagaaaaatggatggctgttctggaaatgtggtcatcagtgggggaggtagcttattggagctgtgtaagccagggctgatgtggctatcccccatggtcagcaaggagactcttggttccacagagctaggaagacggtgtccccagtctccagatacaggaaggacaggcacctccaggacaaatggtcctccacccagggtcatctcctaggcctctgcattcagaaggcagagctgggggctctgtattccttcctacttctttttggcggtggacccctagctgtcccgggtgttgtctgtggactgcctggtgatgcctgtctggaaaggtcttctggacactcggcatgtctgtattctgggctgtttaccagcagatggctgcatatgggcagccccacctgggcacctgaattacaaccaagggtggggtcttctgtggcatcagtctggtgggtcttcagtcacatgacctgtttggaggatgactttgggagccagagaagctgtcttgtcccttgggcttctgcatcttgtccttggaacctatcgggcttggccaagtacacgtctcttcaatcttgcttcagcaatgggaaatctcaactctcatttggtcacagcagtgtcaagttcagcctgtagaggggcaatggtgacttctgggaatactgtgagaaatgggatgtccataaggggtgaatttgccttggccactgtaataagcaaaatccagtgaggaaacagattgccgcagtatacattgtaagagggtttgactcttcttggaagggactgagcaggccggagaggaagcagtggtaactgcagaggagagctgccatggctgagtccaagccagtagctgtccagctagctgctcagatcagctgcatgacatctcctgcgggcttctggttagccatgtacacacaaactgaaagagaatttcaggtagaagacagtgacctgtgctttaccaagcttctgggtggcctgtcaaggttacactcagttaactccttccttggggttatcagaacctgagagtttgtggaagggactctgtgcaactccaacccaattctttaagcagagagcactgggtggaactacatacccctctgagaaagtatgatgagggctctgggccatggagaagaaactaagaagttgaattatggctgttggggccagctgccatgaaaaaaaaagttgttggttaagcggatgaataagcatggaggagaaaggccttcttacccctccagccttgcaggctccctgtctctctctctccctcttgttattggcagaacctcacagggagctgttggcaaaacaggtttgtgggatcccaaccctagaagcacagcagagtggatggtgggcttggaactgagaaccaagggcttcataaaccagcagagaagcatctcggttcatgggggatctgaagtatgaaggccacgttcctactccagagagccttggctctcagaggccgttctccgtgctcaccctggactctggaagcatggaggtgggaagatgaacctcatctgtgttattttgggctcttggatcagcaaagcgtgatgaagctctgccagacgctgtgctcagccctgggcacagagcacaggctcacattctagcgggaggggtctcctcacttgcccttctagacacgtgccaagtggcatgccggctggcttcccactctggcagcaggcagcctcacgaacaggtttatcccatgtttcactaagcaattgcaaacaagagttcggctcattccaaagagtattctcggatgcttcatccttggctgcctgtggcttcctagagcctcctgacagccacaaagagaattgatttctgtaaccaagagcgatttgctccttacccataggctatgtctctagttagaccatagggttgtcttggtggtcacaggcttgccctagcatcagatgaaaacttgcaagggctgagtcccatgacattgctttttccacctgctagttcaggggttgaatccagggtctcaagcatgctacgaaaaccctcgaccacagggctgtgtgcccagcctgtcttttgctctctgatccttcacatctccctggcttacagacaacctgacaaagctttccattgagcagaggccctatcactgcctgcagacaagctgtcgatcccagcgtccgaggatggccctcaggtcatccaaaggcatagcagaaatatagtcggaagcagatacctggtacccgcaaaccctttttttctgacgttagaggtggtgtatctgctctggagagctttttttgcatgaagagaattttcccaaagcttctggtcccctgaagtgtaggaatgggaaacggagagccttgtccacggaaggaacggagttacctaaaaaactaattgcttgctgctcaagtaaatatcgcattctttggaagaagagagagagggttaagaaaagccagcaaggtggaaatgtctctttccctcctctcctgggatgcgctgagggaaatgagtaaggctggaagtcaactttcagagctgaaaccttgttctgatggagatttgggaatgatttggtgttggctgggacagaccagagccccagttgattcaagacagctggtgctctcccggccccagcccatgtggggggcctttgggaaccagctctggggcagggaggggaggggcatgactggggacggtcagcttttccaccacatgacatcattcgacatggcatagacacaaactgccagaaggaagaacttgatgtgtcatgtgctgtgagaaccggagctaaccagaaccagcatcctcccgggcaggggctttgagggctggcttgcattagggggttgctactcagacaccaccctacctcaagcgagctgattggctccagcctagcatgtgtggggcacttgagtgggagctatttaaaggtcccgctggagcagagggcttcacagtcgaccgtttcttcttacttctggcagctcccagactctcctcactcaggagtttcttcatggtgaatcttgtttgtttctagaagggagagtcagatgaagaatcaacctatatagacttaaaatgtcaagataaattccatacctcgtaggaggcagcgctagagaggaaatgattacctttggcgggtggataaccaggtctgtctgggatcagacacttgaacactggggataaagctactaggttaaagggttggcacctgaatgccccactcagagcagagctggtgtctcatctatggctctgttgtttgaactgcagcctcctacccttccatgagcctccagaatcttcactcgtgactgcagtgatactttgagcagtaggcgcttgcaaaatacccagcgcggcgtagcaagccaaagtcattcccctattctgacttgccctgggttaatttaaaaatctcccacaatagactcccaagacaagggtctcagggcacaccttggcagagggatgagcccgggcagtaccagcctgtaaatgtgacagaatattggcataagcaggattctccagaggaacaggccagggagattggaaacgggaagaataagagtatcagggggtgtggggcgagctgatgggttttaagggatttgctcataggacaataggactgacaagcctgaattctgaactaggcaaagatgcgggctgagctgaagctttggtttagatctgtagacaggctcgatgcagaattccttattggggtacagaaagaacttaggggttttcttctcaagattttcaactactgcagcccacccacattgtggaatttgttttgcttcattcaaagtttaataatttaactgtcaaactcatttcaaaagacccttacagaggtgtgtagttcagtgcttgacgggttaccgaggtccaaccaaattggcacataaattagccattctagcaaaccaaacagggcctgtatgactaagcatgtcaccactgtgggtccattaaactcagtcctgctgggcatctcatgcctcagtgtgaggcaccctaaggggaaagaaaacactgtctacctactgggtgctgcttggagtcctggcttctaccatgaactggaaaagtaccttcgtggagacagagagattggaaaaggccaagaggatgtgtgttggagtccacagcttctgccctgacttcctgtcttcctgtcttccttccattctctctgagctcatctggctggatcaccagggtctgctgtccctcccagtttccttttcctggggggcatgaacaaccctcacttgtcagccaagaggatggctggacaagggctgttaaaaccatgtggctctagccacagcctctgacttgtcccagcagtgggcattctccagatgtgatcttgctacatagcatcctgaaactcgcttcatttaaacataacctttcatactgtggggttgttggtgcctgaaatcaatggtagattgcctcagagtttggctctggacctcagtctgtgcttggttctgccacttctgcattcagagagtaagaggtttcaggtcaggtgagactgaaaaattaagttctcagactgtgtggtaggagtagccagactagatctggagaggtcttgattctactgaatggcagatggctcttgggctgggctgagtatttccatttggaagcctcgggtccctttgtctcaaaaatggaggttttgtatgagttgacccagagaatttcttcaagaccttggcagtctatacacacacactccacttgtagcatctgcttctaccccgtgctttctctacaaaagcactttccctagatgcccttttcttaatagtagaactatctcctgggatgacccatgtcctgggtccctcctggtgacccagcatcaccttagaatccagctgtttgttgggatatgcaagttgggggcatcatagccttcagtgactaggaatctgccatctgggcatgatggggagccatgatatggcaggggcccagggaaaccattagatacagcaaaagtatgccgagacgtagctaaggacaactgacaaatcacctttctctctccctgttcagacttccccggtctcgtgtctctttgatgttgcttaaggacacagtcattcctgtgagttgggctcaccatacttaaatactggccaggcactggctttcagtggctcagcttctgacagatgggtgtgtggagatggcttggggaggggcctcttgtttgcctccccactggtcagctatctcatctggtcatgttagaggcagacattgttgtttgtctactataaaaactatacttcctggagctagaaaaatggctcagtgattggagtctctggaggacccaagtttggttcccagtacccaagctgggcagctcagccagctggacctcccgttccaggagatctgatgtctcttgtagcaccttagagcacttgctcccatgtaacatgcaatcacatacacactcgtaatatatagtttttaaaagccttaaaaaatacaataacctcagaacccacaagagttaagaaatagaatggcttagagaggggctggcccctgccgcagagaacagggctgtagatctgctgatgcaggagtccagttacctagtaaaacttacagctggctgtttacttatagactcaaagtgatggaggcaaggtgttctgggtttacctggcatgaatttagcatcatagcctcagtcctttttatattctattctgtgtgcaggccactctgctgtctggcactgtcctcacaggtataggggctgagttttcagaagaaaaccaccatgtaggagccactatggccaaagtcttgctagaaggatgggcacactgagagtaaagccatcctcagcctgtatcagtttggggctccgtgatagtcgacttttctttttgtctgtgtgtcgactgatacctcgtcccaccacgggtagctcacagtcagagaaggtctggcatttgtaagagatatgggaattattgcaagcagttgttccctgtatcacatatagtcgaacagaagtcattttcatgatgttagtcccttctagttacgtttgacagacttgctgtgatgctggcccgtcagaacagcaccctacacgtgataaaagtaatccctgaatatatccaaattggtggttctgttggcatctcacaaaggcatgaggtttgaacaaggatgaaccttaagtctgatgagcacagaatcctggatcttccataggctgactacaggcttctgagaaggtcttgatgtgggctgccaggcagtttcctatactgtgtgaactgtgcatagggtctccacagaactgtggggctcagagtctcaacactctatgtccatctttgctaacatctttgactcttatttactgtcaggtctgaactacaatctgacggctgatgtggcacagaaggagaagggccagctgcccagagtctattttgtgttgtttggagagacggcagggcaggtctcagaaaggctgcagctgtcccacatggacgaagtgtgtcatcactacgtggcccacgtcaaggtcagtctcctcttctttttaaccctccgattccgagcagcatgagctacttttgtttcattatgtagcctcggacttccaccattctacttcacaacatgcattttgccttttgaagttaaaagctgacagccatcttatttatgtttaattccgtttggaaacactgttgcgttgtggaggggtgcacacctgccctggtgtgtatgtgaaggtcaaaaaacacgtccgcggcataggttctatcctctgcctttaagcagttgggaatattgacctcagctggtgtgcgaggggagtgctacccacggagtcattgcactggtccctttgcttactgtgctggcctcagcctccgagaaggggtagaggatggcaggagagcagtgacagtctctgactgtgcctcgttctcttgggaggttttcatcctctccaaggcttggcagtcactgggaggaacaactcagaagctgtgtgctgggtcttcagttgcgtcattctggatgcccatctttgtggtccactgcacgatgtagtaactcacggtcagagatgcatttgaagactggttggggctcacttctcttactttctatttatcttaggagtgcatttgggggggtctcttcccttcctccaaataaactcctaaaatgtttttctcttcttgagattatttgctgggtatattttcatgtaattcaggaagccaggctttggtgatagagaggccctgcagaatggtcagccactgacccacagacagagacagagaacaaaggtggacagatccacggcgtgggcagttggtgtaatgcctgtgggtatagggttgaatctcacagagccggtgtggatcagttgtgtgagcactgtgtgagcctctgactctctaaaacacgtgcaacagtcgctctgacagtcatcattagcatcagcagcccccagagcagagtagcaatcccagcacttggtaggaaagggcagaagaccatgagctcaaattctacccaggctacttagagagttgcagcttagtctcggcttatatggtcagaccctgcctcaaaccaaaccaaaagataaacattgcatagtgagtataaaaactttgcatggagtctgatgaagctctcagggttattagtctttggttgggacatacatagtttccaatattctacttacacaaacaccaattttgtttagtttaacataatattattagccatagccgtctagcagatggaaatctgtagattgaagtatcttcccgttgttgcctcgttggggtcatagtcagatagtaacagctgcatctaggctgtgtgtagagaactgcttccatgtctggcctggagcccatgagttcatagcctgagatactttgctatggggctgggctctgccttctgccagacagactcatgtcagggcctgcccaggccagctgcccttgcctggcgctgctggccacttataaagccacccgtgctcttgctaagcctaccctgcccttcttgagcttagattcctttggtttgtgagtgagggtgtggactgctcaggagaggcctgtgtgcaaacctcaaggtgtatcaaatggctctgtgtggcacttgctagggagtggggcttccttgtgctaagttggcaccacaaatcttttcctttgaggctctttgcaacttcttgctttggctgaaaatgtcatagcaggtggttcatacccactagaagtcaccactgcagagaacctgctaagtactcttggctaagtgcattcaggaacagcaatggcgaagaacaggctggggcggagctatctctgtgatggtctgaggaaggctgccccaaaggttgctctggccccttctgttctaagcacttaccagctataacagtcaaaacacaaaacttcccattgaatttggattttagataaacggttaatatgtgtgcaatgtccctctttcttagtggcttctctttctgaggtatcagtcactataggtctctgaggtccagtggcatatatggaaaaataatctaaaaataataaatgttaaggtaaataccttttacctcaggatatggtagtttcatttttaaaacagttatttctttgtctaatttatgaactttatcgtaagtattatataatgattgatattatttgcagtttcatatagccgcggaatttctaggaacatatccctgtgcataagggggcttggcattacccaaatacttccagaccatagtctggttgttctcatgtggccacatgaggctgtggaatataccagagagagacgtcattccaagaaatgctcaaggcagtgactgagctgtctcctaccgttacttcctggaccctaacagaggacctgggcgaatgtggagtattgagtgggaggaagtgttgatgagctagctggctgtttccattgtggcacagctggcctaagacctcgcagccatagcccggtggcttacaggggttgtgggaaaacagctggggagactgtggcttatgtgagggttgagatggggcagcaggagtgggggaggggatgctgcagtgattgctttccatcctgggggcggggggggggcatagactggaatctgagagttagggctgaaggactgtgacacagtctctactgcacaggcctggcgctcggctcggcagacaagtcacggaagacaaatgcaaacgtcccgtcttatcacacgccatatggccagcagacaagccggcactggggccacgcgtgttttgtttaggctatctttaggcatttttctttctgtcgttaagcccgttcagtactctcttgttttcttttccgctctctccccctaagttttctctccatatatggtgatagtctccactgcagagactagcttggaccaatacctgcctcctgagttagctgtgtggtaccttgctctggtcctgaagggatctccggggagattccacttttgtggcaaaacacatcctcctcttggggcagtgctgaagcggttccagtggcttccttgattgcttcccagatgtcatagaccccacttatctcttccctttcccccaaaccagtctagctttggaggtagccccctcccctgctgtccaagtggtctggaggtgtcacaggtaaaacccagagcatgtcctcttggcttcagggctctctagcactcagccccagtttaccttttttttgccttctacttgcatgacacagatgctctgactcagctgccgtgccccttctctctgagctaccgggatccatgcttttccaccgcagcccttgggctcctgctgctgtctccagcccttcagtcatgttaggtccagctcttgtgtctgcttccagtcctgcacctcctgctttctctttgcattcttcctgccttaaggctccactcccttcatgcttgctttcataatttctctttaactcagatgactttgggtgcttttgtacaataagaggggcagtgcccttgtgtaaacagaaaaccaatcattgcccaactcagaaggcaactgggaaaaatgcaaaaaacccactgaagtcaggacactgttgtggaattctggtcagttcctagactccacagaggcgcctaccatcctgtgtgttgaaaagggaaattaccagactcagagagaattgaaaacattagggtaccccagtggtgtgctccccctgacaccaccagaaggatgaacagggagttgaccagggggtaactttttaaattgatggtccttttatagagccatgctgagtgtcattggcagcacatacatcagcccacattgcagcctttgtcatattctgagtaacatgactcttccctcctcatctgctgaatatatctgactgtccctgaggacacagtctcgccatgggccagccccagtcatggtcccaggccctaagtaacctccctcatgttcctgccttctggaaatggttccccaccagactcctgctttgggatagtcagctcagaataaatacctggtacatggaaccatgttggaatggctacctgtgctagctagcacctggatcacaaggagtttctcttacagagtggagctcgtatctctgagaaaccagtaaatggtgttaggagaaagtgggcaggagagcttgggacaggaacaaacatcccgtggctacttctatgataggtggtgtcacccagaccagcggtgactgctcctcatcaggcagtacccagggaagtgtgtcctgaaccttccattagatggagtgtgggacaggccagtgagcagccacagcagccatgctgagtgaaccatggggatgcaggaggtcccacacgtgaggcctgcccctcccttcctcctgtgagggtcagcaatgccctccagaagccctcagtgacccccgagggctgctgagaggcccagcaggtaaaagtgcttgctacagagcctgaggatctgagcttgatcgctcggctccacgtggtgaaaattcctacgttctgagctctgtcctctgacttccacgctttagccttggcatgtatatgtggtcttcacaggtgtcatgtgtgctatccctcagtcccaccccatctcacacacacaaatgtaaaaagaaaaaaaaacttttgttgaacagaactgagccactgatctgtccaagaaaagcccacaagaacagggctctaagcactttggccattctggaaagtcacagttctccttgaaatggctctagtatgtttcatggagggacttgcaagaggatttcaatcaagtttctgtggccctgcttgtaggaacagtacccctcctggcctggcagggtcttgcactggtcagtgctgtcctgggctgagatcgcaccatgggcttcgtctactcccattctacatcccataaagcacctgcgagccctcagctcagtcacatgcgtgagtctgcagaacagacatggagtaatgatcctcaggtttcagagcactcccatacacacatacacatatgcacacattcatatacacactcacacacacacacacacacacactctacacacacacacacatatatatacactacatacacatatatacatnnnnnnnnnnnnnnnnnnnnacacacatacacactcacatacacagaaggatgaacacattcgtatacacacacttaatacacttacactcacatatacacacacactctacacacacacacactctacacacacacatatatacacactacattcacatatatacatacatacaaacatatacatacacacatgcacatatacacatacacactcacacacacatacacacatacacatacacagagatgaacacattcgtatacacacacttaatacacttacactcacatacacacacacactctacacacacacacacactctacacacacacatatatatacatacacacatatatacatacatacaaacatatacatacatacatgcacatatacacatacacactcacacacacatacacactcacacatacacagagatgaacacattcatatacacacacttaatacacttacactcacatacacacacactctacacacacaggcacatatatgctcacactcacatacactcacatacactatactcataggacacacatatatactcacatgctgccactctcacacatgcacatacacccagacttatacacacactcatacacacttacttacacacagtcacacacacacacacattcacacacactcacgtacttgctaagaaggaaatagtgaaggaaagggcaaccagttgcaggggaagaactcttacatgagaaataagaggaaaaaaacagcaaaggtcccttctttttctggagaaataatagctcaaagccaaccatgttgattatgcaaagagatggctgaaaatatttaaagctgtacagtttggcagatttaagactgagagaaacatagagcattagaaacatagagggctttagagaaacatagttatgtttttgaaaaccattctaagaagcatagaagggaagaatgtctctcaaccccctctgccactgcagcaactgtttttagtttcttagggtgtccggcaagcacttgtttgtatatttagaaaactgtggtgcctcctggaaggtagtgagctacaatgcgctgtggaaaagctcccgtgcctcccactgcctggagcatggactttgggacttctgccgaatgatggagtgtaaagaacttggcaaagaatggaccactcctaacacgttagcacggagggcctccaggagcattgtgtgaagacgcctgatgcagcgggctacctgctatctgctcccatccgtgtggcattcgagacaagctcacttaatgagccaggaggtggatcaggggtttctggaggccaaggatttggagagaggtggcagttacgatactagcaccaaagacaaatgagactttctgggctgaggaacacattttaggtcatggctgtgtgagtaggtcctgttaccaaagctcattggcatgtagattgaagtgcagggttggcatatataaattacagtgcaaccaaatgtaattgattttgtcacatattaacagcacagtgatgtcggatttgccccactgtcattctgttggattccttcctcctcttccacttccatgtccacagtgagtcccttccattaaatatgtccccaagattccacgtagagaggggacccgtgacgcctgtcttgctgacacggcttatctcagtgcaatgattgctctcctctcctgacagttcccagtgttctgggaactgctttctgcagttgtaacaaaatactgaccgaaagcaacttaggaagggaaggacttatgtggcttacagggtttagtccatcactgagagaagtcagggaaggaagccagaggcgggaactgaagcagaagccatggagggtcgctgtctactgacttgcttcctgaggcttgctcaactgcctttctacctgcccaaggctggctccgcccacagtgggctgggccctgtcacatcaatcaataatcaaggaaacgcccccacagacacgcccacaggccagtttgctgaggcggatcctctgagattctccctttctgggtatgttgaagtttgagtctatggacaaaactgtgacaaaccacgctatttgagtttgctttgtttcgctcagtgcactctcaagctcttacctgctgacaccctctcccatccccattcattcatttttaaaagttttaaacttttgcttgtttttctttctttgttctgttttccgttctcgttttttgttttgagtccaagtctcaggtagcccaggatgccgtctatcccaccattagctgaggagcactttgaactcctagtcttcctgcctccacctctcaagagcagaaattgctgatgcatgtgtgtgtcataatgtttagctatttccttttattttggcaaacatttcttcttttggaagaagtcaaaatctggcagtcagccaggttccttgcgaggctctttagaatgtgacgaagtgtgtttgggggaacatgacgtctgttattacagaaattagcatcaagccgttggtagttaacctccctctggaaacgattcttaggaaaaaaaccccacaccatgccaggtggcagtcacgggagccctcacacaaactgcgcatctaggatgtgccagccgctgcccattacacaacttgtgatgtattcactgccattatcttcattatcttgtacaggaaataaggacctgaccagaacttctggctggcaaatagggccggtacccagaaactctcacttcttagccgtcatatggtggcacggctcatacagatgacggattcaaactaatgggctctctgctcctctcgtgtggaggaagctagagaaagttgaccacagctgtagaactagaacgaggcttcccatcgagtcccaggagcacctcttctgagcatgtgacatcagaggcagtggcttggaatgccctgccctctagagcagtgtttggcttctaatgtttagcagcagggtattggttgtggggagctaacgtgagtcctctgcttggcttcctggtgagatatttcactgtggctgattttaagcagccggatgacatcactaatgctggcttggaagatgcctgtagccgagaattattatgtagaggatctgatacttctaagcatcttcaggagcaagaaccgtgataaaacacagcaaagcgatcagggtgacttctcagcattgaaaccttcatcttagtgtgaagtttaactcgcaggtctattctatttaactcttactaacatatgtgatgagccccaacctgcagagctcttggaaatgtaatggtggggtcttgcaaaccgactgctgccagctcacaccactgactgtgtgtttgttagtaagtgggactgtcgtctgagtcacgctttacacgcagctgtttatcaaagtcattcacccttgtttcatttggctttggcaatgggtaggaatatgaatcgcagggtccgtgtaaccagcacaccacaggtacgtgtgtgtgtgtgtgtgtgtgtgtgtgtgttgggtttaaagaccatctgtattttggctaagtttattagactgtatcatattcatttttaaactttttttcttgaaacaccttgatcttactcctcacctattattctatgtgtaggggtgggggaagggccatcctgcagccttctgtgtgctaaagaaacatcaacggctgaacatcgagggactggagagggaactggggagctcctccgacccctcctcctaggtagagcttttgcatcttctgagactttgtctagctccacatggacttccacacctaccctgccatcacttatggctgagtccatggcgatggctcttatacatgttctaaggaagggacctctacatggaaactttactgctcaggataagaagaccagcatctcaagggcttaaacaggttgacttaaaataaaattctaacaatgtaaattcagattttttttttgttttttattttttgtttttttcgagacagggtttctctgtgtagccctggctgtcctggaactaactttgtagaccaggctggcctcgaactcagaaatctgcctgcctctgcctcccaagtgctgggattaaaggcgtgcgctaccaccacccggctcagattttttttttatgtctgtctatatggttaaagaaaattagttacttttagtaagtttattaaaattgagtcctcttttaaaaaaatatttgtttttattttatgtgtatgactgttttgcctgcataaactatgggcaccatgtgcctgtagtacctgcagaggccagaagaaggcactggatcctcagaagctggagttgtgagccattgtgtgggtgctaggaactaaactcaggtactctgcaagactcagcgagtcctcagccagtgctcttaactgctgagccatctccccaggtggttatatcctcatttctctgactttggggaaattcttcagactctttaacaaagaagtcatttttctcagaaagcatttgagtagtctgaggctatatgaaccgggggtttaaaaatagccatgaaaacacaggattaaaattaatttggaacaaatcaaacctttgagaaagagctgaaaacatgctcttcatcttctctcctcctcttcctcctctctccctctctcccccctccatgagcaccctccttctctcccccctccatgagcactctccctctctcccccctccatgagcactctccctctcccccccccatgagcacatagatgcatgcacatgtannnnnnnnnnnnnnnnnnnnnnnnnnnnnnnnnnnnnnnnnnnnnnnnnnnnnnnnnnnnnnnnnnnnnnnnnnnnnnnnnnnnnnnnnnnnnnnnnnnnnnnnnnnnnnnnnnnnnnnnnnnnnnnnnnnnnnnnnnnnnnnnnnnnnnnnnnnnnnnnnnnnnnnnnnnnnnnncatctacctgctaaccttcatcctacctggctttgcccctcctcccacctcaggcctctctagggaaagttgctgacagactgctgccctctccctacagacatcagacccagatattctctccactaaccatgcatatgtactgaaatcagaagactaaatgcacatgaccgttagctcaaacttttctagttgtccacatgtcctctgacgggggaacgtaatcctgtgtcccacggattgtcatgtcctctgacgggggaacgtaatcctgtgtcccacggattgtcatgtcctctgatgggggaatgtaatcctgtgtcccacggattgtcatgtcctctgatgggggaacgtaatcctgtgtcccacggattgtcatttcctctgatgggggaatgtaatcctgtgtcccatggattgtcatgttctcttggaatggttctttggctttgtcttctgtgtcatgatggtttggaagaggacaggccaactctttcatagaaggtctctctgtttggatttctctgcctgacagttagattcatggtatacatatgttgtagcaataccatgaacaattatgtcttatatatctagatacatacacagccagcatcacggaagaatagatttttactttgaattcagtgtggctttccaaagttgggttcctattgtcccagaagagggctgtcagcgtttgaaggaagcgattatgtatctctgctgcctggaccagaggcatgtattccaggtcctagaaaagtgataaattgattcctaagaaagagtttcagggcctgatgtctgttctcactgcaatctgagagttgaacatgatatcttcgaatttcatagagccataagctaggaattccacgcagctgctacggatcaagaccagactacaggagtgttagcacatcgagatgaattgtctgtcttctaggcaaagagaagttgctggtgttgtttctggggcaggaggatgttacttgattgacagtgctcaggaaatgaacattttatgcctactatgtgctgggctggtgggcttcagcttcattcataactgaaaggattctggctattgagggttacatctcagtggagggacagatgtgatacaataaaggtagtggggggaatgggggagtcagggtgaatgcagatcaagggtgcaaaggtcactgacaagacaagatttgaaccaacacttgtaggatctttgggagacagggagcccttcctgaaggcagtgctatgatggggcctgggttggggggggggtgtatttgaggcagaggagggaggccaggccaggagcaaagtgagaggaggaggtcagagtgcaggctgttggccaggactgtgtggagcctcagtcccaggaagcactgtgcctgtgtcctaagccacaaggggacctgtgggagggaatgagcagggtagtgacatggtgacatggtttagctcccatcctttaaggacacaaccggctgctgggttgaagtggatgacggatagaagcaagcctggtgagaagactgtgcagatgggctaaagaaagatggcagctccgcctgggatgacatcagccaggacggtgagatggactggaagacactgagagtggagtctgtggcatttcccctgtgctttagtagccgttaaaggtggcttcctgtgactgtagggatcgagnnnnnnnnnnnnnnnnnnnnnnnnnnnnnnnnnnnnnnnnnnnnnnnnnnnnnnnnnnnnnnnnnnnnnnnnnnnnnnnnnnnnnnnnnnnnnnnnnnnnnnnnnnnnnnnnnnnnnnnnnnnnnnnnnaggaggaaggaggagaggaggaaggagaaggggaggaaggggggagcaccgcgttgctgtgtgccgccctctgtccctgtgtaatttattatttccttcctacactttgctttgtttctcgccctctgagtgcaggtgggacttattttaagggtaaaatctgcactgttctttctgagcaagaatgggtttgaaaggctccgaagttcacagagactgccaacagtgtaaaaggctagagcagggcagggcaccaagggcagagtgcccctcccccacactcccgaggttgctgcagggttccagctacactatatgctttacatgtacggagaagaggtacggtcaaagggcgctgggagtctaacctgagaccctttaaagagccacatcttaaagaggcaggtgtgaaatgccagtttgggttgcatgtcttagaaactctactagcttcacagcccaaagaactcatcttaaagatggaaatgaccagtctgctggtaacttatgattactgatccccaaaacatggtgcagctcggggacaggatttttgctcttatttaattataattcatttaaattgcattctggtgtgaatcatggtacatgtgcgtgtgcacttgcacgcatgcacacctgggtcaaggaaaatttgtagatgtctattgtcccctaaaacatggttccaggtactgaactcgggttatcaagcctggcagcaaatgcccttagatgctgatccatcgtgccaggcccttagctcttgtggtggactgtacaggcattgaagcgtggttgttcgagaaggcaagatggacactggatagacagctcccagtctctgccacagcagaacgtggaggcatcaagggtgtcagtcacatcaatcaagcctcgggacaaggtggagagaaacaagcatgcccaggaattccgccgtccccctctgcactgggctgacggggcgtgagttttcagcatgcagtgagcgtggttctctggggcccttcactcacaggtgcctccgcttgaatccatacggggcctcaggtgcaatgggagatgcaacggtttcagctgcctacaatcccagggagacaggcagactaaaggagtgggatcttgatttgcagactggtctgactcaaggagcaaagcaaatcaacagagagggagcgttctaaggattaaggtatgagatccatcatggaattgcctgtaatatagagagagcccccttcccactgctcacactcagggtgggtaggaatgtgttctgtttcagcatgtgcgaagcacgtggactgcaggctactcctgctcgggatggcgggcgctggccgggcttggtgtcctgccaaccacgtggtctgtgcaagtcgcttcatcctcattgagacataagcatcctatgcccagaaaggaagactcgccacagttctgagttcctagaaggtccgcagcccttcgagtcaccccacccatcccccactctacctgctttcttatttggaatggatggagacctattccattgctactcagagcttttttcttctttcttcctttctttctttccttcttttctttatgattggaagcagatgtcgagaaacaaaagagaagtgtaggaaggaaataatgaattacgtggggacagggggcagtgcgcagcaactcgatgatcccacactctacctggaatagagacctggaatggcacctcactgaatttacaagggcccttcaaatggtaatgtgtccatgaagtacctgggggccttgttgcaggcagattccagcacaagggagccgatgtgagctgcaaactcctaccctggaccgtcagaagaaataggtgcccagagttaggagtgatagaaaaaagtgactgctggtggttgactccagtgtcacaaatgaggcttaggaggcacagatgctgctcccatcatcctggtagtgagggagcacctgacaggtcactggtgtcatgagagaagtactcatgtatggagctgatgtgggatctctttgcagcaggtataagagcctacaagttaggggagcgctccccacaggtggaagtgctccctcacagtgggagtgctctctacaggtgggagtgttcccccacaggtaggaatggtccccacaggtaagagtgctcccccacaggtgggaatgctccttacaggcaggagtgctccccacaggtaggagtactccccccacaggtgatgttaacgtttttcagtcacaggagccctcctcacaggtagcatgaggcccccccagtctgtgagagttcctcacccacagagattggagtccctcacctgggtagtggcactgagcatatttctagtcagcaagtagacagcatcttgctggaatgtgtcaaccgagggggggtgcacttacaggagggatgtgtgtgctgtgtgtggactatgatttctttgaaatcagttcttcttgcccgaaggacaagtattgtcagtagacagtgtacagacatgattctgagcagttctgtttaatgtgagtagagaatttggaggacagctgttggaaatgcctttgtccttcccagggtctgggacacactgtgacacagtctcaggacatggaatgctgtggtgggttttccttctctttacctcagctctgcctcagggtccgcgtgtgctctcctcctgcccgaggagcagaaagctgtccttttctctttaggtgacaggtttggaatgatttgttttgagggtgggggctttctggttgtggggtacctgtgctagatgacagaaggcttatcatagagagcccccatgcagaataaacctatatcttccaaggaactttctctagagcggtggttctcagccttcctaaagctgcgaccctttaacacagttccccatgctatggtgacccccaatcataaaattattttcgtcgctgcttcttaactgtaattttctactgttatgagttctaatgtaaatatttgtggagacagaggcttgccaaagggatcatgacccacaagttgaaaactgcggctgtggttgacttcagggctttggggatcctctctaaacacaggaattgtcccatgtcccaagggttggaacaaattttggagcattttaggatgtccgcccacttatacccaggggggttgtgagaacaggtgacaggagaagttgctttctctttaaatctactaagttctgcgtgtttaaactaggcgggcgagccgcctcagcaggtaaaggcatctgatgccaaacctgacagccagggttggattcgcggaacccacatggtaaaaagagaacggagtcctgctggctgcccctgacttgcacacaaagactgtggtgtgcacgcacacacatatacacacacacacacatacacacaatcactactaagagtaaaataataagtcttagccctatgctaaatgttctatacacttcttttgactttttaatgagcccagttacatacataacactgcatgtgtccaaattagattcagaaatctgagattgacagctaaacacactcaacatcttccagctggcgagcaatgaggtcttgggtttgaattccatctggctcctaaccagctctgtggccttggacagatagtgtggcctgatggtcatgcacacattgtggtcctccctttgccggatggccatgcatgcagtgtggtcctccctgatggtcatagtgctctccctgaaaataatttggtgagaagacaatattaacacggccattttggggttcagagctgatggaaatgcttcccggataataccactcactggttataaatgtgttattgggaaagcacagtgagcagctgtctgcctctcggagccggtgggggtgaagtgtggtggtgtgtaagccagcagggcaagcatgggaacagcgagtgtctgggaatcccctcagtggcagcttcaggcaggtgcgctccctgcctctcctcagcctttgtcagtctggactttgttcagtaacaaagacccaggtggcattgtgtggttgcctggttgcctgctctctgtggcatctgcctcctctactttaccctgcctgggaaacaaggggggtgactccaggtgttttaggaaagggttcaaagctttgtcaccttaaagagaaaccaagtcattacctgaggggaaggcttgttgcttggcgtggtactggcagctgagacccttgatttaagtgaagggaggtgctaaggatggagtaagcagtttgttccactatggaatctgagagtggcattgtataatatagttgtgtatgtcctgtgtacatgtgtgtgtatacatacgtaattatagctttaccggtagtctacgtaaaagttaaatagtcacctttggcctgacaaaggtcactccataggtgacttaaataacatttgcttgctcacagtttggggatcagaagttctagcacacacacacacacacacacacacacacacacacacaggcttggtttcttctgacgtctctcttcttgacttgctgtgaccactgtcttgagcattgcttttcctctatttagacacacctgccatccctgcacatgtccaaattctgcttcataataggacagcagtcacgttgttttagggaccaccctaatggcctcgcttctcatgaccctttaaaagcctcatgtgcaaatacaggcatgttcttaggtagagcacagttcatcacacaacagcattctgctgtttgcttcacgagatgcaaaacatttcagcctatagtataaaaactatgacagatgtttccattttgtccttggtctttgatatatggcgaatattttagccacattttatatgctcactaggtacaagtgcatggtgagacatgtgacacattggacggtgcaagtctagagccatatctgggatatagaatagttatgaacaggcctgagtggactcacacacacacaaggatctctagagtcaaccattagaccctccccggaggactgaggctacactgatcttagaaagctggtcttcgcccctgggcaagttgggaaggatggttctggaactggggattttggagcctgaattccatgagcaaggtcacgagggtctgaaaaccttttagcgtcacagcgactgccatctactccttgaagagacccacacccttgagtcattgtggcatcttacccagcgggtgcgtcaaggcagtgcattctgccttggcttttggatgacatcacaggaacccccacgtgagcacatagagaaatctcttatgtttgactccctctcagactccagggcaagccttgtaggggtttctccgagagctctttttaactcactcgagggttggagggagccaggggagaacggaagacctgagcgtattgctgagcgagcacttcctgtgttgaagtcagggcagaaacatttcctgtgtgctgcagacaatgttcctcacctggctgcaatgcctgggaactgcagcacctgcattccctcagcccctctgcctgcagctgcttggcattcctcctagtctcagagcagaaccacaaacagggtgctgggacccatggcagacatctctcagcttgggccatctggctatagagggacattactgttcagtactggactacatccacaacccaggggcccttccttcagctatgtggccacaccctcctctcctagccgtgcccctgagcagccacagatggtctgtcctctcaccacccctacttcctgtttccccaacctcagtatcctgagtgtctctgggtcactagttattccattactgaattcatctgtacctgctatttataattcgtttcttcctttgttcttgcctcccgatgagaaaataaaggagaagggtttcatataaactgattttgttctttgtcaccagtggttgggaagatgctcatgacaggaacatgctatgccacttccctttctccctgcttaccagtcccctagccttgatgggatataatcctgtcgctcagaacagctagttctgagtcttctgatgttttggcagctacatgttggtatggatgaaacagtgatctttgttcgtgaggcctccactttccccgggctcgataccctctttaactgtcaacttgacattgcctagagtcatcagaaaggagatcctccattaaggaattgtctagaatagatgggcttgtcagcgtgtctgcaggtgattgtcttgattgttaattgatgggcccggcccactgtgggcagaaccattccctaggctgttctaagaaaactagctaagtatgaggctgcttattctggagccagcaagaagttttcccccacggtttctgttctgcttccttggctgtgagcgagctccctagtctgagagaatgttgtgtgcaagggcaagcaggcctgccttcaagtccctgcttgagttcctgtcctgtcttctgtcagtgatgggctgtgacctgcaagctgaaacaaacctctcgcccttctaactcacttttagtcgtggtatttgtcacagcgacagaaactaaaacaactttccatcagtcttgttagagacaggttgggatggactaaatgtatcctcacctgattgatggatgagcccaaaattccaaaaacttggattataaccaaagtagtactggaaagaagtatagagggattcaacaagacttgcagtaattttatcaacaggaaagctgtaaagagcaccaggaaggctttaagatggttggcactcgccacaatcacatttgtctctgtttccccagcaccaagctcagtaattgacattgactaactgcccaataaatgttcactgaatgttcaaagatgttggacagtgtccaagacgagcatatgcttaagatattcttctaaaagttgtacagccctagctattacattaggtcagtgatctattttgagttaatttttgtgtgttgtccaagaaattcttgaacagctgtggttcggcatcatgagcagacatcagcctgtgggattatgcagcctaagggtcacctttgaacacttgatcacccaagtgcacctacattttaaggctggcactaaagggggcagctggaaacttaccctgtctcctaaatttgggactgtaagaatgaagtctcagactgaagccatgtatttaatttaagtgaccctttatagggggttgtggtactgggtttataccaggcttcagtctgagactactgcaggtcctccaaattctgtgtgtgccagctcctaaccacttagtctctggtgttaaatgttcaagtcccttctctttctattattctcttacttcagggtcatctttgggtgcctgactgtcatttctagtggacagactcattgtaacttatgttccagctaccaatgtcccctcagataccagcttattgtcccctaaatataccatgcagatctgaagctctcagtggaatcttggacaggcttcggacaccattgctgccagcacctgatgtttttgtcatcctgagaagcagcaagagtttaccagacactcttgtttacagacaatattcctttataagactcaacttctggctttaattacttggtaacaccaagggctggtatcttgtacaccagcattttagaaatagacgataagatgagtttcttacttttcttgttgctacggcataatgcctgacaaaaatcaatttgaggaggtcttattttgcccaatcattggatgggaggcaatctatcacgtaggggaggctggcaacaagtgactttgcagcagcaggagtatgaggcagagacagctcaccttaggtcatgactgagcaggaagcagagaaaggacaggaagtaagactgggcaataaagcatcaagatccaccctccatgacccacattctccagtgaggttcaacttcctaaaggtttcacagccttctgggttaatgccacagctggggaccaagtattcacacactccaaccagtgggggtggggtggtattgcacattcaccctgtcacaggtggtatagagtaagacaaaataaaattttatgctcagatacattttagaataaagtacatttaaaataccccatccgactaaggacaggctcctggattgcaacgcttcaggaccacaaaacactggaggagactagatgcttacattagttgaccttgcagcgtttttgtatctctgaagctgaggcagagcggttggttttctcgcagtaacttggctttgtgccttcagaggtcttttctctctatttatatggaaacttttttagcctcaaacttgagtgctagaaggacttatttcatatccatagatgttgcttaaagatagcatgatctctgcagtccccaccacttacagcttccatcaatcttctgatgagctaattgctgtactatatttttagtgggcttatgtactgtagaaaactctttgaaagcccacacttcatgttaaatttagctagaccctttgcagccttgagtgattgttcatcttgatggaagaaaataggatcctttctcctccacccaccgttgtcattcaattattacagatttatgcaggagaaagcaactcttgtgtgaatgggcatcttttaaagaatcatgacacatcactgagacagatatacttggcccccaattcaacgggtacctgtggagtgcttgtgcccataggttctgtggctgggctggagtccggaggctcatccggtcgtacagtcacacccagactaatagatgagggaatgaatgacagacactcaagaggaccaacagacatcctgaaagactggctctcacaaagagaacagaaatgctagttaaaattcaagatgtgcatgcgctttaagtgtttaaacaaagcaggcctggtcttggactcctaaagacttgtgagaggaattgctgtctggaaggctaaggctgtccagcagagagtgaaggcagagctggggtgtgaatgggacccctgtaccccacagactgagactaaagcacacttatttcctccttgaagagccagtttccatgagatggagccaacccagggttatgatatggatggatagatgtggtttaaccagaatgcccccagaaggtccctggcatatggctgacactccctccctctgtttccattagactccctttcctaggttcccatggagcctggagtgttacctagactgtagttaagagcttatccaagtaggaccctgcctcctgtgataaacagccccaggctgagtgggccacagaaggctggcatatatatgccaagtatattctcaagacatttgtatagtgagaagtgagaagatcgtgggtgccacataggcagaaggacagtcaccattgatattatgtggctaatgacatgatgctatgctgtgtaactacatgcatgtgtttcctacactgcaacaaccatacagtcacctggggcttttaaatgggttgatcataagcgggtatggagttttagaagagacaatgaagatactcaggagaggatggtagagatacgggtctaacagagatgatggtatagccatgtagatgtaagtgccagggaattttacacttagagatgcttaaagttagaagtgtgtctatttaaatcttctctccagctgaccggcaggtcccctatgcctggagtcttggattctgtaggtttacagcaggaactaacaagccagtatctaggaagtcccagtttattatctttctggtactttttaaaggtttatttatatttatttcaggcgtgtgggtgtgtgttttcttgcatgtttacgtgcatgtgtgtatgtgtcgcatgtgcttgatgtacccttggaggacagaagagggtattggatgcctggacctggagctacagttgcgagttgtcgtgtgggcgctgggaactgagaaaagcacctctgaatctcggccatctctccagccccaggactgtacggcttaagaagacttttagttttcagcaaatgttgattacagagaggaaacccctaacctggacatatgaacatcgtttcctgtgtgtattgcctgtggcttgtgacatccagcttctccaccagagctgactgactgaggtagtaaatgtctcctcatttgagagcttcaaatgtgagtcataggagtcccattcctcgatctgagagaagacttgggctagatgcttcctgagtgtctcctaccttaagaaccacaacagagtttgcatctaacattgactcagtgatgccccattgagtcgcccaaatgagtatctttctaggctctaacctaaaaggccacaaaatcctggcccacagaagaggggttgcagtgtttgctggattggcagagttgggtatagagttgaggatgggaaaaaaatttcatgacaagtcctttggcatggcttttgtgtgttgagccttggagatactagaagaccttggtatgatggatcgtaggcctccgaggaatagctatggctgcgtatgaagctgggttagattaagcgtctgatttatagtgctgtagttgaaactgccttgaggatgcatatcactgaatcatgccagtgagaaaatttaaaccatcttaatgtcacacgactgtgggaagccagctcccctgacataggttggtcagcggatttgccatgccctgaaacagctgcctacatctctaataacccagcatttctgccctgggtgtggccacccctagccttggatgacctcttgggtatagcaaagacccaaatggatgaacctcttaggttcttggcagcttttgtggggcagatttggagtcctgtaggctattctggttgttgctattcttacatattaagtgcccaggagattgaccaatcagatctggctgggcagcaaacttgggggtattaatgggggaaagattcagctgtgaaatgggcactggggtttgaaggccaggctgcattttgagtttcttgttaatcaaggcaaggtttggagtgtctggatatgtatagatgaggattgtgtcgacttgacacatgcctcctttccccattatttctttgtggcatgacctgtcatacttcattagggtatgtcattatggatgcagcaaaggattatgggagactcctgggagaaaaaaaaatctacctctgaggttgacctgtgcgaggcccagtgggctcatgtgcactttcccacaaatgttgacatctgagagcttccttcagtttccacagatataagtgttcttatttcaatcttaatcatagaaaaggagtgatgttgtcacagggtaacttcatagagcagagagataaaggaaatattttttaaaattggctctggaattgtaccagatgagagagcgcaagttatgacaccctcctgacgggaggtgactagaaatagaaaatcctaactcattgattgattcagaaaagggcttaaatgaggctgtttgcattgcttcctgggaacataccaagatgtggcagacctgatattgtctagttgcttaagaaacagattcactgggacacaagcctacaacctactttttctacaaataaactatcttagacttcaagttgaccataaaagaaaaataaactcaaggtctaggccatggtgtctgaggtgaccgattaaagatattcagtatagccacttgttaaaggcagaaggggtgggatttataactgttctggatgctatagctgctgctggctggccacagttctactccaggaatggagagtaactaaagaccacatctcatcagcaagttattaaatgcctacgacagtacaaagtctgacttgtttgtataacactacatccatgttaggctagggataagaaacaacaacacaaatggacaattgtacaaggaggctgaacctgaactacaaacccatagagccctgattgggaagtgactcaaatgtccagaaacactgcctagatatcagctgcaaatacaggagcaagagttctcttgtagtcccatgattcaaatcagcagctctcatgtaagaccagtgattctcaaatttttatcagaatcaaacacatacaacagaaattgctagagcagcaggtgtctgggccccaactgactttttttttttttaaatccagtaggtcagcaatgaatttgtagtgatttgaataagaattctcctcataggcctgggtatttgagtacttggtacccagtgggtggtccctagtctgtttgagctggtttggtggtacaggaagtatgtcactggcgttgggctttgagactagagccatttccggaggcttatgtcactgggctttggggttagtcccacttctagttctactctctgcttcatggtcatggttgagcactctcagcttcctgttccagccatcacacctcctgctatgatggactcatagccctctggaactataagcccnnnnnnnnnnnnnnnnnnnnttgccttggtgtgttttatgacaacagaaaaagtaacatagtatttcaaactgtctttgagagatcctgttgctaaaccacactctatactgtgaacaagtctggactccagccaaggggatctcacccttcttgtataggtgtcaagaagccaaggagactcctggggatgggagaagactgggtttatagatgggagaagttcctgctgcattcagattctcttggtttccttttcacttactgggataaaacactctgacaaaaaaccaatgtactcagcttacaattccagatacagtccatcatggggtgtgggtgggggtgggggtgggggacatcaacaataggagctcaggggaccattcatactgcattcataattaggagcacagaagaaagactgtgcctgctagtacttttctctcatacagtctaggatcccttcctagggattggtgccacccatagtgagatagtcttcacacctcaacctaatcaaaaaaaaaaaaaaatcccccacagacatgcttggaggcagttctaattttattaaactgacagttgacactaaaaatcacactctccacctgaagacccatcatgcttcattttatcctaccctcctgcttgctgttcgatctcagaaatctaggaggaagcttataactgcatttttgtttaaatggggtggggaataggactggattgactgtcacatgctgctgagagccactggttttctttcaattattttggtggcctgttggagtctcccttgaaattttaccaggatattactaagaatgatttctgagttcccgatgattaaatggaaagtgaggtgaagtcaagttcacattttaccctcatgaatattgccagagaaacaggatggtaggcagctaagagtgtggctcagatgaattcatggatttgagactccagcttcagtgctccaccattgccttaagccagtgatgtgaccccacctaagccatctgctaagttgaacccgggtgaatattgtcttagctagggttttactgctgtgaacagataccatgaccaaggcaactctaaaagacaacatttaatgggggctggcttacagcttcagaggttcagtccattatcatcaaggtgggaacatggcggcatctgagcaggcatggtgtaggagaagctgagtgttctacatcttcatctgaaggctgctagcaaaatactgtcctccagggagctaggacaagggtattaaagcccacaaggccacacctactccaacaagcccacatctcccaacagtgccactccctgggcctagcatatataaaccatcacaaatacaattgctataatcactcacatatctgacaatggcagggaccttggatgagatatcagtgtggaccctctacagggactgctctggggactcttggaagcatgacagcaagtgtctcacagaacaggaaggaagtgtgttatggtgcctgtatgacctactctcaaagtcacaaaacatcaccttagtacttgaaggatcctcaaatggcccacctaaccttaggacaaatgcaaacaggtatcaccagtcagggaagtaacgtcaaagccaagttataagaaaggcagatgaagggagaaagtacctatctatatgagctttgtacatggtatagatatggggagccagtgttggggatcctgagacagggaggccaagccagtttggatgcagttggggtgggggctggtggcaacgtgtccattacccactgatagttgctctgccaagccctgagccaggcccttcccagagatggttcaggactcagcagtgccttttcctcctgctgagaattggaccttattgtttctatttagcacaaatcttatgaagtcacacacaccctctaaaaagtcaagacttcttttcagcgtcctgcctttcttatgtttaagtcagatggcaagaaaaagaaatgagcgcaccagaggagacgggctgtaaaggtttgcttcgcgttgttgatgtcaagtttatttttggttctgttactctccgtagagcgagtctttctcctaagacggtggtgctgtttcctgctcccttgccactcccctaccagtgtaagctcacttttatttttaaatcctctccatgctctaagaatgtctaactttaaataatggttggagatgctccaggttaagaagagattaaaatccctctgccctttgacctcggaggtaggatcaagtgtgctgtaacatattattagtcccaagagtcaccttgtcagtttttccctattattctttcctgttattctgtactcatgaaagtcttgcagccaaagattgttccattaagatccaatctgaaattaaaatgtttgaggttttatccagtaatctgtgaagctgctgggttcccacagggacaggctccccattccctaaacttcctgggttgtcacctctgagccccatagttgatttcttgaacctttagtaagttcagttctctgagttccctgctgttcccacctgtgtggggagtgtaactgcagacccccagagctcaaggtcacaggctctgcagctgagctcttgtggatgagaggtgagaacctctcagtcctcctgggtggtacagactgacagtcacattgggagagggggtccacattggcaaggagcctcatggggtccgagcctaggcttccagaggtggacaacatcctcagaactttctagaagaccttgctctggaattaccttcaagcatccttttgatctgtgtatagagacatttttggaggtagctttcctgaacagaccctgagtcaaggctaatagggagtggagaacaactatatacagacagattttgaagtctggccattaaagagaagactgttgatggtaagaagacatagcccgtcgtagactgcttatcactccccggtcctggcgtgccgtgctccttgggtgtgccttccatgtttgttgtaatggattctgacttttctttactttttatgtctatgtgtgcccgagtgtgattgtgtgtgctgtgtgagtgcagatgcctatgaaagctaggagagagcatgggataccctaaaactagttacaaggagttgtgagccacggtttgtgggtgctggaaactgaactcaagtcctgtgcaagagcagtaagcatccttatgcctgggccatgtctccaggctcctttctcttcttctcccatctatggtcagtaagggtaggtgggatcttttgaaacaatgatgataatgatgatgatgagtgtttaatgaatgtttgtagctgggcactttctcacccaagctgtttctcttcctctttatcctgtgaagttttaaccaccaggaaacaggcccagagcagtaactttgcccaagatttgactagcagagagaagtgagtgtcaggacccaagtccacgttaaccttaactcaggaaattgtggtctacaatcatgtccccctggcacactgtgtgtgtgtgtatgtgtgtgtgtgtgtgtgtgtgtgtgtgtgtgtgtgtgtgtgttgagagggggaagatggtggcagaagcgtgggccgttggataacctcacgcctatgcattgcttacctaaagccaggcagttttcaaagtgtgctgagcgcggtgggaccacgcactaaagcccccgaggacttacttttatgatgatagttcatttcataattgagttttgagggggctaattttagacacacacacacccctctctcatgaagcaaagcctggggcttaagtacaaagcctcttaggacctgcattccttagaagtgacggaaaagtcagacataccctagcgcagttcaccgtccaaccccaggtcctgcagagcatcaggtagctgcagttgtgccgctgcggcatgcctgtcctggtggtgctcggtagtctccagcaacacaagctccatgtttgtccccaaactgcttttccttggggaagacacaggtggtcttggcacttgccatggtatgtcctgaactcttggtagacagctaagcagacagggctggaggccgatggggaagggaaggccttggcttggccatcgcacatttaatggcccatttcatgcagatgctctgtaaattagtttcttcacactcatgagttaaagccaggcttgttacaaagcaacacctaaatattagttcttcgttttctcatgagactttgtatttacgccactgtgaggcaggccaggtggctttctacctggcgtcattttccaccctcagaagtcctgttgggaaggagcaagcaggagttgagttaggaggaaagctatgcgcaatgttcaggactaggactctgtgaaagccaactatggaagctccagccaccagaagtgatataatgtatacagtcacagggatacaacctgatacccagtgctggcaggtgcttgtggtcagccccatacagggtgacacctgtaccctgtctcagggggcagtgcaggagctaagctctgtctctctgacgtgttatggtccagcagctagtaaaaaagcgcataggtataaggcaacttatcccctggggtatctctgtgacactgccccccccatgggtgaggggagcaccccaccaccgtgacactgccccatgggtgagggggacatttcaccactgtgacactgccccatgggtgagggaggcatccctgagctgctcattacatgtgactgaatgcctaacactacggctttgctttaagggagtttggctggacatggagtgactgctattataaaacctacatgatgcttttggcctcagttaaccaagagatgctgttccggaccctgtggtaacagctctaagagcagtaggcctcttgagctcttcagaggcgaagggtgcacttagattccctggagactcatcagaagtgaccacacgaagctccaggcctagtcagtgacttctctagtctttgatcaacagtgtttgaccatgaagtgaccccacaggctcatgcattagatacatggtctccggctggtgctttgaggggcatgtggaatgtttaggacactggctcagccagtagaagtgggtcactggttcctgacctacatagaagaaaacgagtggaaccgtgcgttcccagcatcgtagctaccatgccttatccaaccactgggactgatccccgacccccagagaaccatgagtcacaatacctgcccccacttaagttgcttctgccaggtaggccagaaaaactagtgacaggcacaagtccagtctcagtagtagctttcccagaataatcttagttcattctgtttttaattaagttgtggctcaagaggaacaattaacaaagactcctattgtctctctgtgaagctcagtgaggttttttgtatggaccatgcaaagtctgagcaggcttttagagatagtcttatttagccagttatcttcccttatagcataaattgcgttctcagcgatgctcatgttggtcattattcccaaagggcttcactattatggaatgccatcatctttacattgtactagggccgtgagggatctgagactctttccctctgggccatggcttactctataaaaataatatacttttaaataattctggatatttgatctcaaggccaaatatggtttctaatgagaaaaaaaaaggtattttgtaagcttgggatttttagttctaggaagaattgggggtgtgtgtgtttgggggtggggttgcatagtacagagatgaaggagcattctgttggtggaggcacactgactcctgtttctccttcagctttcaaaaaaccgagtttcctgtgtgggtggtgggggtgagcttgatttcgggatgtttgaatgtactgcttagtgttgctaaattttcacagcttcataggaaacttgagtgagctcatttcataaggaatggcatatgtcacgggccaaagtagggaaaggccagggaagccgtcatctttaaagggacctgcctcttcagagagaggctgcgtttgggtgggaaagtcaggattggtgtattttggggtgaatttttaaagttaggtggcagcagtcctgggtcgtgtttcttcctgatcctcatctttggggccccacagcatgactgccacacagtggtccttccacgtcagccttgggcacatcatgtgagagagaccaattcccttgggttcctggcctacagcgtgtgtgtgtgtgtgtgtgtgtgtgtgtgtagggcctgcttagcatcatgcaagaatcagtcttcctaccttttgtattgtttttatttttttattctgattttgagacagagcctcactatgtagctctggcttttctagaacactatgtggaccaggctggctttgaactcacggagagccacctgcctctgccttcccagggaaatgagggggagaaaggtaaaggagatacatttgctgttactgctaaagtcagcctgagggatgagaaagggggctgcagacggaagcgtgaggggaaagcgcggctgaaaagagtggaggcagagcttgattgctgtccactatcactgactctcccagccttcctttccgagagcctgtccttggcttgcctctgaatgagggacaccattcaagcgaggatgaattaaccatgtgtagtaaaagtcaaaataagagctgtcctcacatggaggttgttcagggctccggctgtagggtgacttcacaatgacaagaggatggaggaaccttcttcccatgcagctccagctactggcctcaactcatgtgctattgactactacttccagggaggctaactagtacttccaggaaggctaactagtacttctaggaaggctaactaggaagtactgcctttgactgcaggcaaatttcagatgatatagtcaagttcgactacaaggagaacagcggagaactgatgcttgctaggcaaatagcccaccgcagcatgcctcatgcgaaacacagcagaaacacagcacgtgtgaacagttaccgtctgctgactgctttagccattatgcaatatctaagcttactatcagaccctgggttgcttggaagcccctctccccaccccaccnnnnnnnnnnnnnnnnnnnnnnnnnnnnnnnnnnnnnnnnnnnnnnnnnnnnnnnnnnnnnnnnnnnnnnnnnnnnnnnnnnnnnnnnnnnnnnnnnnnnnnnnnnnnnnnnnnnnnnnnnnnnnnnnnnnnnnnnnnnnnnnnnnnnnnnnnnnnnnnnnnnnnnnnnnnnnnnnnnnnnnnnnnnnnnnnnnnnnnnnnnnnnnnnnnnnnnnnnnnnnnnnnnnnnnnnnnnnnnnnnnnnnnnnnnnnnnnnnnnnnnnnnnnnnnnnnnnnnnnnnnnnnnnnnnnnnnnnnnnnnnnnnnnnnnnnnnnnnnnnnnnnnnnnnnnnnnnnnnnnnnnnnnnnnnnnnnnnnncagggccacatgcccaggggtagcacaaactacacaactgtcaatcaagaaaagaaaccacaggcttgcccacaggtcaatctggtgtgtgtgtgggggggaggggcattttctcaattgaggttttctagcttgtgtcaagaaccaaactcaagtcctctgtgagagcagctagcgctcttgaccactgagccatctctccagtgttaaaggtagttctgtggcagattctcttcttcctgttcataattcagaccctggaatcaataaagtcaaggggtccctcctcccaggaggaagaaaccctctgtatgtgttttgtgcaagtgttcctcaaataatgactacagcaatgacaagtgccattcgtacttatgaagtcattgtccctgagtcaaaagtaagataaagtctttggcaaatctgcagagaatattttcaaagagaaagaggccagaatttacagagtccaaaaatagccactcaagtgcagctgtgtttagcttgtcggagaacctgttgagtcgagacaggcaggggttttatttctctggctgtgaggtcatcaggcttgtttaagagggaatagcaaacatttccaaatagggactggttttgaacgggaggaagatggctgaacatactcagaatcccgagttgctgctcccgcccttccctaccactttggaaacccactttggggagtggaagactcagtagccagatacctgctgggtggggtgcagatgttcctgtgacagggctcccctctggtacctgtgacctccctgaggattgctgctcaagttacttgacctcagtcggttctgtactaacgttttaagatggtaaataaatgtgcagttgaaggaaaacgttgtgacttccctaatgtgaggggatgattcttggatcttgttttgccctgtatctcatcagggataatgtcgtctttctgttatgtaactgacaagaagagcaacccctgatgcctctatttagatggcccagacctgtgatagcttgactcacaaattttcacctttccatgtccagagcctttcctgagctcatgacataagatgcaatagtctcttctgctgccggacagccacagggagccatagcacagacactcaactgtgttaccacagcaggaaacaaccagggctctgaaggggttctgtgtcccgaggttaggatgttcaatgggttagatgtattgagtgccttttcaacttaagacatttttggtgtaatggggttatgagtatagatagacttatggtaaaccaccaaacctatgtgcttgcaagtgccgcaatgtcatccacagtgaagatcaagagaaatgcacacatacatgctcagtgttcaactctccctgctcttatgaaattcagggccccaagccagggaatggtaacccatactttctttggggagagtcttctacagacatgtccacaggccatccaacccaggcctcgtcccaggggaatcctagctcgtgtaagttcataatcagaactaacatcacaactgctctacggaaacctgtggtgaaatgagttccatttaatggcgtcaaggctagaggttggcagtgtcacttttatccccagagtctcactgttgtttagctggccttgcctaagtgttagcctgtgtgtctgccagtacatcaaagctgttttgttcttgaaccttgatttctgtattcttctcttggtgtgcttagatgagattccttcctccaatgggacccttgtctgcccaaggtgagtcacagtgagaggcagccacagtactttgagggtagacaagaagacctctgcaaagcacctcactgtacaaggcaattcctgtgtaagcgtgtctgtagtcattgccaatgtcatcacggcagtcagtatgtctctgggagggttctgtggaggattttgttcatgggctaacgcggcgtaactgttgccttactggctatcatacctaacttgtgatataagtcctatatccatctttgtactagcccctgggcagctcagagcaatttttgtggttcatatctggtagaagagacattgattgggctggttggttcttgtttctctgctttttatgacagcttacttcataatgggagctcttcttccacgtgtgtgtgatgtgcagtgtggctattggatggtaccctcccttgcctcctcagacctggtatagtggtacccctccccccagctgttactcccaccctagaatggccttgccatctctctttataaacctgtttcctctctgggaaattgtccctttagtgagcccatctcagtctttctataccagagacacttggcactggccagacgatcagatcttgatttccctctcctctggtctctgtgccataaatactcatatcatataacctggacacctcgtgagatgtcagacaagggcccctcactcttaccacagagcttatcaagatgtgatccctcccaagaatccagaggacacagttgtcgccatgaactcagacagaaacagtttactctacttcctggaaacctttgtatgcaatcagggaggtggcctttcaagttaagcacttttctttattaattataggaagcttgttttccagatgtgatttctgtcatgtcacattccaacgagagaacatggtgtggggaggggataaagaggtcttaaaatataagaaatgctggataaaaccttctagtaacaataaccttattaaacttgaggttgtagttaactacagtgagtggctcaatggagccatacatttctgggttttttgtttgtttgtttgttttttgattttgttaagaaggatgttaaggactctcaaaatttaatttcctggatgagtttgaaccattggaggatttccccacacttccatcatgaagataatattttgtttaaaaagtcacattcgtcaagcccgtggttggcgtcggctaacctgtaccctgagtattcatgtttctcctgtgtgggaatgcactgagcctggctaaagtttctaacacactttggactgttgcctaaggagaaccccggggagaataagggtgatgccagtcagaagggtcctacagcaagctccagtttgctgaggtgtatgtgccttgcctcctgttactacagctcccctctccgacacttgtgcttgcccagggtgcctgtctcgatgttgttgtactagaactgcatgtcaagaatagtgccagcaggttgttgtgaaatgctttgattcctgacatatatgtgatatatgcgtttgcatgcacacatatccatagctaagcatgaaccccgcaagttaactgctcaccctttgtgagctgctgcgagactttttgataggattccttcagtcattcaactcacccaatgcctagatcacgaaagaggagtttgtagaacgctctgaggagggggttatatctcttttcctgacagttctagggaacccagacaaggagaatgctacctgcatctctctggataatagcaccgtgttgttccctaaaacaagcctggttcctccctccaagtcagaaagtctccctttaagaatgtgtttcctctctgtagccgttgtcgaaagctgtgcctaattactgatgaaaatgtctaatcattgataccagatcactaccaaatgcattctgcctaagttctgaggtctgtgtagtttgggggtgtgtggtggtttttaataagagtgattcttgtaggctcacatatctgaatgcttcctcaccatcagaattgtctgataggattagaaggattaggaggcatggcctacctggaagacttctgtcgcaggtagggggtgggttgggtgggaatggggggccttgaggttttaaagtgcttttaaagtctctctatatatatctatctgtgtgtttcctcctcctcctcttcctcctcctccttttctcttcctctctctccttccccacttatgtccatgtgccccccccgccccccccatgctccctcctgtgatgataacggactaagtctctgaacctgtaagccagtccccagttaaatgctttcctttatcaaagttgccttggtcgtggtgtctgttcacagcaacagaacattgtctaagacagtgagaagcaactcccaaagtcaacgcatttgggaattttactgaattttaatcagttgctgggcagcctgggtggctgacaaacttactgcgaatctggctgagtcctctgaggctgttgactgcaagtactctttgtgacactcgattcgcctatactctcttcccatccccaagtctgacccctccatatgcctttctccaaagtctatggcagtgtggaatgaactacggaaggctaagggcttgcaggagcaggagctgtggtgccctgtgtttatttattgacatggttccttcatccatggtgggcatcttggctggaagttgattcattactgtgtcccttagcacataagacatcatatatgggacatcctatgatatgacatcatatcagagaaaacagcctatttctccttctgcatttaaatatcagtgactaaaacccaagcctctgttaacttgcactaataattcctagactaaaaagcatctctgtgttccagagtaaccccgaggccatggcgggtctttgagactctcaggacagagagccccaggatgtgccctccagggctgagcttgtgtcccttgccatgagctcggggagcttccctagaggactgaagtacaagtcccagctccaggaaggagctccaaggctcgtgtctctgtttttctctctgaaagacaagtgcagtttatgttgggtacttgagattcactccaaggggcagctctggatgaatcaggacccgatgggcagtttctgagggctgtgtacttagtgacacacattaaagtacccatccacgtgcccatggtccatccatctttctgcttgcctgtccacattctcatccatgaatcctccaccactaactcctgcaaagcgtccagcactgttggcatgctgaagtttccatgatgaaacctggcagtgacaatgaccatttacctacggtgcgtcagtgtgactccagtcttcaaagcagccttgtggggtggagacttgtgacctgcagctcacaaagagacaatgagagaacagaggctcatgtaccttacctgaggtcacctaggaagagtggagtaagcctaggagtctctgtgacataaggaccaaatctctcttctttaggcggtatagcgtgtccattctggagtgcatcagagctggctttggtcttatttgtaagtccttcccccaacttctttggggggtttcctgctcttagccaaatagagagagggatcccttcctaagactttgctttgcctctcacaacctcacctatacttgaagttcaatgtagagacctctgtgtcttgaaccagagtataaaggaagttccactcagcaaagcctcaaggtttaaaagttacaaaccaaggtggtattaaacactctctgccctgccctcctgatgatctagaaggccaaaatcaaacttggaattctcaggctcctgagagttcagtgcacaaacaaagcacttttgggcacctggctcctggctcacccctccttcacagtgtgatctgcctccatgtcacactacagaggcctcccgagcatgggcataggtggtccaggcacgatggtcaggcttgtatatggatgttggttcaagaggcatccactggtgcctggacgctattggtgcttttcttcattttttgaggaggccatctttttatgaaccttgctttttgtctagccaggctgcatgagccagggcctgtcctcaggtcaccccagtcccctgttctcctgacttgctgagtgacgatagagaacaggaagatgggaggaagatgtttcagggctgggtggaggactagggtggagtccagctgggtgtgtgtatgagagagagagagagagagagagcagccaacaggaaggagtgctgggttctcttttgctaactggttcccagtatttcagggttcattctgaaaatgcattgttactatgtgtgcttgcagtcaagctggaccattgagctgtggccaccccggctcaattctgcttagaactatgatgtgaccagcagccaggatccattccaacagatacccaccctgttctttggcattagtctggggctggaaagctctcctgggtctgtttccaagtacagctgtcctccttacaggtctatgggtgggccctagaaggccactggtagagaggcaatgtggtatgggacagtgctggtctggaggaaccctcctgccctggccccagagtcctggcctttggggatacacagaggatgtgagcacttcaaagtgacagagttgtgattgaggacagattcattctcctctcagctcgtctttcctctcccacctctgtgcgttatgcctgtgctaaaatgaaagccattgtttatttaaaaggaccgtttgcctaatgcgcctggaatttattttctggagcgttttctatggtgatcatcagtccagaccttggctgtggctgggcgattatgtaacctgggatggaatgagttctgccggcgtgcgcagcctccagtgtacaggactcctagctgtgcctgagagggaagctggtgcacttgtggctgtatacacaacctgcttctgtgtcctgctgggtttgggagggtggggaggtgggggcctggggggattgtgggatggggaggtgggaaggtgggaaggtgggactagcccatagagagagtctgcgagcagctagtgttaagtcaggaggatgatttcttcatgggggcctgccttggatttgctgtagaactgccccccattctcctcagttattgtcactagggcttagatatccccttgtataaaccccaggcccttttacccccatctgcacgttagcaaaattcctgagtataatgatttgagccctggcaggatccagaaaatgttcctggccctttcctctctgctggcctctgtcctgtgtctccatgtgcctgtatcaacggcaatattgacctcaagagccactctttgccaggctccaaccctgaagtcccttgatttctactctggaaccttgcctgggtccaaggcgagttgctttgtcctggatgaacaatgggaggctctacgttgatcttgccttagaccctaaagggaagaataagcatagatgggtttggaactctgaccttagtcatggatggataccagtgagctccctttgtggttcctaacttagacccgcagtgttgggaaatggtacatttattgtgttttgtatctctcctctctttatgtaacgaagatgtatctcttccctattgttcctcggcttcccatgctagttaactcccactagcaacaaggcagctttggatttacccatttaacacaagagtggccgttagaacaagctgaggtgttgttgtcagtcaagccaggctcttcctcactggagatagcgtattccacatagggatttggagactccatatccttccattgccagctctcccattcccttgggggcttcaagtctttggcttcttggggacagaggaaaggcatccttctctagagacaagtcatatgccttccactcactatctgtcaaggaaaatttagtcacagctggcctcaaaagaacctggaaaatttggctgaggctgaacagccaactcattcatatagtgccgtgggactgggatcagagatgaaggacagatctccttgtgagatggcaggggagcaggattagccagaacttggtgatagagcatgtggggaacaatgaagggaaataggtagcctgaaacccctaaggtctctagttggcagatgagtggataatgctgtctctgggggatggagctgacaggaaggcaaaggatgtgaagcaggaatgttcaggctggtcactggcccaccatagtctggtgctatagaactgtgtcatgaatacaagaacccataggaaaaggtgtctaatgaccctatgtcccttgtgctaatctcagagaggggtggttcaggaagatgctgatgctgtactcacagccttagcacctgatgggatctgcccatcggtttccaagtacaaagctcaacataagaagaatcaaggggaaatagatacccagtggcccaggcggaagcagggagtctgacatcctgacctgttatctcggtggggaggatgtgttctgtccttgcactgtgacattccctttgcttgctttggactcagatttgttactctgggcatgtgatgccaagaaggactgaaagctggcatgatgcagaaatccccagaaataggagccagtaaaggccaagtctggggctgtaaccacgggccacttggccagtgagctaatgggtcagtcagtccaggttgctgttaccacccatgggttcatggttgccaatgatgccagtgaggtcacagccctggggctgcctgaggtctgggctaacagctggccaccagagcagggacttacaaacactttgtgggtaggggttaacatgggagtataaaagtcagatcgacagctttttaccattgtgcctccaaggtgggactcaaatctctgcctgtggggaacctgagcagagtaagaaaagatcagaggccttgttcctagatctgtcaaccttggccacctctctcactcagactattgaacagtgggaagcagtggggacagcagttcaaagtttgcgggggacggggggggggaagtcactgttaaagaagtgtgaagtgtgttttgccctctttgtggattttgcgtgaaaaatggaaggggctggatagctgcttatttggaaagaaggcacaggcacacaagacaaccatcaggagcctagagccatcccacggccacacacagccctggtgagttacatagctgcagtgatgcgagttggaatgactcctccccttcaagaagagccaactgcgtccttatccacacctgcttagtgcagggccggatttgtaaaacagcacctgtgaatggaatgacggcgatcaccagtccaaaccaacctgttttcagaaatatttgtattaatttgatgccccagcagcctgcatgaccccttttagcaccaaagggatagctgtgtttgctgagcatgagcagggcaatctgggactctaaggacagacagtggttgtaaagcaagaggttgtaacccctagggaatcatgtgcctcatggagtgtcctaagatgacatggaaggacattgttgctgtgtttcatatctggtagatttgcagcactgggaagagaagcgccatcatgctgaaagaaaagctaccttgaaatatagagatagccctatctccaaatatatctggggcaacccagaacagcagaggcctgagtgtgaagtaatggagaagattccagagggttcagattatgtacagggataaatgcatccacctaccggtggagccagcagccccgagtggttaataccaacgacagacagacagacagacagacagacagacagtagccctggtacaacaaaggccaggcgagcggggaggagaaaacccaatgagaaaagaccggcccagcaagatgtacagacggcaacaatctctaatggcaggtgcccagactgagtccaaacactgtggaagaaaataaccaagactgaaagcaaacagactcccgtccaaagcgcacaagtcggaaaatgccagagcagcataaacacctcgaagtgaatgcagccacttggcctcttgtttgagtaatcagaagtggcactagcaatgccgtaggagcggagtccgactcggatggctttgacctcacttggcttttcccctctcttcaaacaatgcatgagggctgcctcgccattccattcctttcttggagccgcattgcagtctaccagccctcgagaaaggacactttggggcactttcctaccagccagttctcaagggcattctctctgcccttacatggggaggtacaaatgacctggccctaagcctggactcgtagctgtgtgcacttggctgtctctgggtctgaacctgagaggcacctggaagcccctcccttattctgctgtggcagggaggttgaaggctgctttcccgtggaaatgttttcttcccccaccttctttcacagctatgatgggccagtcaacaagcactctcgggcactgaagctagaacagcattgtgctcggatcttttggcatgttggccaaggtttttgagttagagtagaagccaacaagccctttgtagttcaggctttagaagtagcacaatacttgtccttacgaactctcttggctggagcagataaggctgcgtggggaaactaagtctgactcctaatgaaaggagctgccagttgtggtgttgttgttgttattttctgccttttacccaaaattcattttgtgtcctcatttcgtagcttgaagcccatggtttctgaagttttggtaagcttccctgaggctgtaaagagagacaggtgtcacctctgtgttagtacaatatgaactcagggttgagatttggaaggcagcaaggaattcatcttttatccacactagaaattcagaaatgaaagtcagtcttggaggaaaagagagccatgttttcaaaccccagtcgtgaggctgtcaggtaaacaagagtacctcatgctctctcattgtggccttccttgagaccacctcagcacccaagcatcataaagacagccattccaaaacagtatgttgtaaaacagcaacttgaaatataccagatggtgcgaggagccagagacgcggagggagaaggcagtcggcattctttcttatccttcacctctgtgcctggacttgacgttgaaaaggcatctggaatattattcccattctaagtgcttccgaagttatagatcatcagagggtgtgctcagggcccttctctgtgtgctcttgctctgccttacggttatgctaccctctgctccctctctctgttccacacccagatcaaagctgactcttcctatgtcccaggtgtgcctcccaccttccccgtgttctttagtaggtccagggcaggaatggcctcccagagcaggtttggttgtagggaggaagagccaggatacatctgggatcctgagccagcatgcagtggtgttgaagttatgcctggttcttcctcccagctccatgcttccagaaataagactcatactcaaaatatatttacaaataccttggtcatatagctagactcttttctgactggatataacttaaaatatcccatttatttttaacctacattctgccacgtggctggctagctgtgttcaggtaccatgcgtctgtctcctcacatcttcctgcttgagtctccttttagtctctatttccctgaatcctctctcttcctgccagtctcccacctcctatttcctgcctcagctcattggccatcatcttttttattgacaggtgatgcttctaagaggctctctctatatgatgggaccatggaaggtgagggagatcaaacagggcagtgcttattccatctcaagtcttcactaagatccccttgtagcacacagtccatcttaaagtgtgttatagtatgtcctccctccaggccaatgtaggcagagctttctctagggctggagtgagggcagtactgagaacatacctaccatatgtgcaaccctactccatcctccacagagaagagaggaacacattttctcttttaaatacagcatccacttcctttgagtcccacaggtgctgatggaaacccttcagctatgcatgcacacactcccagctccatgggcagtgagaggctgggtgggatctttgtcttctcgctctcaactggctactgctgggtgcgaagagcaggcagtaactgtgaatgtcagcttagctcaagccacatgaagcagatgataaacatggttaccagccatgtggctgtggaagggagattttgtggcttactatggacccgtgatggggctctaagatcctttcccctaccacataaagtctctctgtctctctctctctctgtatgtatgtgcacatgtacatgtgtatgggtatgtgcgcatgtgtatgtgtgtgcacacctgcacactcacgtgcatgtatttatgtatatgtatgtgtatgtgcatgtgtgaggccagtgctaagtgtcttcctttatcaccgtcctccttattttctgagtcaggaactctcgatgagcctggacttcaccagtttggcaagactgatttggccagtgagccctggggatcctcctgtctcaacctccccagtgctagatttaaaggcacacaccaccacttgcagttttcaaatgcatttatttattcatttgtttacatgtctacgtggtatattcatcatatgtgttcaggagtctatggagatcagaagagtgtcacatctcctggaactggagttccagatgattctgagccaccatgtgggttctgggaactgagttggagtcctctgcagcagtagtcaatgttcttaaccactgaggccctcctcacagcattttaagaattcagtcatcacacttgcatggggaaggtacattccccaaggtccatctcccgagctccacaccagtcctcctgagggggagcagcagtcttgtgggagtccttacacttcccatgggaagaggaaagacatagactttctttctgccaagctctgtcgtccccgaggagacttccattcccccatccgtagcacctctctgaccaagccaactgtgattccggactttgctcaacccacggagctctcagagcgggaagacaggaagagtgtgatgtgagaagagacagagatgctttccagactagaaacgttcacagcctgaagagaactctgaggccaggaggaataatggcagcaagagagcactcagtgtggcagtgcggggagacagagataatgcagtaagtggagcttagttttccaccttccatcaacctctgtccgcatcagtggttccccccaagcagcagagaatgaggtagtgttgtattgtcgctagaagctgtgtacatgcagggatttttccagacagaacagactatttacaggtgtgatagcttccacagaccgtcaacccaagcaaccgccgattcatttctgctgtcagtgaggcttgattgtgtaacttatatattaaaggaattaaacattcaaaaatagccaatggaagaagggctttcataactgcaaaagttgttataatgtaacaaaaccacattaaccagtacagaagagagatctttttttcaggtcttagaaaaggctgagccattgattaaatattagtataaatgcttatctgttttgtaatataagttactactactttaagacacccacaataaaaaatgaaaggttgggctggggctgccagcatggctcagttggtagagtgcttgcctttcatgcatgaagccccagggcccatgcccagtgttgcataaatgggccctggtagtgcacacttgtaatctcagcgccagggaggcagaaggaaggagggtcagaagttcaaggtcgtctttgacctaggaggaaggctaacctggaatacgagagaaccatgagaccctgcacccccttcttccaaaacaaacaaacaaacaaacaaacaaacaagactagaaaagctttttaaaaactatattcataaactttaagtagggcagtcaccttaatacaggatgtcaagactgcaaagaatagagtgacataattgaaacccatttatgtgacaagaggtgatataagaagaataaaatgtcaagaagaaaaatggcaacagaaaatatatggtgcacagatgaagtggaagtttctggtagtacatgtgatacagactcacgtggtgttttgctgaggcaagacctgagggaggacacatgatgtttggagagagtataagtaggactgactggacagtgacagcgtgcctgcatagctagacttccaactctttaatggtatcaggtctttgctgatctttacttcattgagtgaggcatggcagaaaacttcctctggtgtcccagctggttctggtcgctcctgctgacttaagcagatttgttggaggcctggcggtttctgctggatcatgccaccactgctgactcatgtttagtaacttgacactactgaactggactgctggtatcctgacaaatggagactggaatcactccaaagaactacttccaaacaggtccacatcccctgtcctatttgccatcatttctcccctacctttgggctagaaggggtatcgaaacatttgataacccttatttaaagtaggttttgaaaaatataggcctccagattgaagtttcctaacatatatatctttttgaaacagtaagaaaaccacaaagtaagaaacataagaaggaaacacaagaagaatatacaaagaagtcctggtctaggatctatgatctacaatagcatgataagcaaacaaaaatatttattcatacttataatccagaggtggaagaaacaatgacatagcatttatagctcataatagcaaaatgtttaaaagattaacagcagcaaattgttagatgaaaatagggaaatgggcatttgtatttaccaatgatgagaatacaattgtctttgtcaagtgtttagttgttgatattcttcaaccaagtggctctaccacttgatagtttctccataaaaatatctgtacagtgatgttgacagtagaataaaaatcgaaacaacctaaacatggaaggaaggcaatgacatgacatgcaatggagtagggtatgggatcctgtagccaccatggcaagcttcagacgccctaagtttcatgatgataaaagcaacatcgcagatgctgcagtgcacagctcagagcccagatcaacctccaagaataaggagtgttttcctacagccaaactcttcacctgttcatttgcagtccatcgtcagccaaccttgtccaaggacacaccacttcattgaacaacctctatccagtggtggttcctcacagaggaacatagctcatagcctcttggtccagtttggactttgaaaagttcttctggttcaggattgtatgttctcattcagactgttacagcccagcttgcctctcctcaagtcctttccccactgtaactgttggtcccaagaacagtaattctcaatcttgcaaatctccattctaagcctccttcctagaaacctacattctggaatccttgccacaattgatgccatctatgtatagacgtccccacaagtctctgtgttcatggatggatagcatacaatctcttgtgtatgtgtgtgagtgcgtgtaggcacatggaggccaccagttgctgttggtgtcttctcaggagctcaccaccatatatctttaattatgtgtctgtgtgcatatctctgtgtgagtatgtgcacatgaaagcagatgaccacggaaatcaaaggagtcagattcctatggagctggagttacagatggttgtgggctgcccaacatgggtgcttgggattggacttgggttctctgtaagagcagtgcatgatcttaaccgctgagtgagtccttgacccactgaactgttcccacaggccctgcaattaagtttttaatgtatctgtttccttactaacacgaaggggtcatgtgacagagacatctgcttcaccaaacattttgggaaggatctccctttgttctgtgtgccaggatttgtgaggtagcatccatccctatctctttccttgctacaggaggaaagtgaggtgcagggaagtttactattcattcatattctcacacccagggcctcgaaccccagagcctgcctcttctttccactaagttttatcgccatccgtgaattgtgtggtgaagggcaggacagggaactggccctccaaagcttgcttaggcacgatcctcgctgctgcagctttttcaggcccttctgctagaatgaaaagagggacatttcatcaggaagatgaaccaaagctgagggcagcaggggagtttcttctggatgctcatgcactaatatgacgtttgagacatctagagtcttcccatgtctttgctttaaacagaagaaggacttgggggttatgtgaagataacagacacaggaaggtttccgtggactcggctttctaactctgtgtcagactccattcctgaactgggtcaaaccagccagccagccagccagccagccagtgaattctagaaacttcccttttcagtgtggtttaaaagcaatttataggaatctctccctccccgtctgttgtgggagggcagcagaaaaacgggttccttgtgtgatcagacacacaaactgagcattaagaggaccttgcccagggagccaatgtttagccagagagtttccacactgaaggctttgtgtcgctttggggaatggtgtagaaatcacgtgcctctagagtcccgctccatctgtcattacgattcacctctcctgaatgtcccctctctttttttcactcaccactgaagggaaacccaaaagatgtaggttttggcaggtgtgcctttctgtggggttcagtgtttcttactccacccatttaatcccctgaagtgagagttagtttcagacagtggagggacactgtaagcagagaggccccttccccttggcgaatacgcaatgctccgtctgtggggcctaaggaactcttcagcctttcatccagccatgaccttaggtggctcatttaccaactcctttgttgggaggaactcgagggagtccacgaaacaggctattgtcttgataggcctttccgtgtgagagggatgatgggaagtgaacatgtgtaatcagcgcgatggctcaggaagaaagcactcgccacaaagcccgatgacctgagtttgatcccagaacctacattaggtctgtaaggttatcctctgactttcacatgcatgctgtgacgcatgtgcccaaccacatgtgtgcacacgtgcacgcgcatgcacacaaatcataatataaataagtaaaaagttcacatagtggcaggtcacctcgaagacagattctagtagagctcatttcctctcacttacggttgctagcttttatacagttaaatcacatgtatgtagatgacatgaaagtctaaagcatactgtgtggcgggacaaagactaatttgagaggagctggtcaagaaaagggggcatagaagggagaacgtcctacatgtctatatatgtgaaaacgttctaaaaccaaatctagaaagtgacccacgagaggaggaaaaggagagactgtaggggacggtggtagagagggagactgaaatggggggtgctggggtgggagatctcagatgggagggaagtggggtgcagagaggaggtgttgggtggatcatcgagaacctactgggtaagaacattcaatggggagatctactctgtgtgttgatagaaatgggagtgcatatgtggctgtgtttgtgcacatacatgtatatgactgtggggaggtgtgcatgcatgtatgactgtgtgcatgcatgcatgcatgactgtgtgggtgcatgcatgtacgtgtgactatgtgcatgcgtgcatgcctgagtgatggagaagtacaaggaactacttcccgccaagtttgacagaccctgctcaatgagtgaaaataattagataagcaacaggaggttgtagaggatttccacccagtgtgttggggccaagggcagagttgaggagtgggaggtggagggactgtgacttggcgaatcgatgagagagcacaggagaccaggcagggtgcttgtaggactacaaaccacctcccatgccctggtccctgaagtgcattcaaattctgcccctaccagttcattactgcaccctctgggcaggtctcttgatctctctggcattcaactgttcacccctcataaaacaaggacaagtattttctcatgtggtctcttgaaggagtatgtattcataaagccctctgtaaacctggaccatatgcttatccgagccatggcgtgattcatatggagaggtggtgaaacccccctgcaaggctggaaacctaccctgctgcccctgggtgagcaaccgtttattacagcccagggctagaaagatgcttttgtttccttacggctgcggatgtctctaaggggggggggctgctgcttgaggaatcacgtggtgtggtcatgtatatgtaaccatttaccagggtaacaacttggaatgcttgagccttgctgccagattcatatctctgttcacatctgtgggtgacacattcatgggttgcattgtggatatgaagcaggctggagagaggtccattaaacaaacaaacaaaaaagttattctcctgctgacaagaggcagcagggttttagcacccagtcagtactcatgggccatcttgtccccccgttcctgatggttgctatggtctaatcctaagtgtatctgtgcagatgagggaaagttccataatacttattgtggctttgaacaaagaaaatctgccttctgccacgcatgtaggccatgcacaacccctatgcttgaaaagtttcagtttcaaacgccgctttctgtggtggcgttgacctgtgctgttggctgtcctgtcatccaggagtgtttcagggttccactgcagtagagaagtctgccagccttgtcccttgaagtagcagatccacaagccacatgtagccatggtgagatgtggccctgtggagatggctcagcatgtaaaaagcactcgccacgtaaatctgattaggtgagttcagtgcccagaacctgccaaagaaagctagatgatactgcatacatcagcagtcccagcactcctgctcagatgggaggtagagaaaagagaattatctaagagcttggggaccagctagcctggaccataaagagtggcatacagcatgagggaccttggtttgacaaggcaggagagaaccaacttctgaatgttgtccgctgacctccacgtatacgccatgtcatatgaagtctgtgaagcatcacacacacacacacacacaccgagagtggggggggggagacagagagagagagacagagagagacagagagaaagacaggggtggggtgttaggttaggttaggttaggttaggttaaggcctcagcctgtaacaaaaggggattaagtaacacataataccaaccggaaaggaaagaggtgcagctgttgtaactagcgagccaaattgtatggaacatcactaaaggttaacttcagtagccacttcctgtggtttgtggccactgactgacttcagagctctaggagagtgcgttttctcttggaagaccgtctcctttgagccctaaggcttaccttacctcagactctcatgattcccaagaagctcgccacaaaaatctgtgtctccaaatgtggaggaatgtgtagtgcgtacagttttctggctagactcggggaattaccttggctctgtgacattacagtggttttggtagcctgttaatgcttatgttttcccgtttgatctcattgggtgccttgctgtagctgtggatgacagcaagtctccagggaggaatgtgtcccttcctactcttgatggctaatattatcactcctgcatacacacttgagtgtctgtgtattgtttttgatttgttttcttttggtgtgtgtgtttgtgtgtgcatgcatgtgttttgggtaaaacctttgctttttgtttgttttcccacatgtcttctcagcctgtgaaagccctctagggaattataaccatattcttggcagtaataatagctgtgccagaggtgagagaggtggctcagtggttaagagcactagctgctcttgaagaggacccaggttcacttcttagcactcacatggttgctcagaaccatctgtgactacagttacaggccatccaatgccctcttgtgatctctgaggtgctacatgcaagtgatgcatagacacatgcaagccaaacacataaagtaaatgaaaaacaatatctgagtctctttgtgctcatcataggctgggaaaaggaacatatacagaagacatttatggtgatgaagaataagtggggggatggatggatggattggatgatttggtagatgggggaatggttgggtatatggctgtgtgggtgaatagatggatagatggtggatggatgagaaagattaatgtgtgcgtagataagtgggtagatgattggatggatggatggatggatgagtggatgagctgtaatatctttctagagccaaaagtggtcaaaccctagtagcctatgtgtttggaggaaaatgttgaaaattcctctagtacaggctgcagaaacaatataagagaaaaaccattgggcccaatggtgttttcaatcagtgaggaaagctggattgaaagtgtgtcttaagttttggagtatgataaatattaattataaatggaatctaagcttcttttgggccagaggtactagaaaaggtcacagattgacaactgaacgctctcatagtatggggtgtggagtacaatagatgcaccatcactggatagtggaatcctagactagggagtgaatcagggagccaggagccatggcggatgtggaccaataaaaggactgaagattctatgtaagacttccgggttaatgagagccatctttaatatgggaaaatcccagcttcaccattagcagatgctctggacctatggctccagctgcatacgtagcagaggatggccttatcaggcagcactgagaggagagcccccttggtcctgtgaaggctcccagggtagggttctgaggcaggaagtgggtagacaggtggaggagctcactcaaagaggcagggagaaggagagatgctagagtgtttgtgaaagggaaactggaaagggggggtaacatttgaaatgtaaataaataaaataaccaataaaatggaggagaagactttacacaaaacacttatggagggctgggaaagctggctcagtgttcataagcacttgttgctctggcagaagagcaggatttagttcccaacacttgcatgatagctcacaactgtctgtaactccaggtctaggggatccaacgccctattctgggctcatggtcacctctgcatgcatggtgcagagacatatgtatgcatgcggcacaaactcttaaggacttaaatgatgtgtttgtgctcacccacatacatgtgcacacacatgtgcacacacacacacacacacacacacacacacacataccacatgcacttacacactgcttgcaacagccaaaggcactggactctcagaactggagctgtaggcactgttagcaccccagtacaggtcctgggaaccaaggccctccataagagcagtaagtgttcttgacagccaagctatctctttagcccctctcacgatccttctctcatgcctggatgaccagacatgaaaaccagagtctttagcatactggtgactatgcgagatgcagccaggactttccattcaaggcacatctgtgagccaatggctgcagcctgggtaggaactggagtatcgttgtattttcagagtgtgcctttaaagaggataaccagacttcccttggctagagagggtaggtttataataaaagccttggtcatttgcgattccctttccaatatgagaagtgttattaatttgcccacttaaaaaggttaagatggaatagatcataaatcatcatttcaagaccctaaagttagctgttttgctaatggaaaagacatgtctggatactgattcagggaagaggagaggagggacggggagggtgatggaaggagaggaataaagaaaggggaagaatggagggagaaattcggagggaggagaaagaagaacaacggggcgggggggtagagggatggggagggcgagggggagggaaaaactacatctcacaggaaataacccaatccagggagaccacaaaacatatgttcttggaggtagtcatatatatagtggcagtttgctgaagttgtataatgtgtcttatacagttatcctcaagaccccagaaggtctatcaggatttgcaaatcctcttggatgactttgtccttggtgtggagattaaccagctcaaaatatttgaagctatttctctagtccaataaaaggctttcatcgtgttttttgtctgtgacatcaagttaaaaacatcgctgctgttctaggccgtaaacaggaccaactctcataaggaaggtttcagaagactagagaggtttgttgttttgttttgtttgttctgttctgttctgttttgttttgtttctctgaggttttcttggaaacttgagatcattgtggcccttgcggaagaggctgtaattcagtcagtagggtgggaggggcattggtggatgtggagcctggcattgtggacagaaacattgatgcattgaggtatagctgactcctcccagatgtgggactcaccacaaaacaagtgatgggcttctattcacaaagcaacaaggtttcggctagaatgacatgactggtcgtccctgcacccatcttaggaaatgggtgtttgtcttgctctgtccttctggggatgccacccacccaccctcccttactcctactccagcccctaccgcgttacatcgttcctagtgctgagcaccttccccttgtcctatagccaatgctttgtggtttggggtatcggattggaattatttacaagtaaatcttgtctcaccttaggaaaaacaaaaagcaaagcttccatgagagtggctgacatcttccctgcttggatcatgttctcaatgagcatttgtcgagtgactagattggagcagtttaacaactgtaaccatgttgttgtgttaaacagtgtaggatcactgtcaaagagaatagcatgctcccccacccgttacactcttaaacaagcataccacaaaatatgaaacttttagctatgtactactactgggtaacaagccaccccaaagcggatggtataaaacattttgccatgctcacaaattcaatggatgagcaggttagacaggtgctggagagtatgcgatcatcctttccagcaaagatgcttcaggttagagctggagagatggctcactggttcagagtacctgctgctcttccagggcacctgagtttgactctcagcacacatggcagactgctcacaactgtctgtaattccaactgcatgaggcttgacaccaaagatcgtggaaatgctggcctcttcttaatccctgctaatttctcagctcccagtaaaacaaaggttttactttagttgttctggcctcttcctaatcgcgttcttcacgcaaacagcccaggagaatctttctttgcttccctgtaaaacttcatacgccaggcctccattgcctgcatttctctcaaaacacttatcttccgagtgctcatagagcagctcacaagctttgaacactcggtggtttttctagccctgagttttcaagtcctacaatcctccccaaaacaacatgatcaggactattgtggcaataccccacttcttatactgatttctgtctagggttaccattgctgaggtcaacaccactgccaaaaagcacatcagggaagaaaggctttgcgctttatatcactgttcaccactgaaggaagtcaggacagggactcaaacagggcaggaacctggaggcaagagctgatgcggaggccatggaagggtgctgcttactggcttgcttctcatgacatgctcagccatctttcttatagaacccaaccaacccagggttggcaccacccacaatgggctgggccctcccccaccaataactattgagacagtgccttccaggcttgcgtttagcttgatcttgtggaggtgtttcctcagatgggattccctcctctctgatgactctagtttgtgtcaagttgacataaaactatccagtgtacctggtaaacccccaatctagaggtaaacgagtaataaattatatctagcacttagtttactaaaggtttgtggctaggtatgatgtcacctctttgaccttattaatttgcgaaggctcccaaggacagggatttgaataggaaagcagggagtgtctgtgtgaatttctgaactccaaaaggaatttgtgttagaacaaagagataaggctgatgactagtaaaaagtttattaacatacactgactacatatgtaggagctgttaaacgtgcctgttttaggaagagtgctctcaaaacttgccagtgactcccaaattgatcactgtctacctcacttcatctgaccaaaatgtttattgagctgcccaccttgttctacacaccatgatcaaagctgggcacgctgaggcgaatgtgaatcggctctgtgtctggaggggaatggtactgaggtgccatcccagaagaagaaggggcatcagggcagaaagaatgacccagtgggcagagtagggaaagatgagcatgaaggagaggttcaactctgagaaggatggatacgaatccagggagatgaggacaaaagaaagaaggtcggccagatcctgcagcacggcagccattggtgactctgctaaagcccgaggaagcagaatgacagaaaaatggagcacagctcaatgtgctgagtttgatgtgaagcttggaattttgatggccttgttttatggtggacaggggttcggtgtggtggggatacggctgtaagtctcacagaacgatggtcctagttcactgggcccccaagctgagcagacaggcccaccatggcttgagtaacttagaaatcccgtggagtcagtatggcttccctccacttttcagttctggttcagtgttttctcacaccactgaggtctagagaaaggtttcggctttctgggttacctcctctgggctcatgaaacagcaggcttgccccaggggtcaggacaccttctgtaaaagatgccagcatcctctatcctgtgcccccccttcctgtgggctcactcagtgaagcagatgtgtaatcataatttccagcatccaagtggccacgcgacgtccagccctgaaacatctattcaggacaaaattcttaaaacccccaggggttcagggtgatatttttctgcccagaccatgagactgtcattaaatgtaatggatggtgaaattgtaactgtggagaccggtttgtttctatgtccccagaagaaggaaactgcaactaggcatggcaagcacaccaaaagctacaggctggtctctcagcagcccgtaccatttaagcagttcttagctgactctatgcacaagccacttggggagttgcgtgtaaatcccttcccagaggaatgctttaagttcacttaagatacacgggaccacagagaaatttagttatattgaaaagcaaattagaatgcaaataaaaaattattagaccatatttgcaatgtggtaatacagatcctttttattaatgcattaattacacagtaacatctgaaatggctggtgtgttcatgtggagtctggtgcacgccagagcgcctctggtggtgctcctcgggtgctaagatcttttactgatttggaatgcagcaagtagactaggctggccagccactgagccataggactccaccgatcttggcttccatgtgtgaccagatcttccttccctttccccttctttctccctctcttccttccttcctcgctccctcttttttcctccctctatccctctgtttttctttcctcctccccttttctttctttctttctttctttctttctttctttctttctttctttcttcatgggttctggggatctagctcaggtcctcattgcttacaaagcctaagtgaatggtctccctaacaaagatctgtaaccttgaactgttaaacctaagttgaagtatctgcagttctaatatgatgggagaagtctttgactatgcactgtctgtggtcttcggtctttataatccttcttcagctgtgtgcatctttaatgaaagaagaaggataattttttatgagaagttgataaaaataacttttttcctctccacagcttcccagacctgtgaatgcccttctaggttaataatctctgatttaggatacaattttgattaacaataatgaaacaaaaacccatcattacttcataggttgtaagtcttcatttgttcattgttagttcttacatagttaagtcctgcagttttcgttgcaagtttttccctttgccaaaatccatcctctccaacacacacacacacacacacacacacacacacgcatgcatgcacatactcacacacatgcacacactcacacgtgtatacacacacatgcacatactcacacacatgcacacacactcacacatacacactcacacacgtacacaagtggctaactctaacaaaagtcaccctcacattttagccaggcttctcccctctttgtttaaaccaacaagcataggatgggtcttatttcacggtatttcacatcttgtttcccggaagcagaatctgagatatggggatttaggacaaagatttatgtggagagctgtcaaggtgagggagactgaatatggaggaaagagagagagaactgagtaaggatgctgagtcaagccccagccgaagcccggggaaggctctggtgtgcagtttatccttcccagtgaaggggagcgtgacaaagaggggcagtgagcttttacttgtgtgcatctggaagccaggagcacctgcgcatgcgtacactttccagcacgccgtaaaactaaaggtgtgtaatctcacagcttcggtgtgggcacggcctcgtttgaccttaagtatcaccaggctgcagttaaggtttggggcagttggaagcccagggctatcctccagactctgtggttgtgggcgaattgaatggtggccatgacaacttcgaggtctgcaagagactgtgtgggaaaccacctgagtaggtctacccagatcaccatttaactcagtctaactgatgcaggactttaattatatctgtgagcctcctgtgcctttgtcatataatgtaacatagtcacaagcgtgacacccactaatgttcagccattcccatgcccgtgagggggttattcaaaggcataggtagtgaggtcagttgcatgcagatgtaatctagaatgtggctggggtacacagctctgtacagagttcactctctcaccctctgccagtcacgctgactgtctgtgcgattgttgtcttagtgcttattgcaagcacctgtgatggacagacagtcttcactgctgtggactgagagacctctttccctgtgtgtctgtctctcccttacctttgtcgtgtggctttgctctgcaaggctcttctcaagggatcctcatggtgctgctgttcactgttgctcatgccaggatctcaagctcctccacacatagtcagtgtctgtctgtctgtctgtctgcctgtctttcctccccctccccttccccctctccctctctcactctcctccccccacccccatctttatttatttttccaatcctggagatggaacctgcctagggttttgcgcctgtcatgttagtatcctgctgcatgctttatctcctgacccctttttgaaactcccaaacactgtcttaatgagtttcccaggctggctttgaaatttcaatcctcctgtctcagcttcctaaatagctgggattacaaggctgtgctaccagacccagctgagtctcctcctcataaagtcatgcaaagtcgattctctccatctactttatatacaggacaggctcagagagaggaagcaagctgacctgggtcaaattctacgagagatggagctggggttctctccagcttgggctccttgcaaactttagtttcctttccagagcggctcctttccaaggattacctgttgttcctttgtctgtctgtgtgtgtgtgtgtgtgtgtgtgtgtgtgtgtgtgtgttcgtgcatgtgaacatgctcacgcacacacaccacccctccctctctataaactccaacgtagaatcaaactattactgacttttctcctttctgtcaccaaatgtgtgataagcagtcacaggaggaaggtttcatcttggcttgtgttttgaggatacagtgcatcctagcagggaaggcctggccttaggactgtgaagtagcaggttatgttgtaccagaggtgtagggatttgaagcttatcaacttcaaggcccatctccacttcctccagagagcccctccccaaacaggcaccaccagcctggagcccactcccaaaacacgtgagtaggtgggggcagggcaccacaacacaaacagatcctcagacaccccccacaacttgttggtttcatcagtagagtttgtggttttcatctgtgagtagagctatttatgcaaatatgcgaattggtacatccttgtccttactgagcactggtatgtgctgaaggactctcccacctatcagaccaaaaatctgtctgttagtgtgatggactgcacaaagagggtaggtggctttcactaagactgagggacaagagtcctgtggtcctttgaattcagccattttcaggatcctggttgatgtttgtaactcaatccttccagagataaagctttgtgtctttgcaaggtaaatggagtctggggagactgtcacagtcagaggtgcttttcatcacgttctgtttaaaattatttatagaatttcctccttagtttctttaattttgcctgtttgtcttctaatttataggactgcaatcaaaagcacacgtggcttccatttcttttctcatagaacagggagtagagttggctctgcgcaggtgtcctgataaagattggcttagcagcagggcaggagtatgttggcattttttcccattaaaaggtttggtagcagatttattgagacataattcataatgctgcacaatttgctcatttaaagcacgtcccagagactgtggcagcttgaatcacatggcccccctcagtctcagccatttgaatggtaagctcccaatggtggaactgttttggaaggatcgggagggtggggttgccttaatggaggagacgagtcagtatgcatgggctttgacatttcaagagactcctaagactcgtccgttcccaggatcctctctgtctcctacttgaggatcaagatgtgagctctctgcttttcctgttcccatatctttgcttcgtgaactgtcaccataagcccagttaaacagtttcttttgtaagttgccctggccgtggtgttttgtcacagtgatagaacagtaaggcagagagttttctcaatgctgcaaccaaatacctgacaagaagcagctcctggggggggtgggggtagcgttgctttgtcttatggctgggacaatatagtccatggtggcagaaaaggtagagccaggcagctctgcagtcaaaggtgcctgtggccagaattctcctcctcctcttcctcttcttcctcctcctcttcttcctcctcctcctcctcctcctcctcctcctcctcctctcactggagtaggaacaggaagagatgaatgctgactctggatttgtcttctctttgtgatgaagtctagagcccccgcctgtgggatggtgccactcacattcagggtgaatcttccctccctcttatcccttagagataaacctctctcaggctactctcatagacatggcggaggtatgtttctaggtaattctaaatccacccaagttgacaagtaaaattagctgtcacagagtgtgtgcatgtatgcgtgtgcatgtgtgtgcacacatatgtgtgcttgtactcgcgtatgtgtgtgatttagttttgatgtattggtagttctacagctattcccacaatcaatcttggaatactttcattatcccagaacgaattctgtgttgttcagtcacccctcatccagtttctgcatctactccctgaaccccaagcttcaatcaactagcgctggtaaaggaagttttacaaactttctttacatcagagatgctttacaaactagcacgagctgcctgccgcttactgtttgtgtgtgatgcagcgtgagcacactatcatgctaggcatactggataactatagatgtcacccctctcactgtgtcctgtgtgcctctggggctcctccctgagctttccattcattcttgttgacttgccggggtcacaggtcctctctcctgctgtgtctgctttaccgctggccaagagctggtatcccagcagcctaactcctgcccttgattgatctctcattctcaagctcttctgcttctgctgtggggatttccagctacctagagggtgagtgaagccttgggttcacactcctctctttgctcctctctctctttgggcccctgggtcctcatcctggctgcctctgagcatcccaaattcctggcagaagctcagctcgcagatcctcgttccacatggctacaagtctggatacatgtgaaggtgaaagagccagtaaatggcgtggtactctgtgtgttctcttcctctctgggggctccaggctatgaagtgctgaccctttcatggttccctcataattttaaaccagtgttgggggtaaatagagactctctctctctctctctctctctctctctctcactctatctcatgcacacacacacaccagcatatgtctatgtgtgtctaacttttccagttgtcagtgggaggaaatactaaatagtatttactattcctagacgtggaaaaaccttttgtgtccttttaaaccaacctcccagtttacgagaattttaaaatagcctgcaacattttagctgctgttctgatagcatcccgtggaggaggatgtcttctgagagagcagttaataggcaacttggccactgtgtgatcgccacaagcattctcatgcccactaggctggctgtgacgtcaccaggagctgcccagtctctgtgggttgaggaaagtgtcattatgcaacccagctggtttgtaagtagaagcacgggatgccattcccggcttgtggggatgtctgtgaggccaacacaggcagaagtggagagggttggccccagagaacacgtgagagaggattcaggatagaagggggggcgggggcagaaaaatcacatttacaaaagaaaaaagaacattgaggtttcaaaaacaaaacaacaacaaaaacccacttagtggactttcccccaaagcgatactctaacttaatgatagctgctcatttgctgaattcacttctgtgtattctgcaaatttaaagtgaggccagcccttcctgtttttatttaatttgccactgtgagccaaggaaaggaaaaactgtcagttactttttttttttttttttctttttccagaggggaaaagcagctatggggtagatttccaagtcacatggctagccagctggtgccacagtgatcaagcccagcctgcttagggcccttcagtgagaagtgggactaagtcaccctcaactcctcccaaacggtaacgcgtgtcttctttaggcccggagaggtgttcctgcctctggcccatggttgggtcctggctccagcccacccatgctgaacttttcatttatttttcaattcttattttaaattttaatttaattttttcccttttcactttacatcccactcactgcccccctccccgtcaccccttcccacaatccttccccctctaccctcccctcctcctctgagcaggtgggagcctctctgggtatccccccaccctggcacttcaaggctaggtgcttcgtctcctactgaggccagacaaggcagcccagctacaagaacatatcctgctcaagaacagctgctgggatagcccccattccagttgttcattctctgagaggcttcacccagcagctgactcagacagatgcagtcacccatagccacacagtggatgaagcttggggactcttatggaagaataggaggaaggattgcaggcactgaaggggataggaactccacaggaagaccagcagaataaactaacctggaccctcgggctctcaaagtctgaaccaacaaccaaagaacatatacaggccggacctaggcctcccacacataagtagcagacgtgtagcttggtcttcttgtgggtcccgaacaactgaaacgggggctatcccaaaagagatcttttgtttaaaccttcccagcctctttccaacccttctgccaccaataccgttgtgctacagctagcaaagctttccagacacagcctgaaggatcatgtgaaccctgtgctccctagcgcttagcgtggggttcactcagccttaatcagggacaccagggatctgattgttgcatgagccaccctgcccctgcccatgagcctgacttttctgtctttggatctatatggtcactagcacctctaagcttcctgtgcactgctgtaccagctgtaccagctgagccttcacccgttgtctggcacaagtccttctgtcttacagctcaacccacgagaacctctcctgggaagccttccaggcctttaagaataagacgtgatcgtcctttgtgtcctcaaagtcacctctaccctagtgcatggagtaggacattgtcgtggcttggcttttccctccggaactgttcgttccctccgggtctttcatgtctgtctcctgcccggcacaatgcctggcataaagtaagcacccaataaatttcaaatggaccatgtgttacattccctattaaataccccagctgcggccggctctgccaccagcctgggtgtcctccctaagtgtgccttcagttttcaaagtagtcctgatgccctcggcaggaaaaggttgcctctggcctctccgcggaggaggattaatatatagtcaacccaagaggtttctgtttgtagccttgagagatggtgcacgccggtgatcccagcactctggggcggcagcaaaatgatcaggactcatctttgattgcataaaaactttgagccagtctggggtagatgcgaccttgcctcaaaggagaagaaaaaggaaaaaaaaatcagcttgtagtggcaactttttaagtagtaaaagttaagccactgtggtgaatgccagagagccacagatttctactctggccagtccctccacttaatgtggtgtggaacagaaggaagcaggacttccaaaaaatgatggggaaacccccaaacagcctgctattttccctctgcagcttggagcagcccagtctgtggaaaggagaggctaggcttctgcagggcctgtttctaatccctgcaccctcctctgcctctgcccacctctcagtgtggtttgaatttcccaactgctcccagctactgcaacaggaagcaggaagctgcttttccaattcattcattaaagtaggctcctgcagttgctgccagagaatagcatccactcctagatgtcagcttatagtcatacttcaaactcagacacaccatgaccgaggtctccgtccctgacagtcactgtgcgtggtcataaacttacaaacactctcacttcatgcccttatttcctagctaccaatttttcatttatctctttgatgggtgtgtattgtgcttttgtggtgggggcttggggactatggtgtgtgtgtgtgtgtgtgtgtgtgtgtgtgtgtgtgtgtgtatggggtagtgctcacccacacatgtgcctatagaagccagtgtatcttcctttctcatccctgacctttgtttccgagacaagatttctcagtgaacctgccctttgccattttgcctagatcaaaccctccggatcttcctgtctgtacctcccctgcattagggttacaagtgtacaccaacttgtacacgcccatctttttatgtgggtgctgggcacctaagctcagccttgtaggacaggcagcttttcatcaaactatctcccaagccctggaatgagacattttttaaaagaaattgctggaccctaatgttatctgaatggtttttaaatagcacttcatgagctatgaggtgattacatacacatacctatatttgcagcactcgggtgactggggcaggaaggtcctgagactgaggccaacttgtactgtgcatagcacacacaaagccagctctaaccggctacacagtgggaccctcggcacagcagcaagccagctattaatggacagcaagaggattcccttggcttttggttcctagaactctggtcctaccacatgtgaggctctgggatggagctcctgggtctctgttgcacccctccgtaaaaaagcaaacagaaattcacccaccagacgttgtgaggattgagtgaaaacaagcttaactcagaacttagggacggccctgaaatacgcacagccgtccagccatgtgccctgggactgctgtccctcccctgctctcaccttccccgtgcccagagcaacagtgtccttgtgggcttactttgacatgaaatacttaaatattaaagtgcaagaccttgaaatagttaaccaacctcaaagaaacaccaggactgcatctacaaacgtgcaaatttgccgtctgttcatctgcctccctgcctaccagcaaccagctttgaactctggctggagtcagtaagctgggggtgcctggatcctaggtacatgtcttgctcctggaaagatcttgagtcttaaagatctgccctaagatgaggagttccagagaactttctggaaacgctttatctcggatgcttgcgtcactttgctggggaggtcttgtatttttgtctaggctgaggaattgactcttttccccaggtggatgttttactgaacacagatgggcatcatctgcttcttgtccaggcacctgcctctgatgtcactgtgtccctttgttctgcccccacccccccagacctcacctcttggttacatctgtttcccatcttcccttcactgactcccctccagaaccattgcaggaagattctagcatccaacacccttgactgcattctgcatctcaacaccctatcataggaagatctatgagaaaacacaggatgctgtgactcagtagaccgggaggccacaaccccattctcggacacaaccgaagtaaaaccagaattgacaagcaaaacagcgagatgctgtttatttaaccttgctctattttggtgtgccctgcccccacacttactaagcagactgccccactctgtgaaccaactctgccacagtctatgggctggccacctcccttcgcttctcaggcatatttcatccaaaatgggggtcatttgtcatccttatagtcactcagtgggcatccttacaaaggacactgatgttccccggggtgcgtgctgagcatagagatggcagagaagttaagagccaagctgcttggcccgtgttctctcacatctgtccccagctgtcccaaagggcagccatggctacctctgtgggagggaattggctgttgtaaaaggttgaagaatgctctcttttgggtacttcctgagacatttggaacattccaccattttgaacacaacaagactccaatcctaactccttcagacttcacagagaatagtgcgaattcatgcgctgtttgttcaagcctcctactgacaagccacacagtaagatgctgtttaaccctgctttattttggtgtgcaccccccacactgactaaccagtctgccccactcctagggaacccaaattccattctgagaaccatctctcccttcccttgttccttacaaggcctttctcggttccctgcaccacaccccatgttctctatgctggttttacaaagcagagagtctggcctcctcagccttaccactaaggtagacaacccccagataatatgctggcgcttaatgcaagactactgacccgcacgactcttgcctctaattctcacctgtgagcatgtggagcccagagacacccagagtcagttccactgtgcataaagatcatgaacttaaacttgaaaagccctggtctgtgtcctgtggaactgagtcttgggccttccttgttcttgtcctgtgtggtggtaggatatgggagagtgttgtttatctctagaagccacagcgtggaccggcatcttgtcttgtcttccctcctatagtgatttgaaggagaactgtatccaccctacccccaccccgccacttcccccagcccctgcataggctccaggatttgaatacttggtctctgggccgtaaagttgtttggaaaagcatagaagatgcagccttgcttggcggaagtgtgtcacaggaagtgggctttgagatttaagagtctccaccacttgtagtcaccccccaccaccaccgcctcacctcttccagctttgggctttctgttccttccgcttgctgccatgttccccaccatgacagactctaataatttgaaaccataaccccaatagactcttctataagttgcctcagtggtaatgttctatcacggcaacagaaacggtaactcccgtcccaccagtccactattcctttgggccttgaagtccttgagttctagagaaatgagcacaaacttacatctgatgtcaccgatggcttcaccaccacagacactgtttggagcagtgttgctgggtcccctgccctgacagaaaacactgatctcaatgcagaagtactgtggtcatccacacccccatgaaagggttaacaaagagtgagcagatgctctccccgcccccaactggcatctaagtatgcacatgctgggacgagttaggtgatgccttctggatgctctggagaagaggattagcatcatgcacggtagcctgagaaatccctgcctggcaacagagacccagacaaattgacctttgccctgggcctcacctaccttgcctacaagaaaaaccttagcttgtgcacgtggttataaggaccacctgaggtgagggagtggtgtgacgggtgggtctttgtttgtacatggcagaatgagtccccaccatctccagatgtccactgctaatgttccttcttgtttgctgtcgcagcggagagtccaggatgtcatcagccccattgtgtttgaagccgcctacagcctggatgagcatgtgatgggtgaggaagaccgggagctgccagacctgacaccagtgcttcgctggaagaagggacaaaggatctcccagaagaatcaggttagaacctgtctagctttgtttctgtctctggtaaagagaccctggcagaaagcaactcaggggagcaagggtttgttttagcccttgacgctaggttacaacccatctctgtggagaagtcaaggcaggccacttgaaacagtgagccacatcatggccaccaccggtgacatcaacagcaggggaggagagggagggagagagagagagagagagagagagagagagagagagagagagaaaatgcatgcatgtctagcactcaactagctttctctacttaaacacacccacacacatacatacacacattctctctctctctctctcacacacacacacacacacacacacacacacacacacacacacgcacaaacaggaacgtgccatttgagccctactggtcacttagactcataacaagtacaagggagatggaggggttagaaggacatggggtttttaagtgagtgaggcagtgtgcagggctagccttatggtaaagcacaaagaaagcagggagcagaagacaggaagatggttaagaaccagtcactgggagctggagagatggctcaactgctaagagcattggctgctctttctaaggacctatgtttgattcctagtacccacacagtggcttactgctgcctgtaattcctgttccagaggatctgatatgctcttctgaccagggaccaggcacacaaggggcagacactcgtgaagacaaaacattcatacaataagtatagaaactctgtgtgtgtgtgtgtgtgtgtgtgtgtgtgtcgtgtgtgtgtgtgtgtgtgtgtgtgtgtaatatgatcaggtcttccctaaccatggagcagtgacaagaagtcagcctggacacctgttactattcagtaattcctggtaataaaaccccagtctagaataatgactactctgttccttaaggcaaaatcttgctagcttaaaaagcaaacaagcaagcaaacaaaacctgcccaagcttatattgtaatacttgatgttttagaatctacctcagcaccctgtgtttgtcgagcctctgtactgatcagggagacagtcgttaactctagtcagcttgttgtagctctcagcagactttgcctggccctaaccctcattcctacaggttcatagagtgctgaggcgggtcttcctcactgaagaacgtcttaaaacctttactgactaatgttgactaggacagccagtgacccaatccaagccagagataagggaaaagactggtatcaaaatatcattcttggtcactccgggctctttaattagcaggcatatgaattagcagtcagccagacagttgattcattgttctctgaagagttgaataaactgcttcaggcaccagtatgagccagtcttcactgactgaaccctacttccagaatttgaagtccccacagtaagacctagccttccactcagccatccacccatctacggaccaaccaatcagtgctctgccctaagtatgagctggcaaccaaggacaactgagtttacaggatgtgggacacagaaaagaaaggccaactgacataaaaataaacagaatattttacttagaaggcagaaggttattctgtaaataaaaaaagattataaacttttattttgttttttttgatacaaggtcttgtcgtgcagcccagactggccttgaacttgtagtctccctgctttagcctcccaagtgctgagattacagataggtggggtcacacccaatctgagattataaaagctctctcacagtgtcttagtcagggtttctattcctgcacaaacatcatgaccaggaaacaagttggggaggaaagggtttgttcagcatacatttccacgttgctgttcatcaccaaaggaagtcaggactggaactcaatcaggtcagaaagcaggagctgatgcagaggccatggagggatgttctttactggcttgctcagcctgctctcttatagaacccaagactaccagcccagagatggtaccacccacaatggacccttcctccttgatcactaattgagaaaatgccttacagctggatctcatggaggcatttccccaactgaagctcctttctccgtgataactccagcctgtatcaagttgacacacaaaaccagccagtacaattgaccccttgtcaacttgacacacaaacacatcactagtaagcctcaacccttacattcttattcatccccaagatctaaataactttaaatgtcccacagtctacatagtcttaaaattttgatcttcttaaaatatctaatcttttttaaaatccaaagtctttttacaattaaaagtctcttaactgtgggctccactcaaatacttccttccttcaagagggaaaaatatcagggtgcagtcacaatcaaaagcaaaaatcaatctccaaccatccaatgtctgggatccaactcacgatcttctgggctcctccaagggtttgggtcacttctccagccctgccctttatagcacacaccttgtcttctatgcttcagcagcctgtagttcactgctgctgctgttcttggtggtcatctcatggtactggcatctccaaaacgctgctgtctttcactgcaacttggcttcaacaatagcctctcataggctctcttcatggtgccaaacctcaactcctttgcatgaccccttcagtcctgggccatcatttgcttctgaggctgcaccttcagcaacggccttctatggcctttcacagtgccaagcctcagctgctctgagtgaccccttcatgccttcaaaaccagtaccacctgggtgactcttacacattaccaatcccagccacagcacaaggtacaaccttggctatctctggaacacagcctctgtgctctcagaaaacacttcccagaagatgtcacctcaatgatgctggtctcttcttaatcaccgctaatttcttagctccagctaaccagcatcaatagtcccagcaatgcaatagtcccagcatagctaattcttcagccccagctaaccagaaccacagaatcttcacaatccaaaatagcaatggccctgaaaagactctttaattttccctctgaaacttcacaagccaggcctccatcttctacacggttctcaacattatcttccaggctcctatacaacatctgaaagagctcttaacactgaatggatcttctagcccaaagttccaaagtccttccacagtcctccccaaaacatggtcaggttgtcacgggaatgccccactatgctggtaccaatttgtcttagggtttctattcctgcacaaacatcatgaccaagaagcaagttgaggaggaaagggtttattcagcttacacttccacattgctattcatcaccaaaggaagtcaggactggaactcaagcaggtcaggaagcaggagctgatgcagaggccatggagggatgttctttactggcttgcttcccctggcttgctcagcctgctctcttatagaacccaagactaccagcccagagatggtcccacccacaaggggcccttcccccttgatcactaattgagaaaatgccttacaattgtatctcgtggaggcatttccccaactgaagctcctttctctgtgataacttcagctgtgtcaagttgacacaaaatcagccagtacatgcagtaaaggtgtttggttcacagtggccactctgtgtggctcacaaactcctgtaacatcagctcagggtatctgtcaccctttcctggcttccaagagcacctgcacacatgtgcatatgcacacacacatacacacatacacacatacatgtaaataataaaaatcttaagtgacctgttaagcaatgctatggttcaaacagaaggcatgttagcctgggatttggggtgactggatgaacacaaggaagaggagggcctgggtagcggatgattgtctgttaagttaaagccatgtgctcccagcttggcctctgtggaaaagaacatgtagtcaagactacattggctctaatgcaaaatcacgtagacataacaacatgaacacttcttatagattttggtctctgcctccaagccagttcatagcaaaaacaaagacgtcatcagagtgactggattgtagatgaataatagttctcttaaaacttaaatctcttagtatcttttttaaattgctgagctgggagagattgcagaacttaatgaaacaagaatttgctgtgcattactcgaaatgcagaggtcagcaatagtgtcgtggcccgaatgccccagtgccagtggccccagctgctttgggatcatgtaatagaaagtttgggagtagggaagatggttgagtgtctaaggggcttgccacacaggcattggaaggtagggatgggaagagcgagctggctaaagagactcgccatattggcaagctttgaatttgattaagatactctgtctcagctgctggagagatggctccgtggttaagagcactgactgctcttcagaggatctgggctcaattcccagcaccaacacggcagctcacaaccatctgtgactccagctccaagggacctgacacccgcacacagacacatgtgcagacaaaataccaatgcacataaagtaaaattaatcaattattatttttttaaaaaaaaagcccagcagtggtggtgcacacctttaatcccagcacttgggaggcagaggcaggtggatctctgagtttgaggccagcctggtctacagagtaagtcccaggacagccagggatacacagaaaaaccctgtctcaaaaaaccaaaaaccaaaaccaaaaaaaaaagatgttctacctcagtgaataaagtgggagagaaactaaggatgactcccaatgtcaaccctgtgtctccatgtgtaggcactcctttccacccccatacttgagcctacacacacacacacacacacacacacacacacacgagaactgacattgacaaaggaaaagagaattcccggacccacctagacacatgaaatcagaaacttatgggatgacacatggcttttaataagttgaccactgatcctgacacagctagtttgggacctgcagcagtagccgagctaagagtagcagtttgcctgtgagataggaaggagtggggggagtggggggggggaggagctgtggttagtcagtccttatctggtgtcaggaattcagtgggacaatgcattcatctggtaaactgagttgtcacatcagtatgctttctagagacacagaaataatcaccaagataaagacaatcagatgcttataacagtgctttcccttcaaagagacccggcatgggatgtgtggggtggagagagagtaatctaactttttttttttcaaccatgtcattctctggttgaaattaaaataaaagaaaaatattgttcttagattggaaggattgcccaggagcctgagactttctagggaagccgttcttgcttattcttctttgcctgattatgaaaaacaacaaaatcgagtcggcttagccatctccaccagccctccatgtggcttccagatgttggctctatcaaagagaaaagcaatggggcagctagcaagggccactccaggaagcagggctcaggcactatctctgtcaccgagagctcaaataggacacagtagtacacggatacccctcactcccacccccacccctgtcagtccccccaggctcagcccgaacagcttctcacctagatggtgcaccacacctgtgtccctgaatagcccctctacggctttcctctcagagtcaacaggacctcgaacggtggtgccctgatccttcagtgctctccagggtcacccacacacttcagtccagccacccccatacttcctgtgctcttccagccttgggccctgctggcccctcttctgtgaaggtttccatcctactcttctcaaggccaggctttgtgtttgaggtttcaccctgaatgtgactacctcagagatccatctcagctcccccaactcagcttcctgtctgctctgtctatgagctccatcacaatgaattctatccaatgacttgatcatcgcctacactagatagaagcccagggagtgcagagatcttccttctctcattagctattaacccccaacacctacctccaaacctggtctcacgtgagtctctccacagaaagagcccttgtgaaggaacaaaaacctatgccattctgcaaggctgctgctcaaagacataggatatgctgtgagctcccactgggattccctccttaaccagtttgtgctgtgatttgcagtgatttttgccacaggaatgtgtgtgtgtgtgtctatttttcaaaccatcaagcagaggaaatggtgaaagagaagttgtttctctctggcattttgtcttagccacgtaaaggtagaggagagggggtggggagaagtcaacactgggtttggtagctcagtaggcagagtgcttacctagcatgtatgaggacctgggttcaatcccttttaccatggaaaccaagtgtagtgactgaatgtctataatcccagtcctcaaaaggtggaggcaagagggttggaagctcaaggtcacccttggctacatagcaagctcaaggccaggctgaggtagaaaaaatactgtccattactattctgtttttaaaaggtcatgggtgcacacctttaatcccagaactcaggtggacttctgtgagttcaaagctatcctggtctacacagagagtgccaggccaggccaagtcagactgctctccatagagttccaggtcagtcaaggctccatagtgagaccctgtcttaaaacagcaccaacaaaatgaactgattgtgcttcctccatctggacaacacttctgaaaccatcctgcactcttaccatgggcctcatgcctcatgcctcatggatcttactgttgttttgttgttgttgtggtggtggtgggttttttgtttttgtttttgtttttgtttttgtttttgttttgagacagggtttctctgtatagccctggctgtcctggaactcactctgtagaccaggctggccttgaactcggaaatctgcctgcctctgcctccaagaagtgctgggattaaaggcatgcgccaccatgcctggctttttttttttttttttggttactgttgggttttattaaaataaaatagaaaccaaattggaactgagcaacctattcttaggttagggcaattatacaacgctaaatcccatgccaggtgtggtggtttgaataagaatggccccttagtaactatgatcaggaagtagcaccatttgggaagggctaggaggcgggccttcttggagtaggtgtggccttgctagaggaagcatgtcactggggctgggctttgaagtttccaaagcccaagctagccctggtttcttctcttcctctctgcccatgaatcatgccgtagctctcagctactattctggcacctgcctgtgtgccaccacactccttggcaccatggcaatggacaaaactgagatggtaaccaggccctcagttaaatgtcttggtcatggtgtcccttcacagcaatagaacaatgattaagacaccagatgacaaaggatcatataacacttgcacctaactggggcctctcatacctggagcagtactgtgggggagcaccaagtcctaaatgtcacatctgtggtcctggcaaatactacagtatgaagcagacacctgctgggaagtcacacatggtgtatcagactacatcttgcttgtttgcctttaagtagagccttcttgattagcccctttgggtgggatttgaaacacatttactcaacccaacccaattatcaaaggcttcagcctgggacttggttgccttagcaaccgaatatacagtgtacagcccatgtccataattgtagtttaatctaaaagaagtattgcctctctaagaaactggcccttctctgatcctaacagacacatttaatacttatccttcctgttacctgagaaggagggatttttctagtatggctgtggcagtagaaatgggtcccaggaggccggagcagctggagccacccagtgagttcccaacccctcacttccatgtcccggtcgctgtggtcgctgctttggcaccacgagaaaaactcacaaccctgcctcagaggcagatgccatccgaaccagatgcatccttcccaaaccacagcccaaaggtggtaaagacttcattagctacatattaaacagtaggagtcagcaggccccagcctgtggccaagtctgtttttgtaaaataaaaaaaaaaaatttaaaaaagtttgcttgcggtagttggcagggaaggtggatcagtggcaaaaaagcttgctgcacaaacatgagaaacacattcatacccaagaacccgtataaatcctggatgtgactggtggcccacctgtaattccagccctcacaaggcatgaatagacaggcaatcctctgaacaggctgcctagggaggccggtcacgtatgtgagttgtaggtctcctaagatacctcgcctcaaagaataggtagaagagtgatcaacgattactcccagcatcacctctggcctccacacgcatgtccacatacatgcaagcatgtataaacacacacctgaaacacacatgaaaacagaaaaaggattctcacctatgcccatgcctatgcacagacagttactgcatggtgcgtttgtctgtggagtcactggaagcaagacagcaaagatcacaaacgcaatgacgtccaatttcactcttcccagccaaaatttgctagccccatctttttaaaaaatccagtaaggatacaatgagaaatgagaaaagggattttctggatgaaagtgtaatccccaggggtacccagggtgaagagccgggtgaggaagaagccccaagaagaacctgagctggaggctgctgggcgcgctggccctcagcctcaggagtctgagacaggaagcgattatctctggagagaggttttagcttctcgaaacaaggagagatgagctcgacccgcatggctgggaaggctgcttccagggaagtgagcagtcagggccatgcagacctgcaggtagaggctggagggcaagagaggagactccagccacacccagtgtagcctggtctgacagaagtgccacacttgggttttccagaggattttgggtgcaggtaaaagtaacttgacaggttcctcagggaccaaacttacagctgttgggattgctacctgagaggaacactgtagctgggcccttaccttacagccatactctctgtgcttcatgccaaggagaaatttctcattattcctggaaactctgtcctcatccagcctgttgaagctgtggtgtgccagccgtcttacctcccagagatgattcctaggaaacaaattggccattttcccagaagagactggtccaggtccaggcacgggaatcaaatttcaacctcagcatacaaatgtgtggacatgtgtgaccaatgtgtgtatatgcacatgcatgcacacacacacacacacacacacacacacacacacacacaccacttattgggtacaggactcttgatttaatagtaaattgctgttttgatccttaaagcaactgctttcctaacttactaaggggcttgactcagtccaggttctaaatcatgcatcctgctcttgtgtccggtgttcctgactctaggaagaatactgggctggcagagtgttcagtgaacactctgctatcagactgttaaatctatcgctgcacaaaagaaaagaaaagaaaaaaactcagaaatttggctcccattaggagtcaaggatcttatatgttgcaccatttcttttttaatttacctgctgatggttgtttccatattgttgctcttgagaacactgatgtaataagtgtaagaatatagccatctcctcaaggtgcatgtaaactccacatgcacacacatgtgaacatgcacatacccatgtgcacacacatgcacatgttaataaaagaccttatctgtaattactgtaaagagactaaacccatgcaaataaaaacatatagtgatggaataggttaaaataacagaatatcaaactatctgccagaaattcacttctggtccaacagtgtacatatgggcaggaaaaagcctacataaatgttaaccaaagaaaagcaagcatagctccctcacacatacagacttaaagtagacgttaagagcaagaactgtctctgaaggcagtgaaggtctttacatagtaataaaagtgtcagaggggctatcaacatgttatctctcacatcagaaaagttacatacataaaacaaatactgacagacctgaaaagggacataggcagtaacacaaaactcaaccctggcaccttactttcaactatgggtagatagaggttctacacagaagactgctgtcttccttactattctactgtaaaaggataacacgatcaaggcaaacttagaaaagaaatcatttgaccaggggcttgcttacagtttcagagtccaggaccatcatggcagaaagcacagagccaggcaggcaggcaggccggcaggccggcaggcaggtgccaaggccaggcttgacatcaggagggttcattgaggcaggcagtgaaaaggggtatggtgttagcaagtggggtcagctgacagtctgatgacagcaacaggcaatttacagggtctgcactactgatgtaacaaaacttaactatctgggactggcaagaacactcagtacgaagctctgaactcttgtaatttgtaagtgtccatatgtataggcagacagacagatatacatttggtggatggcacagagccccaaagccacagctatacatttggtggatggggctgagccccaaaagtcacacactattccttctctctggtgagttatatcttcttagaccaaaattctttataaaattacttcatagataaaatgttatacaaagagagagttacagaaagatgtcaatagtaacttcaaagcagtgcttcattctctaagctcattacaagttcaaaacaacagtttcgcatggccttgctttatcatggtgtacacctgtggcttcatccttggacctgactcagagtgaatgtttttccctgatcacaaatctgtcccaagcctatatctcttcttagtgtaattatgaaggctcattgtactatgcagcctttgcttactattctgtgaggaggtggcgcattctattcgtgattctaactttattgcatctgtctggcaaaacaactaaaaccatctccttaagcgtttgtcttaaaattctttgaatcaaatgtggatttctataaagtcattagttcatctaaacagcattaattcatgaaagttcatcttcatgttgatcagcaggaaattttcccaatagggtgtcctgatgcccaggaatcattaggctgtgtaataataacaggaaaggcatatcagcagtaagaagcaatcctgggatgaagtctctgaagctgtgcctctcaagaatgcacccatcacagccatgtaaaaccgtgggctatctccaggaaactcatttgcttgccatagcctttacctggacggcttttggaaggcaggcaagcaggcagggcactagagcagtagtagctaaggacttacatcttcaagcataaggcagaaagagattgagacaggaactgttgtgagcttttaaaacctcaaagcgtaccccctgtgacatacctcctcctccaacaaagccacacctcctaatccttcctaaacaatctaccaaatgggacccaaacatttagatggcctgtggggatttgggtgtgtgtgggggggggtgcattctcattcaaaacacaaccaacaaaggaacaaaacagttaggcagcattgtagatcaatagacccaatagacatgcacagaatgttccacccaacaaaagatcacccaatgaccacccatcttctacaacgcacaaggaacagtctccacaatagacttcacgtgaaaacacaaatctcagcaaagcttgaatcataccaaatgttttttttttctgaccacaatgggttaaaattaaaaaatcaacaacagaggaaaaatgagggaaatggtgaatctgcttacagatttttcatttggcagggcttggtcaagccacctcatctctctgtacagagcaagttctcaccagagactctcaagtccctgacagctctactcctatgacaagtccatcacgtgggaacctctttacaaaaacctggggtttccttggctcaaagtagctaagttccaagaacaaataactaggagaaagccctgttgctttttatgtagttggcttagaagtcatatagtacagcttttattgtagccacagaccctgctggtcagcagggaagcagtcattagtgtgtgcttctctgtgggaggcactctcttatagcgttgtaaggagcataatgggggagacatttctgagcagatccttgaaaaataccttagtctaccctgaagcaggttcacatctactcctctttcaccatcaattaggaagtctcatggtgcctacttgtttaaactgtaaaatttgaggggggtctttccaaagatgggtagtagggtctaagagctgagttgtcagaggttggaaggacagggtcccaaacttgaagtatgtttgtcacaggatagattgagatcccattctctcctcagttcttacctctgtcagttgccacctctgaagccacctcttcccatcaccactcctggtgccacctctcccactcccatacttcatcccatgctgtctacaaaaggctcactttcaatcaagggtgcacccagggatggaaagagttcatgagacaaagctggagtagctttgccttagggaacatagactgagtcaggtcctcctgtcactagaggcaaagtcattacacggttattcaaaggttccaaccaacaagcagactccaggtttataataaatatacacctgaaattggaagagcccgctgtctcacttgcctgtaaagtaagatcaggaatggttttttgatgtctgtttttttgaggacctgatgttatatgattgagaggatgaatctaaaggaaaatagaaggtaaaattatcaatgtaaggtcaattgaaaggcctcagcagggccataggcttgcctatgatggactggcaagcttaagtttcatcatcttgttaaggatgcctttatcctcatccttgcccttcccttcatctcacttaaacatctgcacatctctcctgttctccccttggtggtgatgaggtatcacagacgtcttttattgaagctacactggaatttggcctttcccttgcttcagtagggtccaaaagaacacaggaaactgctctttcccccaagacttccatgataattaagaaagggaatgttggctgggacactttattcttttagaaatgtggcatgcgattatgaatttccatgggcaaaactaccctgtctagtagagtctagactttctattagccaacaggcttgctggagtccctactggcactgtgagaggccatgtggactggtagtgtgtaagggaacaaactgcctagaactgtgcttgggtaggaggggaaaacctcaccgacttgaacaggatccttgaaggtgtttgaaggttgataaatcagagctagtgaagagcaatgggctctcctttacaaatcctcccgaaatggtaaaacaatgggagctatggagcaccccattgcctagtagggaggacattttccatagatcagaacatcagagagatggagaccacaatgagaccacagtgctcacatcctcctactctgaaggaattgcagcctcagctactgttgcttcccatcacgtgaccaaccttcataggcaggcccacactccagagcatccctggaacctgagccacttctaacccactgagtttgaggccctgaactgagtggagctttgactgccgagggccagctccggtgagagaaacaacgttctctgcttacctctgactgctaaaatcatccctgtcatcttgcattctcagccctaaggcctctgggacaaataattcaacatggcctgagtgcttgtgcagaaaatggttcaaggaaagactttgttcctccccaagagagatcctagaagagatgaagagactggtgtctcaggatacctcacacagatggctggtcactgatgtcttagaccagcatgtgctgaaaggcatctgtcatgcatggccatgcctggcttttctagagtgctaggtgtgcaaactgaggcgttgaggctgggcacagggaagtgttcttacctactgagccatttccccagccccacctgcatgcctccagaaacaactccaggaagcactcagtcatctgagcattagaacaagtgatatgctcatggccttgggaccactgttgacagggatttcttggaaccttgaggaagtcccctccacacatccaggggctgacttcctggggttgggggaaagtgcctggagggtgctggtttgcaagtaggtggttggccattatttttgttcgtttaaattttgtaccaacacccgcctcttctctcccacagacagtttttgaaaggaattgccaatctgaggactgtgctgccgacctgcagcttcgggggaaactcctgctttccaggtaccgttccttcatgccaatgtcctaagaacctgctctcttttgatgctacaccacaaacctggaagttcagatttcccccaacaaaaaagaaataagcagtgtggatgagttaggatatttctgtgagttggttttagaatgtatgctataaatactaatttaatagcagatattaccagagggattagctgaggtaccgtttgcaattccatcccatctcacaacagactggctgatccttatgatttcgatgtttatttatgtgttggggcgggacttgacatttattaccttgtattacattgcactatgggaaactgccagcatttgacctttggggatggtttcatgtgacttaaggtagtattatttgaagatctctttcatctttttttcccctggcatttaacagtagtgtctgttttagcagtgaacagtttctgaggcaggaaggggtgagggaagggggcagccggcctggcgttgcaagcaaacagtctctttattatttcaggccttcctcccatggtctgcaagtcccccctggccagggatgaaccagaccaaagccttctgtttcccctttgccaaccctttattttagacttctcttagaatgacagtacttatcctgaatcagccacagggcacacaatggtttccttttgtaacacgccttctgaaagattatagtagctttggggccaagaaccccctctgcaagatctgtagccacttttcaaacaagtatcagtgtggatagatactgtgtaaaatgtttcattgtgtactcgcccttacctaaaacattgagagttaagtttggatcagtgatgacagacagctaggacctttctttttctttttccttagttttcttccttccttcctttccttcttttctttaaagctagtcttacgtagcccaggttggcctctaacccccgtctgtttcagcctctaggtggctggattacaaatggtgtatcactatgcctggatcaactgctacaacgttttcttttttctgtgtgtttgtgggcgtaggagccagaggtctccatcagatgtgacagtgtccgggctatacagctgttttctgagatagggctctcttactggctgattgactaggctgtcctgcagtatcacctgcctctctctccacagttagacttactagtgtgcagcaccatgcctggctttttatataggttcttggagcagactggaggtctcatatctccatgatgagcactctatccactgagccatagcctcagtcccacactcttatttggggtgtttaataatattttattcatcaaaggaaaatcaaactgagattccattctttacttggagtatacctgagaaggtagcataagctccaagaccccacccccaagtatacacacacacacacacacacacacacacacacacacacacacacacacgctttccctgctacgtacatcttagatgctaattggctttggttcagttctggaagaagtggtggcttaaagtagcacatgcttttctaagcttgggaaattgctttagacgcatagagtgggtaatagggttgtttaacagtaagaagagcctcctggggtggttagagacatcaattttaaagaaggttcataaattatcagctcattcattttaattttaggtgtgtcttccaaaaatgtgttttagggaaagtacgtgagtttctttttatgttgagctggaccataaatgctggggtttattttggatcatagaagactccatgtggtaggaaaatatccacttgatccacggttaaacattgctaggaaagttctggcgcccttgctggccatttgttaattgtgctttctgtgtagcaagatggaaaactcgaggattgtggtcagcaaagcacttttggctgaagttgcttccctttctggcctttcaagagtgttgtcgtcgaggcatggcaagaaaaacccaaggatgtgatagaagtacctgtgaaatcttaaaaatatggtcacctaaacaacagcgatgccagttgacatcccagtgtgggtgcaaacaatcagacaagccccaccccagcataaattgctataggcaattaatggctgctgagaaagagagaatcagcaagaatcagccttgtccagggactgaacacctacaaataatactaagtgtatgtgtgtgtgtgtgtgtgtttgtgtgtatgagagagagagagagagagagagagagagagacagagagagagagagagagagagagagagagagacagggagacagaaacagagacaaagacagggaggaagggagagacaaaaagggacgatcttagtggcactcatggtgactgtttcttcttatcctgtgcaggtcatctgtagcttggttacattcagctgtaccttaagtcattcaccgtgcagctgagtctgctgagggctagatcccatgtctggctgtcccagcttccctctgctcttccattgtccctctggagcaagtaggctcgggtaggccctctcaaagaatgtcaaatttatttgaagccagcataaacaagcaatggctcctcaggcctgggctcagaactggaacactgtgacttcgagcttgttctatttcctactgcccctcacatggccaaactcaaactcaatggctagaaaaaaatttctgcctctttactgagtggatttcaaattttatgggaaagggcatgaagatagccagaggaaagaagagttacccatgatgtgatttacctgctccctatggggcagagtagcctcatctctcatcctgaaactgtaacaatttcaaggtgaatatgatagtttgtatatgtttggaccagggagtggcactaatggaggtgtgggcttgttggagtaggtgtatctctgtgggtgtgggcatacagccctgacactggatgagatctctgaagctcagagcagtgttcttagggctctgagccaatagttaggaattaggtattgtcctacaggacccatggtctctttccatggccatatctcccatgaaagaaacctttgtggtgctcttaaagcccctgcgttcccacaggaggtgtcagggaaacacacccattcataaccgggtgagcggagacgtgaaaccaaaccacagactcttccgagccaggcacatgaggaaggacacggccagaaagctgtgatgggagccaggctcgagactggattcactgtagtttacagcctcgaggcacaggaagttttacttgttattgaataacctctctctatccgttattgcctgaagtgtaatgcatacacatttcttttttaagcagctactatgaacagctgcagaaatgaatgggatgtggaccctaccctcctggtctgtagtccaggcaggatagggccgagagattggtggtaggtgtgaggtggataggctctcatagagaagtggctctagaagcctcacatcaaggggagtagaggtaactgaagcactctgggtaaagagaggatgtgcacagaggtcttcgcttacatgaagaactgctgtgtctagagttggagagctggttaggagcgagatgaggcagaaggaacagaggaattggaccaccatgtacccatgagttggggctgaagccagggaaggatacagaagtcccagaagaggagcataatcctaacaggattcagcaagctacgccccagggcctggggtataggatattggggtggtaaggggcctttggtctcctgcactcaaaaacagcatgttccacctggagctttgagcctgtttctcttcccatcatctaaattccgactttcctggcaaaggtctgaggcatagataccaactgtcttgagagtatggggatagacctggggggggtggggagaggggctgctggggttatcaccattatggtgcccctggtttcaccagggagttttagatagagctttggtctctcacacatcgttagagggaattttagatagagctttggtctctcacacatcggtagaacctagctgtcatgttctatgccctcactgtaggaagctgaagcacagccatataggaagcatgcctgcaatggctgggcagactgtggagtttgtgtcttatggcagtagatggatgtgctagagacatggctctctctttaagagtgtttattgctcttacagaggactcaagttcagttcccagctcacagctgactataacttcaactctgcctggcgtggtggcgaaagcctttaatcccagcaatcgggaggcagaagcaggcagatttctgagttcgaggccagcctggtctacaaagtgagttccaggacagtcagggctacacagagaaaccctgtctcgaaaaaacaaaaaacaaacaaacaaacaaaaaacttcaactccatggtattagacaccctcttcctgcctctttggacacctctattcatgcctgtccccctccctgtgtcaacacacacacacacacacacacacacacacacacactaatgtctttaaaagaaagtagagtatgataggagtttggccagattagatcagacttaaagcaaataaaagcaggtctattgggaggcagctattagtggggcttactgatctcacaggtggaggtcagtgacatcacacatctgggctaaagcaaggcgtctttatagagcttaggcgaggagtgatgacgtaccagctgggacctaggatggtgtccatatatggtcaaaactgagcacctagggaggcattctcagttgggttgcgggaaactcggagatgagaaatgatgctgttttagcccggagttttctctaaacggagggattggaggcagcggagttttctctgtgtgggcggggctaagggaaggaaggcagatgggggtttctcaggcctgtgcaggggatgagccgggcttccagccaaagagaggagaaaatgttggagtgtgtgggttatccagaatggccagggataatggctttgtctgcccaagatcatggatttagatggcattttcctcctgttttgccttttgagacagggactcactaagaagcccaggcagggctcaacctggcaaccttccacttcaacctccccagtggctggcattacatgtgtttgccactctgtcccggttggatgtcacttttctctgcataggacatgtgttcctgaaggtctgttgtcacttagccatccaactcttgaatgaaaactctgagatttaataggcttgagcctggttctaagacatgccatccacaaatacccggaaacagggatgaaattgtcccagagttttccatgaaacagagctgtcaattccattcatataaagatctgactgcctgtctgggtaccctcagcacctaagagggcatcagatgtgagcacaagaagagaaatagaaagtaaagtacttggtgacagttgagatgaaagccttttcatttctttttgacgtatcccaccatgcatagtggaccacctgaaggctttcttaacagccaacccccattaaaagttaaggtccttgaaaagaccacggctggacagtggtgacgcatgcctctactcccagcactcaagaggcagagacaggctgatccctgtgagttcgaggacagccatggccacacagagatcccatcttgaaaaacaaaacaaaacaccttggaatatttgcaaagcccaaaccattttcagccatggaattatactctggctgtaagcttggtcatgctgctttcatggggatttggagagtgtgtttccctaaaccacttcctggctggaagatagctcgctccatccataaaggaccagcttgtagagaggaccacccacctcaagagcatccatacttagaaacaaagtgtactccttctcaaatgtggtcggaatcatcaactacagaacagaagtgagatttttcttctttattgggcacctactatgtactaggtaccctatttatcgagcacctactatgcactaggtcccttacaaagttcagccattaagtgcactgactattcttccagaggacctgggttcagttcccagtacccacacagaggatcattaccatctggaactccagtcctaggggatccaataccttcttctggtctccatgggcaccagccatgcactggatacaaacacatatacacgggcataacaccctactcaaaaaattaaaaaattaataaaggtctcagtgtacacaaagattctgtgacatcttaacctgctgtatcactatggatgggtatttagtttctatatgactttgtctcttcagcttaaaaatggagaaatgactgctgccctgagttcatatgtatttccctgattcaaaaagtgtctggtgagccaggtgtggcagatgacacacctttaattttagcactcaggaggtagaggcaggggaatatctgtgagtttggggccagtctggcctacataatgagttccaggatggtcaaaggctttataggaagagatcctgactctaaataaataaataaataaataagtgcctgggatatatcgagcagtcagcaagtgagtcagagccaccttgctctcagaacaattttgagaagtaaatatgtccgtgcggcctctggaaaagcaccgagtctgagcttggaaagcattgctccagactcaagctttagggaaaacttaaaactacaagacccagacgtatggaaaccactcacctgagggcaaagcaaaacctaaatggtggagaaaaaaacacttggtggtggctcccaagctctgtattctgtcattttgactaatgtcctttgtcttcatggccagtatatcttggggaacctggcctagctcaaagatgaaatgacttggaaattctcttgtgttttgttgttgtatgtatatatgtttgttttcctgtgtgttgcagctggggatgggagggagtctgctacccaaagaactgaccccatttcttggttagatgcacacaaagtattgagggcgccttttgtgcacatacacagcaggcatccatctcaatgaagaacttcacagacagccctccccactgttgagatcatggtggatacactccagcttctccctggatggtagagaataaggatccttagcagggcactgaaggagaatggaggcagtaaccatagcaaccagaagggttgatagcatgcacacattgaactacccatccccccgagatgcttgcctaataaaattttatttggtggtattttccttggctttcaaatacagccagacataggaggtttctgcgtcagtctctccagtggggatgtgatgacaaggaccattgtcctaataaccagactgaagcaaatgactgacttatctaaagaacactgccacagagcctcaacatctttccatctcagccctgccttctcgaagatttttgcaggttattgcatctcctgccattaaatactagactcaccatggcagggcagacttgtcactgtgaaaagaaccaaattttgaagctgtgcggtggtgactttgttttctgtaagcatgcactctttcctcctccccaagctttcccttatcctgcatactctttccctgctttgatgcaagccacccgggggaaccagaggtggatgcagatgccctgcttgttctcataaacagctacacacgggaaaactcagtctttttgtttgtccccagtggccagaggccacccctaccctctgagccaaaagtgaagcttgggtaaaacatggaatgagcataaatcatagttcattcctacgggacggaattcataagactcccagatttcatgaacctcggtccttgacccccttccaggtggtctcaatctgagcatgacgagctgggtggatgccatggacaccacacccaggtccctcctgtgccaatgagtagaacatgctgccgtgatgaacccattgcctcctcaggttcacagaatctccgtggcctcctctccccaatccttaaccaatagggttgtagtatacagaagcttagccccttaagtacagattaactagatggcacagttgatatcgctcaagttcttgtgagcctccaagacctaggaccacagccttgcccaggctgcttccctggttcttatgaagccatccaattgctgagactcaggttctacatcctcagagcctgcatagaaatgcttagaagtcacacatcgtgcctacttgaatactccttcctctcctggatatgcagaagtcttttgtagaactctgaatttcagaaagaaatataatccagttgacttatgggttatggtgggacgttgcatgtgggctttttatttgtcttagaaatggaggggtgtggtaggggaggctccttcaggtaagttcacgggacttggattgtaggattgcctcctggtgcttattcccagggactttgggactgtccagatccacaggatacaggaaaaggaccacccttgtgggagatgctgctgccatgggagggagcacaggtgcccactactgggaaccatcagctttgcccggagcctcagacattttcttcagaaaactttctatcgtgatgaggtttgaacaaggaggcaatggcactgtctccattagtagctatttttcttcaagggggaaaaagaacaaattttaaaaaggtttttttttttttgaatatttttcctctagtatggaaacatgcaaaccatctgacctcctaaaccaaaagcgagagacttctcagttgtattcctcttgctcccagggttcaggaagagtggggcttgttaaagcaggggtgcttaaattggggtaaagagggccagctctaattgctgactccttgtagttacacacgccttttagaaattccttctcgaccagcggtggtggctcacgcctttaatcccagtgctcaggagacagaggcaggcagatctctgtgggttggaggccagccttgtctagagtgagttacaggacagccaggcctgcttgagaattcctgttgggggtggggagaaaagaaaaaagagtcccctccccctcatctttcttcccagcatccatggctgggcacgccctccccacctcctctccctccattgggcacgccctccccacctcctctccttccattgggcgcgccctccccacctcctctccctccattgggcacgccctccccacctcctctccttccattgggcgcgccctccccacctcctctccctccattgggcgcgccctccccacctcctctccttccattgggcacgccctccccacctcctctccctccatcacagcctcgcctcctccaaacagtcttcacggtcacttcccacggagcaggcgcctccttagtctgagccccatgccctgttgtgatccacgctggaattcctagcgtctgtgagctgagacaggaaaataatcgcatcttggttttcattgacatcaaagagaaagttagtattttatccaaatgtggctgcggcaccctcgacagtgacgtgagcaggaattggaaccttgtcacacacagaaaggactggtgtcctgagataatactgtagatattttgaaacgccgtttgtccctacctgagagttgtggttgtcaaatccattcccacatcttatcatttactgtgttattttaggaagcataatggggctagatcacacatttgttcaatatggtttatcatgtttttttttttttttttttttttgcatgcttgacttcattatcctactttgagtttcatggttattttaagaagggtccttttgggtcactacactgccaacaggatgtagcagcacaaaaccaggttagaaatgtgtcctagacattttccctgcacatgggtaaatatttgacgtgagaaaagcacattcagggtagctgggagacagccacagtattgtaatatctagaaccgggtcttctctggaaggttcagtcatttcttagtaatgtatagccaaacttaaaagccacagtacttccccggtggctcccagcaacacctatggtgacatctatactcatttttggttttcattaaggacacagggaattccaccagagcgcctgtgggctcaaagaggagagaattgctatggtggcacgtaagggcagccacactgtggacatgtggtggggccacctgtgtggctagagttgcctagcatgtacctgtcacactgcagagcctcggggacccagagaccaggggggaggaaagagcttgtggctcaagctcccatgtggctgcctcacctcacagcaggaaagacatacaattagggaagcttgtcattcattttagcctgttgtgattgacgtcacccatcggtgatatcattgtgccctgagagagttacttgtcaaaggcatcatggtcttttttagtcatcaggcaacatgcttatccaagcagtgcaagtgtgtctgacagtgtggcgtggctatgagcctttgactgagacaggcatcctacatgggcccctcctccctcaaggcaggagtcctccaaacagccaaatcttgagaactcccctgcctctgacccatccccccaccaaagcattcagtccttaatccagtggttacagggagtgaacctgattcatcccagatgtcccaagacttcatgattacagtaactcctaaggtaaaagctgaggagctctgaacttctgttatcagggaaccagtattgctttcagcagttatacagatgggacaagaagctcttgagccatttagagggaccaggagacagggttgggggtgggttgcctcctctggcttgctgtgtttcctcgatagaagaaacaaggttgttggagcaagtcctggcttgaccattactgagtagccgaatgagctggtgctagggcagagtcctcagggatgtgagcacattacagtaatgtggacaggctgtccttctctgtccctttcatgtctcctcagttaatgcctttactttcactattcagacataatactggaacagatgggtttaatatgaggaagggaaaaagtatttctaccttggtataaatggactttcagctcagatattcagtcttaggagccatcttcctgacacactgccaaggatcagtgagatgccttacagagccctcgattccagctggagctaattaccatgagggtccattccacgagactggaaaggattaacagagcatggccagatgcatagcccagcccattctgtgcagcatagcccacggctggagaaagttcgaatttacatatgtacatggtatagtctatttaatgatagtggtttgggtttatgcattgttgaggatataaaagtcataaatatggccaggtagtggtctttaaaggcgcatgcctttagtcccagcacttaagatgcagaggcaggcgaatctctgagttcaaggctagcctgatctacagagtgagttctaggacagccagaacttcacagagaaaccctgtctcaaaacaagaaaaacaaattcataagtatgaaagctgtattcatcctccattatctttaaagtatatgtctcagaaactagtagaaaatgcctgaaactataataaaataaggtttaaaataaaatttaaaccttataaatcatatatatatatacacatatatatgaatgatgtattagagtgacctacaggttatggtccaactattccaacagtggctatatcccaatagaaagtccaagaatccaatatttgttcagtccacaagtccatatgtctcagctggtcttgtcttcagtatatgccagagtcttgaacaagaatgctctaatgtcagtgaaggtcagtgagagaggtggcacacaaagaccaaaggcttccttcctcctggccctttataggcatggcccagatctaaggtgggtcttcctacctcaaaaaaatctggatttagggtgtgtcttcccgccttaaattattcaatcaagaaaaatccttcacaggtgtacccagatgttttgattttagattttagtccagatgtagtcaagttgacaaccacgaatagctgtcacataaaccatgttttctttctatatgcacaagttagacaggtaaattactaacaatagaccagagtaactataataatatgctacaataaaaacgttattattataggattagtattgatgtcctatttaaggctgttttatgtagaacatgaaaattgacacttgaagacacagactgacagtgaagccctgcctcccagccagcaacattgtgacttgaatgtgaagtgtcccccacaggcctaaatattcgaatgctcagtccccagctggtgccagtgctggggagattatggaacctttataaaacctttaggtgcgtagccttgcacaggggcaggcttcagggattatagctctatcttatttctggttgttactctctcagctcccagtgtgatctcatgctgggacatagagacagtcagatccctggaactcaatggccaggcagatcagccaactcagtgagttctaggccagttggagaccctgtctcaaaaagcaaggtagatggctcccggggaatggatgacatctaaggttgacctctgactgccatcctacaaacacacgtacatgcactacttaaatatacaaacaagagaagggaactatgatacctgggaggtacccttgtggaagtcatccatggaccacagaggttaaaggttatgtgttatccagagcctggggctccttccagaggagcctggatccctctttttcagaagtaacaggattaactagtgtctgcatcttcctagtgacaggtttccccccagacagaatccttgctacctagatcccttttctcccagtcctgagtttctggccttgttcctgatatcagaaactgcatctcttccacccatcaatgttgcttggaatgggtaccacctcccactgctacaacaccctcatccagggactgtctggagtcagtgcacagatattccttatcccaaatgggataacttgaggctgtgcttttcaaggtcccaggcacccagagaggtcactggcttcatgccacgaccctcaccgttgcctacttcttagtatagccttccctgtgtgagttttggagatctctcctgaaatactacttgcttcaaacctgtctctttttagggtagcccatgctaagatgttcctgttctcccaaagctctaaggctcaccttcttatcacatgtgtcaagtggtagtctcttgcctgacgggtaagccttggacatcagatttaagtaaaatttaaaaattacattgtgggggaaatccacttggatgcgttcttgtcttgccatttctcaacacttacaaggctacttaagatattttgtaactttttcatgcaccatattttggtcatattctttctactcccccagccccctccctacccaccccacttaataatttacaagagggttttgaagaaattggcactatcactgtggtttttctttttggtattgggattaaacctaaagccttacatatgctaggtaagctttctacccctcagccacatctccaggcttcagtgaggggtgtgtgtgtgtgtgtgtgtatgtgtgtgtgtgtatgtgtgtgtgtgtgtatgtgtgtgtgtatgtgtgtgtgtgtatgtgtgtgtgtgtgtatgtgtgtgtgtgtatgtgtgtgtgtgtgtatgtgtgtgtgtatgtgtgtgtgtgtatgtgtgtgtgtgtatgtgtgtgtgtgtatgtgtgtgtgtgtgtgtgtgtgtgtgtgtgtgtgtgtgtgtgtatgtgtgtgtgtagtgtgtgtgtgtgtgagtaaccaatctgatttacatgagtataattgactgggacgtacttagtggttgtgcagttagcatctttcacttacccgttgatgctggtagcaagaggaaagcatgatctctggcatgtagcttttacttccacgtaagatcacagctgagatctttaggaacattgaaaaatatccagtgatggaaaaaatccatcaccaacgtccttcagcctcctcaggttcttcctgttgaatctttagaacaacttatctggaaagaagtggagttttcatccatgaggattcagcataagtcgttgatatatgcatcaagtccaccccagtaaggaactttggatggtcttcatgctggatggaaggaatgaggccgaaaaataagtgtagcaaaaaatctgggacttcacacaactcccagttggctaccagtactgcctgacattgggaacagtgaatgaattcatgctaaagaattagggaccccataatacattccgaaggtagctgctttaacatgtcttagtagggctgcagagaacgctgactgatcttctggaggtcccaggttcaattccaagcaatcacgtggtcacaattgtctgtgactctagttccaggggatctgacatcctcttctggcctccacgggcactaggtgtgcacacagcacacacagaggcaggcaggcaaaatacccacacagaacaaacgatgcaaagatatattaaagaggaattttcaataaaaaaaaaataagcaatgtgtgtccatcgagctatgaaagtgtagaagatgaggcttacggaaagggtgcgattcaaatcttttggtggctgttaatgatccctttcattagaaagggcagcgaagggcctgtgtgcaaaggagcatgacccacttaaaaggctgcacaagcaaattagaattaatgggaaaatctatcagaggataaaattccttgaaaattagaaagattgttcttcaataaataaacaagcacccatggaatgtctggcacacaaactgtgcacgattgttttaaactcttggcaggcgtgtctgcgcagcaggtcttcacagaggcctgttctatttgaacgtcattaaaagaacctttctcgccagagcccttcctgatatgatgggctttattatacaagagtggcagcatggatggctaaggacatttgacactagctctagctcagacccagcagggctgggtgacctccgctgattgggtcctctctcagactcagcttctccctccggaaaatgtccagattaagctgatggtctgctgcctgcttcggggtgcttgtctgccgttcagtgagggctcatagaactccctcaggagaggccagcctctgacaccccactgaaagattaaacgaccaacacatcaggtccaggccgatcttcctaattgtcagggaattatatccccttagaaacttgtgctggaaccaattctgaccctgggagtgtaaggatgagcagacggaaacaaaggctccttcctggtccctctgtcacaccccatggtggagacatggtccccagtaccagattagtatgcaagatctaccagtagtctcatgtacaaaagaataattctccctcccagagctagcgattaactgccaacagccacccctggcctagagagaacctccccaacctatgctggaatttaggttggattgatcttgttcactcagccacagcttgagcgacataagtgccacaccatgccaagtctaaaagtttgtgtttcacagccctggccctcccctttcacacatggacagtgacaagtaggcttcgtgggtggggtggtttgtatgcacttggtccccggagactcatatatttgaatgtttggtcctcagtttgtggaagtgtttgggaaggattgggaagtgtggactttttgaaggaagtaagtcagttggggtgggctttgaggtttcaaaaccccacagcattccccagttagcgtgtctctgtctctgtctctctctgtctctccctacctctggctcgtttgtctgtgtgtctgtgtctctgtatgtctctctctctctctctctctctctctctctctctctctctgtgtgtgtgtgtgtgtgtgtgtgtgtgtgtgtgtgtgtgtgtgattttggattagatgtaagctctcagctactgctctagtgcttgcctgttgccatgctcccagccatgatggtcaaggactcaaaccctctggcactgtgagctccaattaaactctttcttttacaagttgccctggtcatggtgttttatcacagcaaaagaaaagtaactgaggcagtgagttattagaaagatggggtggattatgaagttggatggggagtcagaaggaaaaattggaggtataaatgaccatgtttaattgtatatatgcatgaaaattcttttaaattaattttaaaaattagtgtgaggctaccttggcaaagttctgagaagagctaatgagaattcatggggctggtaagctcactctaaggatgtgtgtcattcacaggaggagaccaggaaggacctctgcactatggcagatgggacagaaaggacgctggtggcagtggcaaggagtaggctctggaggcagcggaggctcttgcttctcctccagcctccagctctctgcctcacgatttcctcagctctaaaggaggctctcccgtccagtcctgtgagccctccaaaaggcttgtttgacagtacccggtcccatgctagcaaactgtattttcgtttcatttctaagaataacttagggagcagcaacctactgttttggttatagagttttagctttagagaaagaatgaaaacaactccaaggtttctttttcaaagttttgagtccacattctaccctggaaggtgcctggcttcccttaatcacaaagcccgctggaatcacttgactatgaaaacccaggcatgaccttactgcatggttaagtggcagaggcccgtggtgggcctggcaggagttcaggtgtttctggcctgattcctgggaatttacacatgagagaaaagactaacctcgtgaactacaacactgagaaagaggcggcagctctggcccgtgatgctgtgtccacctatgtggtctctctgcttaatattccacagtgactggtcactctgaggtctctggccctgtgtgaacatgtatgcaggtccttcccctgatcaagctaggttaatgctgtcccatactcaaggtctggccgttctcctttcatgttacaaaagcaaatgggaacagaaataacccatcagttgtttagacccagagtggccaacaataataaataatcagcagcagaaaggctgaggtcaaggtcttcattcattggagtccattcaagaattcgtaactctctcctctgagttaatttttcacatcttgtttggatcctcggagttcttgcttccaaagcaaggccatccgatttcttgtttcacatgtttttcttgttggcgtgccagacgtgctagacagcggggcttctttctgcagatggataatgacggttcctcccccccacccccatgaaatttgtatttcaaagagtcatagccggtcgagtgtttgaatggtcctcttcccttgcacgctgtattaactatgttaattgctgtggacaacaaaacatatgccagtgaacttaaatctcatttattggaaagatacaagccggttctgacgaggcttaaaagagggttggaggcgggcgtacaagttcaacaggaaacaagggaggcaaggtgtagctcaaggaagtgacttctgggtcttcaaacctcctgtggccaactccgatgaccacaggaccgtaatgctcttgtgaaaccctcaaaactcagagctgtcgatgggagcgttagtcaccaacataaggccacttgaacatctgtagatcatgggaatgtgtaatcaggggcccacagcttaaagactagaggggttagctgccccttctcatctgtcatggggttgcctgagccaaggagctgaaagagatgactgtccattgcacgaggactcccaggcttctccacatcttcctctaatgagctggccagttagagactggccactgcagtgacttcattttgcccagagcttatagcttatagataacttatctctgttatcaccttcatctcatcattaccatccttggccgattcaccccgcctccggctcttctgccattgccatactcccaaacaccctccccttctctccctgtctttgactggtccactttcgatgccaaggacaaaccgctaccagaggagtctggattccccacccacactcagtggctacgcctcacgctctgttcattcagccacagctgtccacatgttcaccaggccccaccagcaactgttccctgtcacgtgtccatccattgtgctttctctgatggcactttcccacgcacgtacagatacactgcgataattaccatcttcaaaaaaatcatgtccacagtccacttccccagtagcacatatcctgtttgtctactccattttactgaaagaaacacctccagatgcccctctgtgctcacctccagatccccctctgtgctcacctccagatccccctctgtgctcacctccaggtccccctctgtgctcacctccagatccccctctgtgctcacctccagatccccctctgtgctcacctccagatcccactctgtactcacctccagatccccctctgtgttcacctccagatcccactctgtgctcacctccagatccccctctgtactcacctccagatccccctctgtgctcacctccagatccccctgtgctcacctccaggtccccctgtactcacctccaaatgcccctctgtgctcacctccagatccccctctgtgctcacctccagatccccctgtgctcacctccagatccccctctgtgctcacctccagatccccccccccgtactcacctccagatccccctctgtgctcacctccagatccccctctgtgctcacctccagatctccctgtgctcacctccaggtccccccctgtactcacctccagatccccctctgtgctcacctccagatccccctctgtgctcacctccagatccccctctgtgctcacctccagatccccccctgtgctcacctccagatccccctctgtgctcacctccagatccccctctgtgctcacctccagatccccctctgtgctcacctccagatccccctgtgctcacctgcagatacccctctgtgctcacctccagatccccctctgtgctctctgttctaatatcattccctccctccaatccagctttcaaccatgacttgctctgtctatgtcaacgctgcttcaactgtgggtcacaacctgatacaggggtttatagctgaatgtggggattgcaagacctggcagtggtgggtgtctgaactcactatacctaaaacctaactcagaaataaggtactctggcagccctcacccacgctgtgctgcctaatgtcctctagtcccgccagtgtgaacctggcaccatgcatgcactcaccctccaggtgcagaattctacctgagcgttcgttcacgatcacagggccactctttcttacagactgcatctgcctgggtgtccacactcacagggccactcttacagactgcagcacttttactgtacacaccacgttttctgcatgaaacaaaatgatttcattataagaaataaagatttgtaataatcttctaccatcattattatatatcaattgagtatatattttaagctatttaaacagtatgttttaccctttgagtctttcacacttgcatacaatgtatcgagttactcctttctttctctcaatcttgtaaacccgcctatagtgcccagctcctcccagttttattttctcttttttaatgacccgctgaatcgaatttatggcggaatacccatgagttacgggcagcacgagttagcatgtatatggattgttgtgctgctcaggtaaccacagccatgtcttaagtataaaaacttgcttcagccttcgaaaaacattcaatttatatgtataccaaaaactatcttaaaatatagctattatttgtcaccagtaaatatttgatctatctacttgttttaaatacttatttatccagggtcaggtaaaaatttgtcagacattgtactggctagttttgtgtcaacttgacacagctggagttatcacagagaaaggagcttcagttgaggaaatgcctccatgagatccagctgtaaggcattttctcaattagtgatgaagggggaaaggcccctgtgggtgggaccatctctgggctagtagtcttggttcttaagagagcaggctgagcaagccagtaaagaacatccctccatggcttctgcatcagctcctgctttctgacctgcttgagttccagtcctgacatcctttggtgatgaatagcaatgtggaagtgtaagcccaataaaccctttcctccccaacttgcttcttggtcatgatgtttgtgcaggaatagaaaccctgactaagacagacatggtactcatcggttttaattgtcaacttgatatcatttagaatcagctgggaagaacgtgccagtgagggtttgtctagatcaggctggtctgttggcgtgtctgtgggggattatcttgactatattaatcaagatgggaagacctggcccactgttcaaggtgctattatctggatgtaggttctggtataaggggagattctgagctgaataataaccatgcatgcatttcatatctctctgctgttaactggggacatggtgtgtgctcttttaagttttttgcctgtaacctggaattgtgatctgaaataaacggtcggtcctataagtggctttttggggatattttatcacagcaataggaatgaaactcggataggcataagagaaacaagcagaatgaaccttagaagccctgctctatgtgactatcaccagtaatcagttctaattcctcatgctattttgacctatctgccatgctggacaaccctgacatcctcccttggagaaggccacacatggccattctgtgccatcaccctggtttcttcctacatgcctagcaatacccatttcctcctggcttcagattctaaatgagaaagctctcctccttctccactcatcccctgggtccttcgtgtttatcccagaggtagatctgcagcccaaatgcctcctgtatgccccagctccagtatcaacaagtatgtctcctacaaaatgcaacagtatcttcttgtctcctccttctctgcccacagtctttcccacctcagtaaatggcagccctaaatgcagctgtcggacccccaagccctggagctacccttggctgctcccctgttaacatccctcatctaacgcatgacgttacagttggcacaaccttcgaaacatatctccactgtgcactttgtactataatagctggccctgcctggcctgacctttcacctgcaggcgactccttataaacttctcccaagagtgctctgtagactatctacattgcatgtagtaggagcctcttcctgatatgggccccaagagtcactgcttctcagctgagagcaggtcagggctcccgtccatatcacatctacactaaggtgtccatggtgatactccaggacctacagactctgccagctccattttcttttcctcatggagttcatctcccctcaacccactcagtcctctctggcctccattctcttccttgaacatgccagatctgtgcctatcacagggcaagcccttggtaaggcctccattctgtgtgtcctgttctccttctcccaagtttctagcgagagtttgactcctcagtgaggctccctcccagactactgtattgggaattgcagcccactcctccaaaccacttcctaccctccaaggttatgtgtattcacttagtgtgagcattttccatgtccctgaagttttggtgtgaacattttctatgtccctgaagttacatgctacttcatgtgagcattttctatctccctcatgttacatgctactgttgccggtgtcttgctttcttttcctgttgttaagataaaaactctctaaccaaagaagcttgagggagaaggggttgattttggctagcacttccagattatggtcagtcatgacaggaagtctcagcagcaagctttagagagatggctcattgcatctgcattaagaagcagaggggggtctgaaatccctccccagggaagagttccacccacagtgaagacatcttcccacctcagttaacaccccacacaggcgtgtccagaggtcatctcccaggcagttccagattctgtcccatggactattaacactaaccttttcatccagcccaggatgagaaaaacacagggttcgctcaaaagagcggaatgaatgaatttcacgtaaagctttttcaatgtcttcagcttttcaagtttggtgtgtagactttcttacgagccactcaacaatctagtaagttcaaaacatagaacccccttgttatgggggggaaaggcccacgggtactgatatcctgtggccttgtgcctagtgaatggggctcctgagtgtcacagctgtgctcctgtttccctgacacctccacactaccgcctggcactcctgtcacattactgtaagggtaaggagagtaaccaatgtttggtttcctttgcagtgttgacgagaaaaccccacacctggctttgggggctgtgaagaatatctctctaaacatctccatctccaaccttggagacgacgcctatgatgccaacgtgtcctttaatgtctccagggaactcttcttcatcaacatgtggcagaaggtaaggagccgtttcccatctgagctgcttgctgacatgtttcgtagcaaagacggggcaatgagtctgcaaacgtcattccttcataagagcttggaattactagagattggctttcatcctggcctgagaaggttgctggtacagccaagcagcagccataaatacataccttggagaatatctatcctatgccctgctccatccctttcctctgagcagctacaactgttagcgccattatacacatgttctatagaacttcagttttgtgtcagtggttgttaaagacaagtataaacggatccctgatcgtcgtgatcgctatcactaacaacacactctgtgctctctgtcacaaggtcatctgtgtcagctgataccttgctgtatttatatatgtattcctgccatattcaagggaattgagaaaattggaagattatatgaaatgagtgagctttagtagagccgattagtttattcaagtgatagcatgactccaaaagaaaaagggaactaagctagtgctttctctttcccctgatgccctgcaatgcaaccaccgctgtgagagaggagggcaggccctgggcaggatagaccctgttctaaggccctgggcaggacagaccctgttctaaggccctgggcaggacagaccctgttctaaggccctgggcaggatagaccctgttctaaggccctgggcagcatagaccctgctctacccggttgttgcaaccagttatttggacgtttgcaattttttccctgtaaacagtgctgagcccactgagctggtgttcatgtggaccttagtcactttatgatgaaaaccttcaccctggtcctcagcacacgggcaccccacgatgcacatttgtgcaggtgaactgcccattgaggttatgggagacagggggagttagtcatgaattctagtcgaaggctgtggtcactagaggacagtgtacttgagaaggtcacaagactgagtctgtagctatcatagtggccatggggacagtgagtgtgcctcagcttggtctctttactactgagccataacctatagcctagagacccctgggtctcatcctggcagaaagctggcacgatatcatggtgcctcatggtgactgtgaacacgagtgggattggaaccgggcatagagacaccacactgctttggaccatcccggagagcagaccagtgacagaaataaggatgcccctcctgtgacaatcatacttcaaggttctgctagggatataaacagtttgcaatctaactgcacctagacggtaggtagtgataggtgaccaagggacctcacctgttctgtagcatgggcgatacatggcccatgtactaggccctgtaggagtcttacaaaaaagttctaaagcacaaaaccaagaaaagcctaattcaagatgaaataacatttaaaagcttattatcagagaaaaaatacattgttcagagtatattgtccttagtatcccgctttaccgagagggtaacctcaggagacccttgtgagggagtgaggaagctaagacaacgaagaaaggaagagtgaccataggggaggggccacttggtcttctcagatctctgagaacctcagatctgttcctctcaaggttgaggagggtgctagagaattttcccacaagcttctgtcttccactctaaaaagaaagagagagagagagttcagaaattagctcttgagtatactagccttccatagctacacccctacttcctgtccaatacaacagtatagtaatgagaaataaacactagctgagacagggctggaggggcttagctatcaagaatgcttactgctcttatagaacacccacatggtggctcgaccatccgcagcaccagttccaggggattccactttgacccctctgaaattatacacacatatgcacacactcagatacgtacacatacccagaaaataaaatattttaaaaactttaagcttaaacaaaaacaaatttatagataactcgtttcagttaaacttgggtatagaacagttaccagcacagtagatacataattcagaagaataattcaaagtaagtcttctggggctggagaggtggctcagcagttagagcattgggccttcttccagaggacccaagttcaattccccatggtggcccgcaactacctgaaacccattccgagacaatctgttgcctttttctggtctctgtgggcaccaagcatgcagacagaatgcccatatataaaaaaataaaattatatatatatatatatatatatatatatatatatatatactaagccttctgatctcagcaatagcagtgacaatttaagaattagctaggttgtctccctcctcctgcctcacgatcttcaggatggagttaggactcctcagctattcccacaaagccatcctgagcctgatccttccccagacccgcagctctctgtgcctgtcgtacacacacttgaatcagtaccggttcatgactgaagccactgctacagagacagcccttcctcccaccgccattcagagaacattgccctgaaatctcagctcatgtctgtcatcttctctggcttcttgcctggctgcacaggacttgtttggatatcagttaccaaatgtgcctgttaggtcacagtcactgcaggtgacagagataaataaggtatagttcctgttcccaggatgctcccagcctcataggaatgtcatcaaataattaataattaaggtaggataccaactgccctgcagacctgctgagaagttcccatgaagtgttgataatagctactctcaggttgttaaaatcttggggaggtcatgtgcctttgaaggtgtgatctggtcccctcttgcttccttcctctctgcttctcatctgtcacaagggttgaccactccctatgccccgtgctcctggtgctgtaatgttcagcccaagtacaaggaaacaagcagccattggctgaacaggctcagggttggctcagaagagtgtgccccgagttgcatcaggcctagtatcctaagcttgtgaggattcctggccacttagtgcctcacgtgatggtaaggagtagtgtgggaagaatacctgagctttgaattcaaagactggcctcggctcatgtgtacaccttcatgggattgattcgttccagaacatggtggaaacagacaggagctcgaaagaataaactttaacctcggtgcaagggaggtctgagcctgagtttgggcaccaagggtagcacccattggccatgaaattacagaggcagctgtaccaagagcaaaggcactgtagcagagagcctttctgcactagcgcctgtcgctgtgaactaatgctcaagatggcagcttgaagaggggaattccttacgttgttgcattgtctcggacagctcagctcatggttggttgttcccatggacttgggctgaatatgttggcattaggatcacgtggcttagaaggttgtcaaccctcacgacagacatgaaacagagggtaaggaagggagagggaaccagatatcacctccaaagctaccctcaatggtaccccctctcacgaccaccttcctctagctaagtgccacttccaaatcttctaccacctcaaaaatggctaccagctgggtgccagtccttcaccacacaagtctgaggaggacattttattttctaaccatgtggtagtttgggtgtttgaacacttggtcctcagagggtggtggcttttggggaagtcgtggaaattttaggaagtgcagccttactgaaaaagtgtgccactggggacaagatttgaaggtttatatccttgtcccatttcctgcttgttctctctgcttgctgtgtgtggaagaaacaggatgagccagctccctgttcctgcttcctattgccaattccccccacccctgccatgatggactctctttctttccaaccataagtcagaattaacccttactctcttgagttgcttgaagttacggcatattaccacagtaacaaagagtgactgatacaagccacgacactcatagatccaaggtttgcaagcctgagatgccatcttgctctgtgtctccagatgccaactgggaggcaaggagctgaggacattcagtttatttggaaattgggagaggatgaagggaaagtaagctgagagaccagccaccacggtggaggaggggcttagccatggctctccggaaacagtagagaaataaatatacccgagggatgaagaagcagaagttcaggtgctccctaaggcagcagttctcaatctctgggtcatgaccccttcggggtccgatgaccctttcacaggggtcacctaagaccattgggaagcacagatatttacattacaattcataacagtagcaaaattatagttataaaatattaatgagataatcttatgattgggggtcaccacaacataaggaactgtattaaagggtcgcagcgttagaaggctgaaaccacagcttgaaggcttagggtggggccctcctgggaggccattcaccaacacgtctgaactatcatgaacatatcagcgcagcctctgtcattcaggaaactgtccctcaggtgaagagatctagatgctggcagtgggaagctggcggagcaccagacagatgtgagccacatttgcaggctccttggtacccgccactgaacctctcactttctaggctcccagaagttgtaacttagagttctggttgaagagcacttcacagttccaggagttgggcaaggcaggcgtgtgcatagatgaaggtgtccagatgtggaacagaacgtggtagactctgtgggagatgggggttctgatgtcacccgtgggtcagccacctcagcagcccagtgactgaagtagcagcgtgaaccagtgctgcgagattttatttttcaataaaacccagaatttttatgttactttggcagctaattaaaatgttttctgagtgtcgtataagccaaacaaaacatgttccctgatcacatccagcctggggccaccggcctagccttctagcctagctgttccctatgtgtgccagctccatgctctaacctgcctgtctgccacatggcttggcatttctggtcaaactttttccacatccttggtgcgtctcatatccaaccgttggccacagataaactagctaaatagctaaactagcatttggatagtgtgtgtgtgtgtgtgtgtgtgtgtgtgtgtgtgtgtgtgtgtgtgattgtgtgtatgtgattatatgtgtgattgtgtatgtgattgtgtatataagcatgtgactgtatgattatatatgtgtgattgtatgttattgtgtatgtgtgattgtatgtaagtgtattgtaattgtgtgtgagtctgtgattatatgtgtgattgtgtatgattatgtatgtgattgtgtgtgatagtgtgtggtaattgtgtgtgatgcatgtgattgtgtatgatttgtgtgattgtatgtgatcatgtatgtaattgtgtgtatgattgtctatgtgtgattgtatgtgtgtgtgtatgtgtgtgattgtctatatgtgtttaggggatgaaagggaatagaaaagtcagcccaaatgtagcacccatgtcatttttaacgctagtgacttttaggctaaagtttgttctccggagtgatggtggaggcagctgaggcagagtttatattcacacagagagtaaaatgataggcgtggagtatggcgtggagggcagtgagctgtggtggctaacacagcagagctgacatttcagctttctctctgctgatcagtgtgccctgggtccagggtaccaaagtcttcactacaatgccggggtgtgctaagaattgaacgaggcctacgccaagtatgtgtataatgtgcccctactgtggtagacccccaactcccaccatgtgcagtacacactgtagagatccatctgtcctcagtgttctgctggtccccaccttctgatagttcagcttatgatttgtctgactttatgatgatgcaaaagccagacactttcagcagaaactgtgctctgggtttgaacttggatcttttactgggataccgcacaatactcttggaatgctaggcatctgtggtgccatcttacaggaagggtcatcaaaccagaaaaattggaagatttggtgatgggaatgttggaagacgggcacatgagggaggatgggtggtcctgggctcatgggagagggccagactccacccaccacactccacacagcttgtccaagcatggccaagatgctgagagctggagttcacaacctgttgttgacagtcactgagatgggccgtggagttagtaatggctccatcttcaatcaccatgagagactgagatgaggggacagattctgtgtcctttactcctccgtgacaaagcctgatgagggtcacagtagcctatcagggaagctcatttttgcggtttctgagaagtgaatggtttgaatatctaatcaggctgggtctccaagctgggctttggggtctttgtaaactaccagctcggctttcttttttatagcaagtggcatcaaggactggagagattgttttttctgtaaagtgagtcttcccactaatgtctacctctaccgcagaatgggtattctgtttctctcaggaatctctcttctcactttcaaggcaagccgattaagacggcgccagatgataaactgaccagctttctagctgatctgaggaaggatgtggacccttgacgtgttttcatagctttatatccgagggagtagctgacctttcctcgggcagaaggctcaatgcaggaacccggcatggctgtgcatgtgaacacagagagatgtgtcagtggcgctgaggagtcaggcattgccagggctgaagtacacctatccttctgtacgcgagcgaaagcacaaatccttcctcagtagccgctcccatagcagcagacttcattcccgttgtgctccgctatctccggtgtctcttatcaagttaatagacgcccccagtaaaacgcaatcctcagatgtttatagtcaccgtggcctggccattaaaatgatgaatgaactcactgctcaccttgtaagagagccctgcaggggaaatcaatccttagaacatagtaagtcttttccgctccttgcctgcctttaatctcgtgccctgagcaccctggtgactttaccttgaacttcctgcgtgatgccaggcagtggttctcacctggccctggtccaggtactgctcttaccctgcatcctcccggtgctcacttcctgtttcagttgcttctgagggccctaccgtttatccataataggctaagagaaagtggagaggagcaggtaccacaccccacccccgaccctgaggccagggtggtaatcctccagtaccatacctgtcactcctgcctgagcgccggcaccagagaggtagcaactggactgaaggcccctaagatggctggcccttctggtgtccaggaagagatggagaaccccaggtgtccgtttctaatcacagcgtggcctgtgttccgaggcaaagctcagctttcattggcatgaaaagcttcatttgtgtattcatggcatctgaagggaaggctgcagtctagctagagaaatatcaataaagctataactgcggcaagactcggtttagactacttcccaccaccgtgccacgggcatatctgtgagagggatttagaaagtgcacattaaaacgtctggaccctgccttcagggtctagatgcttcttcttcttctaaaagagaaaggtggagcctgcctggcttttaaatctttttcgccagacaacagagtacctttagggagagaagggaggaaggaggaagtgaaggagggaggaaagcaagccatgaaaggaaattgctaaactgagacaaaagacaacataaaaaaataaataaaacattagaaactaaatctgggagatggcctggtgggtaaaacagttgctgagcaagcctggcgatctagtttgggtctccagagcccgaatgtcagtggaaggggagaacagattccatccacaaaattagcttctgacctcacatcacacacacgcacacgcacacgcacatgcacacgcacacgcacacgcacacgcacacacacacacatcatgcacacatagtaatgaggagtacggagcctggctgtgtgcttaagagagcttgctgttcttgcagagaaccaaagttctgtccccagcacccacatcaggcagcccccaatgacctgcaactccagctccaagggctctgactccccctgctggcctgcatgtgcatctacactcaggtgttcacacacaatttgaaaagaataaaatttttggaagtcagaaaaaaagttggtagttcctgaggggtgtgtctgtccacaggagagatgctcatggtgaaacagggcagggcacaatctcaggcaagggcccccaaaccttagctctcagcttgatcttgcagggaaagcaccagctccattccctcccgtcttaaaggaagttacacttctgacctacaaacagctggtttagagccactttggaaactgttaaaacctgcagtcctttctaccccagaggatgtgatgtggacaggatgggcccaggaatcaaaagcaagtctcaaaagatggaagccattgtggacaacagggagcccacataaacttgctggtgggcatataaactagctagcccagcctctatggagatcagtgtggatggaggtttctcagaaagtagacacagatccactagatctaatgtataactcaggcctacatgacccctggtgttcacccaaaggtgtccatgtcaacgaatcacagggatagcgcatccatgtttactgcaacactgttcataacagacaagatgctgagccagcctagctgtccagcaagagagaaatagatagagaaaatgtggtttttatacacatggaatgcttttcagccataggaatgaagtcatgccatttgcaagaaactggatgcaactggaaacaataatattaagcaaattaagccaatatggaaaaaaagcttctctctcatttgtgattcctatggttttttttcttcttacatctcttcatttttttaaatcttaaactccagattttattcccctcccatgttcctatgttttgtatagtcacagggaatgaggtatgtatatattaaatgaaaggggaagtgagaatgtcaaagggaacaaaggggctgagggtaggaaaatgggggaaatgcagagaatgttcaacaaatgcatggaagaaatctaaatgtaaaataatggtctttgcaatggagaccttgtagcagcttagcgtgccatcaggaagcagtgacatatgttttgatagtgggcacaaagttaaggtgtgcatatgctagaaacatacaagaaatctgaaactgagagagagttttgggactccagataaaactcccaggacccacttaaggtagacaaggtggggctagggatgtggtagtgtatgtgtgtgtgggtgagcacgcgtccatgctcatatacatttccccgtgtgtgtgtgtgtgtgtgtgtgtgtgtgtgcgcgcgcgcgcgtgtgtgtgcagatacagaagcctatacagaaccctgaggttggtgacagcattctccctccaccttgcccattgagtcagggtctcccaattgaacccaatgctcatggatgtggataatctaactaattatcctgctccaaggatcctgtctctgccttctgagaactagaattacagagggccgacacacccaccctgcactaaacccaagccctcgtgctccctcccgaggcatttcctctatgcagtgaagcatcccccaatcccgcattgctcctttatttttcggtaatacctgtgactctttagaggactgactaacctcaggctgacggagctcatttagccgtggtcataaacagccacacgtgccaggacctgacagcaacctcaggctgctggtgctgaggcagcaaagcccagcacacaatgcaggcaatcaccgaggtgccgtctcgctctgggatttgtaacacacacacacacacacacacacacacacacacactgtatcctccctcctttttacgactgtccttcctggagacatttcatacaggttaggtttcttcattcatttgcttgtcttttgtgtgggtctttggttctttatgactcccatgtcagagtcggcttctgagtacccgagcctaaagcacatctctctccccaggcttattttattccaacagacgcatcgaaaaacctgaccaatcaaaatggctttgggggcgggagaggggagtaggttgtgtgtgacttcaatttttccccccaaatgatgctatttggtgtgtttcgcctttgtactatggcctggaggtctggaagtctaacctgttgatatttagcctgtgaggtttgacaagaacccaatctggttaagtctgaagtttttgatcaattattgctttcttttctcacaaactgtttatacttgaaatagtgctgtgtttgtgcaacctttcttttgagcttttaaggaaacaaactctgtttttaaaatttcaccccctgagcataaggactgaaatacgccgctgctataatttctaacgctttgctccgtgtgtttgtctccgtaatcataagcaagacgcatctcccagtttcctctgctgtgtgatctttgtcaggtttggatattggacttttgctagaatttttctaaaataaacagagagcctgcattctttctggtagtctgaaggcgtgtagctgatatggcttcaacactgggcaatgggaaagacagccttactgggtgctcagttttatgctacacacttcgctcggcactagttttgtgggtttttttttaacagccccacaataactcatgtccacttgtgagctttgttttcctgaggaggaaaccaacgcttaaagcaaggcacagctgccaaaactgggtactgggatccaggcactgaggagctgacttcagaggtctctgatgcatcttctttgcataaagaggctaatttgcatgtctgatggtcctgctggctgcccacctggcttgtagcagttaccctctggagagccaggtgcttagtgaatgacatctttcagattacgtcatcccccattttccttgtgtagggggtagcagacaggaagcactgatgaattttctggggcagctgtgttttctctaaacaagactctctttagtatcctggggggtactggcacagagacctaacccctaccaggctcccactagaggaagctttcctgtggtgcccatgtgttgctgcgctggattctgggagctggcacgacttccctgcctttttaaatgtcttctctggaactgatttgtcccaaggtgaactcagtgaaaggaatatcacacttaagagctttgcccctgaatgggccaggaaggtggaaaaaccacacacactgtccattttcccttctgcccgttgagttctaaacagctggaaaaagtcctaagaggtagagtcactcagcccttcgcgtgtcagacgctcgactgccttgctctatccccaagccatccatcattttcccaactcgggtccaaatattgttagggaaaagaaaaaaaaaaaaagcccctagctgtatgcccaagtcacctgtaagaggctagtggcacaccaggaacataggtgcctgatgacatggatcatgtgacaagcagagtcctattactgatacgtaacagcatctgggggctctgctagtgatagacaacagggattcccataggatagaaactcatgcttcctgtgcataggaatatatacccaatagtcaaaagcagttccaacaaagaaaagatggagtggataaaaaaaaaatggtgtcctgtttgcatggcccagagacagtaccttgatgttctacagaacttactcctccggctttaagtgctgagcttgagagtggaactgcctagcttggtctgactgctatcgccgctgctgtgctttctcatttattcaaaaagagtgaactgcacgtttaatgagtatttaaggtgtgagatgtatacacagaatagacataagctctgtggccacctcctcacaaacccagtggaggatgggtttgaagaagtgtctaggagttgtgactatggtgaacagaacaggcttgggggcccgggaaaggtgccctgggagatgttcaggaaaaagaggcactgagatgaggagggataagggccgctgtagagagggtggcacagtaggtgagcgaggggagctgagacatggctggtgtgttcggcaggggccaaacaacataggccttaggcgaacacagtgaagtgtccacagataaatggaggaaggtgtcgtgtgtgggtaacaaccttcattttgtctgaatgttggatcctatcatattcttacaaaaatgccttcaaaatgtcctaggaaatatttattataaaatcctggtccaactattagctctgaacaaggaatgggaaaaaaaaccaaaaactaaaagaaaagaaaacaaccctaagacatcgtctatagaggtcttcaaatggaggccaggggggatatcatcagaaaatgaacattaactattaaatgaatccaagctttaaatctaacctttgtcataacagaacacatgttctatccaagctgagagaagtctaaaaggtcacatctcacagaaggaacagccactcataaagggaacggtctagtgtgatcacagcgccacagttgggtcaaagttccatcctcctttgaggaacccgagtctacatagccttttcgtattgattattgaggactgatgtggaagagcctgtctcactgtgagcagtgccagtcctgggcagtggtcctgggtaggatagaaaaacaggctgattacttctctctctccctctctctctgtcactcacacacacacacacacacacacacacacacacacacatttattttttcttttgatgggaggatttgagctgggggagagggaggggaactacaggcaggctgtaatgtatgagagaggaaaaaaagttgagagagagagcgatatggctgatactccaggggaagccggccagtaagcagccctcctctgtggcttcagttcctgcctccgggttcctgcctggcttcagttcctgctctgacttccttaggttatagactatgatgtggaaatgtgagctgaaattaattctttcctccctatcctggtgtttatcacagccatagaaattctaagacaggcaggcaccaccaggtctggctcatgctaaaaatttttaaagaggaaaaaaaatctttttcacatagttttatttgcctcaaataaaaataaagacgtgctccagtagtttacaaatattaagggggcgatttcctgacaaactcccttccgttcaagtggcctctccctgacacagcacaccttcccaggcgccacatctcggaggattatgggattatgtagagccactgtactgtaagagctgatagtcacgacttacaaattaagcaccatggtttaaagcacaaccttagctatcatttgtctttagaaacagcatctcagtccctggtcacattcagcaactgatggcctgagggcacaggccaccaccaagccctcctcggacttagatttgcccacagagccttctggagggctgcagaggttcctgttacattcatgccttcacatctgctcagaagtattcttctagtgagtaccccaaaatgcttttgctcggagcatcttgacctttccttctgacacagaggaagcgggtgtcagtgctgcagcagcccagctgctccaggcaccattcctacctagctctgtcgcgtacttgcagaggccccagaacagtgaggtacttgcacctgctttagctctttttgttccgaacaatagaagagccaatctcccctcctactgagtgaacagagaaattgttgttcttcaaagtgaaagtctgaggttcgcttgccccccacccccaccccatgtttcctgttggacctctgagctttcttgcgatgtgtcctgttttggctccatgttcagacaagtctgtccccttagggtaccgagatcatagccaggtcaccatgaagaagtgctttgatttcacgaagttctagtagaaggaagtttcagagtctccctgggatgattgacataataagcctggtcacgtggtcctgggttagcaggctgcgaatgagatcaagcacccctaggctagtgggcggagcatggtgggctgggtgtctgccgcagcatctttgtcccatttaccagggaagaaattagacctcagagctggcgacacagctaagtctcacagccagtagcagccgagctggtcccttctgctgcccctgctctgcatgtcggtaaaggaagactttgtgtccacccagcccgcacccagcccgcacccagcccgcacctcagtgctgtaccatgtcagtgcctgcccagccctgccctacctgaccatcagctttggaagtgataggaaaggagcaagggccgccacgggcaggagagacaacgtctgcttctgctaagacaggagccctgtgaggagctctggtctccagacatgggagctggggcaatctgaaagtttgcatggcctctcctcgtcctgtgctgcctgtacatgaggtttaaacactgagtgctttcatggggtcagtatggagaggaggtgaatgtcttctgctgagcacacgttggggaggannnnnnnnnnnnnnnnnnnnnnnnnnnnnnnnnnnnnnnnnnnnnnnnnnnnnnnnnnnnnnnnnnnnnnnnnnnnnnnnnnnnnnnnnnnnnnnnnnnnnnnnnnnnnnnnnnnnnnnnnnnnncccaccccccaggccctgcccttatcagaggacctgttggcagctgatggctgctgagagagggacagtcactctcctttgtggctgctagtaggtttcttatggatggccacagcctacacacatgtgagcagcactaagtaatagcaaaacagtacaactaaaggcatagctctggggggtgggagggatgtggtgaggggcagtcgaggggcctggatgaggtggacggatatgagcaatacatattatataagggtgtggagcttagaataaaaatattagtttgttgttgttttgttttaattatctgctgggttgaggcctccttccctggaggccctcatctagaaggtttcagatgaaggaactgccttctgcctccaaaggaaacagaaggcagtggatggagccacacagggagggggaactcaaagagacagaaccgaaaccctctcctcagataagcaggccttcagaatgggggagcagagacctctggagtgggtggtgctttcagccctattcatgaagccatggcaggggaagaggctagacctcatgccaaggaaagctctcactggttttcccaaaaggcctgtagagcttttctgatgaaggagctgacggttggaacccagaaatggacggatacatcagttcatagctatgggtctcctgccaactgtagagaccttggtctctccacacacggtcacaccacagtttcctctgggcctaaagatgagccaggcagttgggacaccgacctggtccttcacctagaccagggtctgttccatggactcaaacgtacttgaagtggtgtctggcaggtgacactctgagcctcaggcaactctgcagcctccacagtgccaaagtggaaggaggctgcacagtggtgccataggcagcatattcactgccaagacggccttagaaggcagacctggccagaacatgcacaaggtatggagccaagctaggctggactggaatcttgatttcaggcaattgatcaccactgtggcaagctgactgacccttttcttgaggcctccttttctttatctgggcagtagaggccatgagacttacctcacagcctccagattaaataaaaaccagcttcaagaagttacaagttgggctggagagatggctcagcagttaagagcactgaatgctcttccagaggtcctgagttcaattcccagcaaccacatggtggctcacaaccatctctaatgggatccaatgcactcttctggtgtgtgactgaaggcagctacaatgtactcatataaatgaaaataaattaatatttaaaaaaaaagaagttacaggttgaacatcccttataagcccaacattcttagttcagagctgtttcagatgccagatgctttagactcagctcaacttgaacctgcagcgtcagtccatcccctcctcctctggtctcctccatgtctttactgcagagtatttaaattccactttccagcctctggtttttatgaggaggctggaagcaacctggggaaatgtgagtgccggtggcccaggagggattttacccaccagaggtaagtagtcctccagacttccccaaagcccctactctgaactgcaaaggggcacttaggcatccaatagaccagcagataaaggcctactcttgtctgtgattttcctcagaggtccagtctgggaagatacttcctatccaagggcaggaagcctcacaactacctctcagcctctgatagatgtagacttgctaagaagctcattgtgatattcaaatacagcttagaacgaccacggagaggagtttagtggggaattatctacattagtgtggtctgtggatatatgtgggaggctatccgattgccttaactgatttgaaagacacaacctgaaagtgggcagcaccagtcactagctgggggagggggggctagactgtgtaagaatagagaacgttaactgagcactaagcatgcatgcatgcatgcatccattctctctgttcttgattaagctgactgagcactaagcatgcaggcctccattctctctgctcttgattaagctggctgagcactaagcatgcatgcaggcctccattctctctgctctctaatatccatgtgatgtagtgacctgccttgagttcctgaaatgatggacagtaccctggaaattttaaactgaataaactttcttccctaagttgctttttacaagtttttaaaaacaaaacatagccacagaaataaaaccagcaaaaatgcttagagcagtgccagcctcaaatatggtcagagctcagtgtacagtagctctgccccctcagtttccaggcagtccgagcaggctgagggtctcactctgaggcagcatgaacaccataagcatctatgaccatctacgggtgaaaaagccaaatatatttgagaacaatattctgggtcctctctggatcctgatagccacaacagaacctaaatattaaatccaggattgccaggttctcaatttctccccctgaaaaatactgtagagaaaaaaaggggggggggttgagcctgctgttcagtgccccagctctcagtctgtggagatttacgtgggcaatgcctctgtcatcctcctccgagcatacaaaggaaacactcaggaacaataatggaatgagtcttgttttaagaggcacttaagtgaattaaaatcaatatgcaggcatgcgtgccatgggaggtggcatccggaatgttttactggtagcagtctctgctttagaagatactgatctctgcaggacaggaaggtcatgaggaagtgtctctgccctgcaacgtgttctaggatgtgaggtttagaagccctgtgagcccattccctcagaacctgacatcaagtggctgtctccatgggtgaggcacagagagaagatggagggtgggtgtttgtgtgtcctctgtttcttattttcttaggctgaggtcctgtcctacgttgactctgtcactctgacaaatgccacaaccaaaagcaacttagagaaggagtttcttatttgtcttttgcttccaggtcacaagccaccattgagagaagtcagaacagatagtcaagcaggagctttaagctgaaaccatggagggatgcttcttgctggcttactcctaggctcaagcttctttatacagcccaggatcagttgtctagggaacggtgccgcccacggtgggccaggttctccttcaacaattaacaatcaagacaactaatcccatccaggtatacccacaggctagttccatttaggcaattcctcatggatgattctacactttcctctttgctgtgtcaagctgaaaagctcactaggacagttctctacaatgaagtccttaccaaaactatcatgtaataatgatttcctaagtggtgtacataggggaatgaggaagtaagcctgggaaggaacaggtatcaaatgatgtactcatgagggcaaagatgagtgactctagcacagtcctaggaataattcacacctgagaacattctggtctgagacaagggaccgtgagtaaatgctctcttgaaggaattcccaagcatgacaatctccttgtgtccccaggcaaagatggttctagaaaccagtaatgatcctcagacacagcgatgctagcagagtgccttgtaagacccatgtaagaccactgatgagctatggaagcctggacagcagccctcttcccacagcctgtttttagagaattgttgtgtggtcagatctgccacatggagcaggaccaacaaaacaaaacaaaacaaaatcaaaaacaaaaaaaaaaaaaaaccaaaccaaacaaacaaacaaaacaccaacattgaaagagcaagatactggaaaacacttagaaaatgaagaaaaataggaatgaacaaaactgtccagagtgggaaagacacctagaaaatgctggtcattcaattacctttgcagcatcagcagaaagacgtaacaacccagtccattcagctcaccccaaccacggaggcagctcctaacacactcaagactaccatgttacaagcaatttacactgtgccttagactggctcataaccatgtggcttggcctttttttccccaaaggaccaggaaaagtcattagattctacacatctctagcaagataggatttgaaacctggtcatcaaaacagcctaaagcatccttatcatgtgtgtgggccagtcattccaaacaactggctagttaaccaaaagtggaagaccaaggataaacctggaaagcagaacctatctcccagggcatactaactcaagcatttaactctatttgtagattattattattattattattattattattattattatgtttagtatttttaaaagtgtaatgaatgttttgccagcttgtatctatatgaaccatatagaaaaaggcatcaaatccctcctgtacctgaagttcagccttcagctaccacgtgagtactaagaagtgaatcaggtcctctgcaaaagcaaccagtgctcttaaccactgagcctctcttctgtcccgttaattggtatttcttagctctgtgctcctgcagaagagtctttcaattgctataacaatggatcaatcactgaagttcttggccttgggcttttgggcggtatgcccataattgcacaccctgaaatatggctcgtgttcctttctctgccctatgggaaacttttgaaagcgtaattcttggttggtatgtggctccgtgttgaaccagctgccaagacaatggctctgtgtctgtgttacctcaggatagcgctggaagtcccctctctacatgacactgttaggaagtggtagactctttaggacacaggacttggtagaaggatgttagatcagtggggacctgctcttgaagatgatagttgggacctggacccctttctcactcccatctccttgacattgtaaggtaaatacacttgatccattccacactcaggacataccaagatgccatgcctcaccacaggctagctgatcatgagctgaaaccatgagccaaagccatttctactttcatgttgggtttcttgcgtctttgtcacagtgacaaagctgatcaggtcacagttgtaaataccagaagagcactaaagagaggcctacatctgtgaacctccaattctgacacacgagatagggcacaataacatcttccaaataaatccataaccgtacaaatcctatgctggccacagggccctggatagagctcttgtgtccaccaggtaaaactctgaatgagagccctttctgctgcacagtgcagcttatatgtggtgattgcatttactgccactcacgatggtactgacctacgcattcaaatggcaggctactctctaccacgacatgagtgtctgtctgactcaggtagactagcacgtcctataatcttaaaggacttacagatttcatggttcatgacaaaggaagataaaaattacagtagtggtgctgaactgtagagtaaggtttacagaatggaatagggaggcctggtgcttttcccattaagagttacccatcccatctgtgtgcagattgcccaaatactcagagactaaccactctttattcttagaaccaaccagttgctcctcctcccttctgccaggccaggcatcctctgtaaagtcaacaatgaccggattacaaaggcagatgacccacccaataaagggcattgttgatactctatggataattattcttaaacaagaaattaaacaaagacatgtgagaatggaagacttacctgttccatatataagaatttgtttaccacagctgtttcctgctgtagcaacatgaaagaaattggatggatggatggatggatggatggatggatggatgaatggatgggtgatgaatggttggatagatgggtgggtggatagatgatggatagatagatgggtagatggatgaatagatgggtgggtgatagatggataaatggatggatggatagatggatgatgggtggaggatagatggatgggtgctggatgaatggatggatgctggctgggtgggtgggtgaaatgaaatagataaatggagaatggatagatggatgaatggatagaggatggatggatgtgtaaatttctctggaacaaccaggagccctgagattagagttcagttctctgagttgcctacagcaatatgctctgaatgcacccaagatcacctgattccctgccatcagggcatggtgtgcagggaactggttacccaaggcctccatctgaggactcagggtctgggatgaccatcattgcacaggggtggagtcaccgccatagctacctgccagcaaaggttccagtgttcctcttctactgggtagcatatgtaataaccttcaagttgatagttgctggagagcaggagatagcctggagagcaggagtctcatggatggttctttccatagactacactcacacccaggagtcttcctaaaaactcttgggttgagtgtgtgtgatgaaatctagagattcaggaggcagaggcaggaggagtttgagttcaggtctagccttggctacacagtgagacccttcttgaggaaacaagaatcctgcactagagaagagggcctgaggtccattggaggtccttaacattgtgtagctttccaagggtcttaacttgagagcccataaggaccatgcagggagctttctgccaatgcacacccaggctgcctgctttggtttaatggagttaacaaagctctctggggaccattaccatcatcatcttccctgtagcctcatatagattagagaggtactaccgtctggtgagtctcagctctccaccagagcctggggcttggtgggaccagcatgcacttaatgtcttcatcaggtcctcaggcagggcctgtgcacagctagtcctcccggaagagtccgctcctggttagaactcagtggcagatgttcaggctcatcgcctctgaccgctgttaagcagaaggaaggggagatgctcagaggccacagtgaagtgggagaggtgaacgcagtcagttcagagcctccatttgagacgaatcccacggcttgtgcaccccacctttcaccctgcatctcttcccagcaagaagcagacgctaatgcatccccccctcgtgtttacctgttctgcacatctcacataaatggagcaacatgtgtgacattggctgcatggctggttcctttcactgcacctttgaattttgaatttcaagcaaacacctatgctgtgatatgcgtcagcattttctcaaggttgaatgctatcctgttccatggaaactccacgcttggtctcctcattgatcaatctaggtagagcctagattgtttccttctacattaaaaagtgttaatgctgctcccttaaaggctgacatcccctctcagccttcatagggccctctgttccatgcttggtgtttataggcatttgctggaagaacagtgagggagtttgtgaatgaatgcatgagtggatgaattaatgaatgctttgacgaatgcaaagacagcattaggcaacggcggaagataagacaccatgtgtgtattacctgtgacatatgtcagagcctaagtctcaccgccaaatgttcaagtgagaagtctccctcatacccttgctgtgccctgtactagatccatggggctggggttgtatcaggatacgggaatttacatttaaagagatggtgcagagaagcaggtctgagctcggacatttggcatccatatgcccactcagccctccagcacctgatagaacacctttgcactccaggttccttctcacaagtggagaagtaagagggaatcatgagacaatggagtttatacactgcctggcatgttggtgagccattgctgagcagagctcacctgtgaaacctacccacatccttcagctttggttgggacatgggggaggggagggtcatctcaggcaggtgctgtgacttcattagacaggtgataaaatgcaggcttccagaaaggatagtttatttacatgacaacacacatagccattgcaaatctgaaccaacagtcaaagcctaccggtgaaggccaaaacacgttcctttctaagctgcagccggcccacgtgtttcaccaacagaaatttgtcaggtgctgtcaggtgctgacaagtcagctgagcaacaagtctctcagctgacttgtcactgaagagagctgctggtgtcttctccaggagtaacgcctctttctgttgagccaggttgctaggggctttgcttgcctctggctcctctgttacttaagaagtttgggatgaaacacctccaaaaagaacccccaccagaggatgctaagaaacggatctcagaggaacatcaaaccgatagccagacatggagacctgagggtcgttttcagtttgacaaacacatgttgaaactagaaaatgcaaagtcaaaactccaaattcaatctgactcttagagtaaccccacctcgcaactcgaagacattctgtctccaaagactgctacgttggtggctgcgtaagacccttctcgaagtctaaaatcaaaccctcctgtgaatgagaggaaggaggccaaaaggccagagaggctcactggcttcattgtctgagcttccaaacacccccacgttgttacagagtctggaccctggctctgctggctgtgtgcccagaactagggcagccaaggtatgtctggaaaagacggcttcttcaaggcaagcgtccctcatgccaggcaggccagcaaaaggagctgctgtttgcagtcccctcacacgaggcttccacgagccaagcctgctcactcaataaatgcaaagtcaagagctcttgagtgccaggcactgagagtgtgtgtgcgtgcgcgcacaatacaatgcttcctgtcgttgtgttgtggtcttgtcgttgtttgcttgtttaatgttaactgatggtttcctatctcgagcataatgtgtactgttaagaaatttcaattggatcacaattccctgtgatctccagagaggaaccttgtcagcttcccttgctagctcaggaacagtgaggctgggagaaattagtcagtcggcctcaagtccagtccaagatctcatagtcaaaatattttcaaaagattttgttgggactctgcttgcaaaataagtaagaagctagtgaaaatatctgggctttatgccgcatttaaaatcattcagtatttttattatgactttcaaagataccaagctaaaggcttgctggtgtgattagcctctttaaaacagcaccgctggggccacggagatggctcaggggttaagagcacttgctactcattcaggggaccagagttcaattcccagtacccacatggcagctctcaaccatctgtaactccaattccaagatatccaatgtccttttctagcctttaagggtaccaggcatgcacacagtgcacacacatacatgtaggtaaaatatatgtacacataaaggagcaaaataaataaatcttttttaagtaaaaaataataacatgatgaataaaacatttgcatactgggcaaacggctactgagtgggagttttcttaacatatgatgccctgcacttccaccttttaaaagtgtatgtgtatgtgtgtatgtgtacatgcacacatggcatggtacacatgtgaatgtcagaggacagcctgtagcagtcagctctctcattccaccaggtgggtcctagggattaaactcttggttgtcaggcttggcagcaagtgcctttacccactgaaccatcctagcaacccagtcttctttgcttagaatacatgaggcccagttacaaaaccctttcctaagtgcagagggtcggggaagaaagagtgaaagaaggaatgttcatccaggtcccatggcccaagtctcctcagagactacacattcaatagggtatactctcctgtgtgagtccaaatccagagaagttaacaacgatggttaagacctcaatcattagtttaaaatcatctctagttctgtcctctgaagctgtctcggggaaccctgggaaagtgggcaggcagagaagagtggagacttggtctcagagctccagcccaccacagctggggacgaggccctcccatgcctccatcctccacacagtcccaccatctgttgacattttccgtttcaggaggagatgggcatttcctgtgagctgctggaatcagacttcctcaagtgcagtgtgggatttcctttcatgaggtcaaagtctaaggtaaggcccttggccaagatgggtgcttcctagaccagagtacccctggttcttcccattggccacttattgctacacacacatacacacacacacagagtcacatatgcacacacttgaatatacacacagaaatatgcacacgctcacacatatgcacacgcatatacacatgcatacacaaatatgcacacacctatgtacactcacatatgcacacacatatgcacacatgcacactcacacacatttgcacacactcacaccacttcatgtacattttccgagtaacagaaaagagacttcattgaaaagcccatggcctttcttgaacatgctactctgctgtaaaaatctaatccatgtgacaaatcaaaccaaaagtgcatgtagttgtctctcccagtggaaagtgagtctcaccaacatgtatcaactctgcaaatgtcataaagtcaatagaataatgactatcagaatattgatttcctgtttctgctgcagaggccataagcataaataatcatattatattatttttttaaattccacgtacagatgtcaagaccataagcaatattaactcagaggtgaggggatggggaggaggtagaaaacctagcaccgttacaagggctgagctcccctacctgtggccccctcacactctcctgtcctcagactctggggttatcaggtgccaggacctgctctgcccgcgggactacacttcagtctcactctgattggcagtgggcttctgtcgctcacttccagctttcactctgattggcagtgggcttctgtcgctcacttccagctctcactctgattggcagtgacctgggccctcctctcacttcagtctttagggtggttgacttaactcatctgggacaagacccttgaccctttcattcctcataaaccaagttcctctgcagcagagatttctgcctcggaacggggtgcctgcgcccaacatagataatggtttgatttaagggtctgtgcccactgctctcaagtagcattcagtttcacggaattcgacgtctcaggaaagcatgcacttgcctagaatttgagtggaaaccaaataattgagatgcaattcgcaatctttcagcatttgctgggattgaagactatcttgaacatcatggctgctgagaaacgtaaaagctgggaaggtggtggagtcgagtcagaggctcccggctttgcagcttcaatgtgctgcttgctctaagacttcctgtggctggaaggggtgatgtgcatctccctggggcggagggagttctgctgaggcagccccctgccacccgaaaatcagatatacattaaaaagtaacccttgctatgcagatgagcttccagaggttataaactgcaaaccattctagaaaatttagtttaaaaagtatagaatgcttgtgggtgccaaatgtgctttctttctttctccctagtatgaattcagtgtcatctttgatacaagccacctgtctggggaagaggaaattctcagcttcatcgtgactgctcagaggtaaaaagacttaaacagactttatttttccaaaaataaaaatcattatgggatggggaaaggacatgacttgggtgtccctgggatgtagaggatttggaaatggctacacagtgataaattccccaaagcactatagggatcagtctctgtggatgctcattaggtcctgctcactactgtgaccaaagaagaaagctcaagggaggaaggatttgtgttggctcatggataaaggggatacagtccaccgggcctgggaactcacagcagtgggcaggtgcttgctcacagctaagtggtccagtgatcagagagctgggagtgaagacagatgcctggacagtggtagtaccctcacagtcaggcccagaggtgtcttctgggtgatcataaacctactcaagcttagatgaaatccagttagaactgctgtccctggtcaccacttctaaccaagcctgggaggtctgaggatcagctcgtcacggggatgtctacaactgaggacaggcaggcctgatgaggtaacactctagttcaagatcatagaattaactggccagttcctgcttgaccatgttttccaaatcagacagacattctctgaggtttgtcaggctaggtcatctgatttgggggatacatgtttcacagagaagggaaagccacctacagactggggacttggtgaagctagttggcagaggcactcaaatagtgtacctagaaaagagaactgtcccagaagccaggtggacagacagcgaagggaaaggggccggggtggtaactccccttaggagtgtgtatagctgtgagtgcctgaactagcctgtgggtttatgaactacctccttgagccacaacctacacttgaattgaagcagcatcaaggtatcaaatagctagcctcacctgtgcaccaataaaggaagcaccattaggtcagtgagtacagacagacagacagactttgatgaagttcaggcaggtgtggatgggcactcaaaacagcatattcatttacattctagctatagggatggagagatggctcagtagttaccagagtatgctactcttgttgaggacttgatcttggttcccagcacccaggctggtcaatgtacaactgtctgtaggtcaggcttctgtggatctgacaccctcttatagctcacattcacacacacacactcacactcacacactcatgcatacatacactcacactcacacatactcaagcacatatatatatactcatacacacactcaaacatacaatactcatcacactcaaacacacacatacaaacacagactcaaacacaatacatacacattcagacacacacttatacacatacacacactaacacacacatacacacactcaaatacaatacacacatatacctatacacactcaaacacaatacacacaatactcacacacattcagacacatacatacaaacacatgctcaaacacaatacacatacatacaaacacattcagacacacactcatatacatacataacacactcaaatgcagtacacatacacacacacattcaaacacaatacacatatactcatacacacatattcagacacacacacatactcacacatacatacattcgcacacttacacacacaaacacacatactcaaacacacacatacttacacacactcaaacacaatacacatgcctacactcatacacacatacacattcacacactcaaatgcaggacacatacatacacacacatacacactcaaatacaatatacacatatacacacagacacacacactcacacacatatacacactcagacagacactcacagtacaacacatacacacatgtacacacactcaaacacagtacacatacttactctctctctctctctctctttctctctcatacacacacacactcacactttaagattttgaagtttctagttgaaaatatgttgccataactgtccaagagtcccatgtggtattaactcagccagtactgacatctgactcatggatttctcctttctttctggactttcttttcttgatcatctgaaaataagatgtagaaaccattcccctcaacccataaaggttccctccgaattccccaagaacaaagccacatgtgacggtcaaacttgggaacttcagccttggtgcatctgacccacagcctgtggtcgttacaccagttgtctcagtggtgtcttcccagacattgtccacggattagtcccatagtcaagagcagagaggaagggaggcatgcgtgctcacttgctaggctgtgttcatctggatttctccactcttacacagttcaaaacctcctgcctaaggaatgttgatgcccacagtgggctgagtcttcacacactactttaagacacgcacatacacggccccccctctacacacacacacactcacaggccaacacgatgtagactatcccttactgagacctttctaggtgagtctagggttgtgtctaaacttaaagctgacaggtgcactgacacaatgtaacaactcaacacatctcaagattgttgcttgaacacagnnnnnnnnnnnnnnnnnnnntagttgatattgttgttcttcctatgggttgcaaaccccttcagctccttcagtccttcccctaactcctccattggactcaatgattccaactaatgtacaagtccttgattctcccatgcatgccactgctcagtaaacacctgttaggtgcccactatttagcagttagctaaatgtaggttatatttttgaatgcatgctacctactaaagttaaaaaaaaaaaaaaaaacaactcacaaacattagtataagaatctccagttaaccccttagatcctaaatgctaaggagtgtgtataaccttttaaacatactggattatcccacatacttgcttctcttggagattttgtggaaatctggtctgcccgacccaaagagccctcctaacacttgactccctgccacaacaggcagatccctaaagctccttatctcgagtctgacagttaaaatatcagtcattcctctcttccatcgccaccctttgaagggctcttgcctacttagcgctttcagggaacatcaaactgagactaaacattgtttcctgagccctcatctccacatcagcagcccagccagccgggcagcccacttggagaagccccagcacattggagcttgagggatggccgaaagttgtttgatgtttggtctctttatctcagcttttcaacttggctcattccggagcccttacttgatgacagatcaaaccgttattgggtgcaagctgccagcagctcccaagtggctggacaaatgacagggcaagagatgcctcttccatcaagagtgagctactcagggatggaaggatgctgcatgtagggagggtggggaccagaattgtaccaactgcacctgacagggaagtcacctctggactgcccctggcaccgattccaaagcttagactactccctgggaaaggcatggtgaggaatctagtcatgtgggtacctgctcccactgtcatgggctgtggccaccttgtgagggactgatgtcatctcatgggaggaagacagatgtggctccaggggcagtggcagtggccctgcatggtcagagtcatgaagcaccattgtctcagaacaatgggagagagggggagggatgtgagagctattttagtactgttgccattcaacatttgctggtagaagaggaagacatcaggccaaggggaggacagcagagcagctgaggttagcagatgtttgggagcgacatctagaggagggggtaagacaagccctgtccaaacctcagagggtctgggacttcccagttccatccagagagggcaagcttcactttcagctaggaccccctgttcattccaagtgacagagccatggtaaatattaagtgttccattggtttagcaagtcatacccaagagccatgtctcctcccaaggcagccgcttgccctaagcatcccaggcccgactgaggactgaggtttaaagaactaatgagtcacagtgaggagagccctggcttggaatcccattgagctatctagaaggtcgactctctctggctcatatcgaggctgtacaatgtctgagctgttcctctaggtccagagtgctgatccctctgcctctgggctcatgctgagatgtccgtgcacctccttcctggaaaccatgtcctaactttgatggtcactgttcgggctggctagttttaacggtcaacttgccaccggagaatggagtctcagttgagggattcccttgatcagattagcctatgggcatgtccttgttgattgaagtgggatgagctagcccattgtgggcatagccttccctgggcaggcatcctgaaccatgtaagccaggagaaagctatgtgatagtgaacaggtaatgtgggtgcgttcagccttctggtcctcactgtgggtgtgataagttccaaccttgattccctcagtgatgggctgtaacctgaaagtgtgagccagataagcaccttgctcccctgagttgttcttgcttggggtgtcttatcccagcagtagaaatgtaactagagttctatttaggaagcaaacacttcaagagactccacctacaacagggtgttcacctgtagcccaccactgcatagtcaacaggaagagttaaatcatggctcctgctctaccccgacccctggttgtgtctttctctgatggaagcctactcgcctgtgtgaccgggaggtgccggagagtttctgtcctctctctcttccaccatagcagttctcaggggtctctatgccctcaggtgggacatccaagatacatgctctctctgtcctgattcccgaagtcctccccgatgagcctgagtcccagccgcatccagcatgcaccttcctgctgggtagcaagcctccagtggcttctcccctttcctggtctcttcattacctattggtgttttctggaatcacctcccatatgtgctccttgccctgccccctttgtacacacagaatggggacagattgggtgagtctgaaggatgtaaggattggcgtgcgccacagggcaggcataccagctgctaagcagcttgcactgaccactgccccatccttcctcttctctccccacacagtggcaacttggagcgctctgaagccctgcatgacaacactctcacactgacagtgcccctggtgcatgaagtggacacgtccatcactgggtaagtatccaggacacagagcaccttgcaatggaagtctactcagctcctaattcacgtgcgtcatagccaagaacaagtggccttgccacctccctgcctgccagcctgagaaagcaggaagaaagtttgtctgtggtagcccttagccacctcccatctgtttttcccttctgtcagccccagctacccaggcacatagctagtgcaggaacatgctgatacgttctctgatcttagtatgcacctattcctggctcctgatgcacactatcactccagactgctgtgtagcggcaggcgctgtggttacaggagtaaaataccagctaaaagctgcagtgctgaagactaccactgagtgttcctcgcacccctcctcacaggaaggccgcccttctgttcagctccatagttcctgcttgtcatatttctgtcacgtccttgagtacagccagaaagggctctgcctcacatctgtgatggtctggaatggacatggagccatcacaacaacaatggcaacctatccaagtggtgtgcacagccatccagtgccgctggtcttgttggtggtggtggtggtggtcttgttggaaagctgtgcctgcaggggggcaaagcaacctgagacagcttccagccagagcttagaaaactgagaatccagcccttgtctccagcttcagcaaacagattgtgtgtacctctctgatagcagcaaggctggggagaggggtggtggtgcggagggtagggggtgggtgtcatacagttggattagatcaaatgggaactcaaggaattcttagcccaaaggcaagctgaactctctgaaagttcagtttcttctgtctcagttttcaagggctctggatctaagccttggtccggaagagaaagttgctccgagagggaggggccgcccctgcagtagctggactctgctgggagccagcaaagtgagcaccctggattcctctttggcattctgtagcatggctcagtagacatgaggcgttggtggaatgaatctgcaaaatggcatacactgcctatgttcacagctctgctttaagtcccatgctttctttatccatcctgcctaagggatggtagaaaacgcccagaaccagccttgtccttaggggttacatagaaacacctcccacacacacttgatcatgttgtcaaggccttaggagacctcagtgtgaggcgctaactgtccccatgaagccatctgttaaacaagtgactgtgcctctgatctttccagggatgggaaattggggcgactttaaatttattatccataaaatgcctgtttcttcttaacttttattacatctattatgtgtgtttgtgtgcaagcatgaatgagcatgcacagggaccatggtatctggaggtcagaggtcaacttaagggagtgagctctctccttccaacatgtgggtcccagggattgaactcaggacaccaggctttgcggcaagcacccttagccatcttgcaagcccctgaaatgcccaatttctaataagcatgggagtctgacagatataaatatgccttaaaaatgaatttgttatggttccgcttgccaaatacataatttacttacatttatttctcaaaagcttcttatcagcataatctacagaaatgcctttcaaatgacaagcaaaacgtatgattttataattaagggatttttttttctttttgggggggagttgtgggggaggttagatttttgttttgtttttagtttctgaagcttttgaattttaaaactttgttttagaaacataattgggaagatggctggagagatggctctgtcagtaaagtccttgtgaaataaaagtgtgaagaactgagttctatccccagggcccctgggttggccatgaggatctgcagatccctaggcctcttgttcagtggcagtccctgcctcaggaactaaggtggagagaggagacaccggatgttgacctgtgacctccacacctaagtgttcacacatgagaaccagcagatacctatagacaaagaaatataacctcagcatgcagtgcttagtagcttattagtatggcctgaggtaagaagatatatgtgttaggaagtcagggcagctgtgtctattcatggaagagagaaatgaccatccagcgaggaagaatggcctgctggagacacacggtggaagagagatatttgagttcccagtccagcagtgacctggggggcctggtctcaggtaggatgacagatttcacgttttcctctttcagaattgtgtccccaacctccttcgtgtatggcgagtctgtggacgcatccaacttcattcagctggatgaccaggagtgtcatttccaaccagtcaacattactctccaggtaccgaccggcccggggtgtgaccgctcacgcgaggaccaactttgttttcagagggaactgttctggtccgttttcctggtgtgggggtggggtgggagtggggcagagatattgaggaggtgttaaccacacgcctgcagacctcggtgtttgtcaggatttagaacagccacatcaaagagcagcgctctcagccttcctaacactgtgaccctttaatacagttcctcatgctgtggtgaccccaaccatgtgttgctacttcataactgtaattttcctattgctatgagtcatatgtaaatatctgatacgcaggatatctgatatgcagaacatctgacattcacctctgtaggggttgggacccacgggttgaaaaccattgccaaacaagagcttcatcaggaaggcttatgctgcccatgatccctgttagtataagggctttaggagaccctccagggcactgccacataaatttcctccagaattttcatgctgactccaccaaagttttctcaccctgaggaccagtctttcagaagtacagttttctgagagcaaaaccctgtgagcccatgcgccttggaaagtgtgctgactcctcactgggctagggctggctcagcttaggttctaagcatcagctccacaggtctgctgggtgtgtgctctgtagacatccagaagaccatggttgcttcacttggaggttgcagactttttttctgaaacatccagaaagtaaccttttgagaccttgtgggctacactgtggcagctgtggtgctgtggagctgtagcaagaagagatactggtctttagctacagggaaagagatactggtctttagctatgcaccttcctttgcatgtatctcttataggccatggaatgttactctttaggtttttttccccagaaatttaatgatgtaactttcttagtttgctggataagagttagatacctggtcacatttggtctgtgaggcctagtttgccagcctttgctttaaaattctaaggacagcttctcaaaattggagtatgtgggcatgaagccaggagggtctcagcgttggctggtctgtgttctttaaggggaaagtatagagaaatgtggccccatgagaaaggatgtgcagggtgctcccagaactgggtgaagcaagcccgggccaggactggaaaacacaagaagaaatgactcctcttatttggtgaagtctacatctcacagtcctcggttctgcctcccaaagtgttccctagcctgcccattctcctccatggagacaatggtcttcctatgtgatattcactatgggggccaaataacaatgatcttccttacccgtgtttcctcctatgtggacataagagatgacagatgctggtgtggtgagggtgcaggggatggggctgaagctgatgtggtgagggtacagatgatgtggctgaagcattttgggactcacagaagccggtcttcctccattctgaatgttctctggccagaagagctctgaacctgtgatggataacacatgtttgcagcctagagaggatgggtccttgacttgctaagcccaactgtcacacccgcccttgatttacagaggagactgggaagagttcagtgacactgtggggtgacagctgtggtcacgcctccatgctgaggtgcctcaggcacctcacagggcctgctcgttgtttccctttgggtctctcggttggataggaaacaaacaccaggtagatttattttgtttttgtgatttatatcctttcttctcttgaaatacaggatgcagacaagagaattatttagaaaggttcaaatgacccagacagtgtcgtaaaaaaaataaagaaagaaggggcaagaggaatgcttgctatataaaatactagatttataacagatactaaatattagtgcctgctcagaggatagacggaaaatggatgggtggatagatgatgggtgggtgggtggatggatagatggttgggtggatagatagatggatggatagatcaataaatgggtggttgtattctgagagaatgcagcttattcttccagttggttttctgaagatatttttaaagggaacttagagtttggtgtctaagaatatagcttatttcacatgtgacccgaagcaaagaacccagctgtcagtgtccctggggaattcatggttggcatcatccttagataaaacactgagggagcttcagccatcagttcaagtttgaggcagtaagctgggtctgagagttgctagtgagcttcacattaggagagccactacacacacacacacacacacacacacacacacacacacacacacacgttagcaaaggctatgtttcctgaaaccgtattgactgactcacttttctggtgagaacagttgtccagctggaaggtcacagaaattggtaatgaccaggggtgaggctggtgtggtgtggggagaggcaaggaatatggagaaacctcttgagcatctccttgatcagcactatcattcctgaagcagaaacaagacttccccaagaagaggtccttctgcgtcttctattagtaggtctgccattcagtaagatacatgtgagctaaaagactccattgcagatgggaagagacagaaattctagtctaggctggctttctatgccagccttgtgagcagttttcccagaggagacacagaaggttgttgactgttaatagtaattggtttgatttggattaatctagtttgatttgtccaatcaggagtcaaaatgctccccccacctggagaattataaggagatacattatatatgtcacgcccacaccttcgcacagatgcagatgttaggatgttatatggcaggctattgttacttcagtttgttgggtttgtttttgtagctcactctgtagccctgtctagcctagaactcaaagacatccatctgccttgcccccaggagccatgtgacacacctggatgctttattgtttctctgagaccagctctcactgtgtgacccatgctagcctagaaccagcaactctcctgcttgtgcctcctaaattctgggaagataatgttaaaggtgaatctgatcttacaagctgcctctaagaagtaagagcaggcagcaggagccattctcctgttctcccatccatgccttcagtgggaatcccaggcgtgggatttgcatgtcgggcctctgcagttctgagctttgagtttttcttgaaatgagttgttttccatggtggctggatatatttctttttcttgtctgagggctgttgttgtaaatgctgacctttggaatcaagagttggcaacagcctctcctccagtcttatctttttttttttttaatctttcactgaagttaaacaacctaatgtgaaaaagaactaaaggcctagctttctagggaaaagctggctacaactagagctcacacctgcagttgtgtgtgaatgcactgttcgggtagttttgattgttgttggctctggtgccctagcctcagcttcagagatatgttaaatccctgaattttgtttctcagccccaggctgccaggcagggttcgctccctcctctctcccaggaatcccattctgatcatcttttttaactgacaaattaaaattccagcttagcatggtagagcatgcctgcagtcctagcttttgggagtcaggcaaaaagattaggaatccaaggtcagtgtggcccatagagtgggttccaaggcagcctgagtgctcagagagagagagagatcctttctcaaaacagaactgaaggaaacaaatctataagcttcactcatcctttttcattaagaaaaagaaatatttaatgacacacctcttacaccttgtctgtataaagtgtgcaggtcaatgattttagagtgttttaggacttagagttctatcacctcaaaataaagaattcacagttctcagttattggcgatatagacataccttgaaaatagttgaaattggtacaggattggctccagactccttcaataaagcaaacagaccaacaaagcaagtcatacgggtttttttttttaaaaaaatggtatttatactgtatgatagcacttaagtgtataacatagtttctagaaaaacaagactcgtgctttaattaagtggactgcattggtcagctgagcattgttttaacattgttgccaggagaagatgttgccccagtgaggatgcatgctggccagcctggctgttagctgtgaaggctgcagaatcgtggtccaaagttctgaggataacagggacagttagctcaatcagcgactcttgccctcatgaagagttcttgagaggatagggtgatacttgccattctacctacaggagaaacacttacaaaatcgaagtctgtcttctggtatcttccagggccttgctatccaagtttcggacatgttctaaatcccccagggtcagtttaacagcttcaccatatcttagccagtgcatcccatctcaagaaaacccttcttttaatgcctaagagacaactccccatccattaaagttttgttttaagatggcagaaatttgttcttatctccaggcttcatttctagactgtcccgccaaccccctcagctatgtagtgagctcctgcctagaagtctcagactctgcaaagtcatccataacagttggcatcaagggctggagagatggcgcagcggctaagagcactgactgctcttccagaggtcctgagttcaatttccagcaaccacaaagtggctcataaccatctgtaatgggatctgataccctcttctgctgtgtctgaagacagctgcagtgtactcacatacataaaaaaataaataaatcttaaaaaaaaaaaaagagttggcatcaaccccattcagacgcccatcacactgatgtctgaatgatcataaccattgatcataactgttctcagtggcaaacactttcttggctttcagactttccctgtggttagtttaatctaggcacagtcaagtcttagtgagtaatcgttggccattggatgtgtctgtagagaattatcttcattttaagtgacttggagaggcctgcccactctgggtggtatcattcccttggtagagggtcctggattgtatgagtagagaaaaggagctactagcttgtatgcattggttcatcaccctctgttcttgcctatagatgtgctaatgactagctgcttgcaaattcctgtatctttaacttttataagacaatttgctttaacttggagtgtgaactaaaacaatcaccacctcccttgatgtgttcctctaaagatagtttattgaagcaacagggacaggagcaaagacccatcaaaggagtcaggctttggcagctatagccttatgaaatataattctgtaacagtaagacttgaatgtcaaaatcagtcctctatccacgggctgcagacagagtgctatgcgcatgcgtgcaaacatcggtctcctgatacattccacagtgcatctctgttcacagcctgtttgcttagttattcatgtgttcatcagagtagcacttttaatttccttagagaatgtttcctctccattcgcaatttaattgaatggtgtgagagacatgcccactggagctcttaggtgcccaggtacaatgtaagagagcagtaatcttggaaggaatcttctcttgggaatagatcacaacaatgagtaaaacaaattgcaggtcaatcttggttactctgttgcagcacatgggctagctcaatcttggttactctgttgcagcacatgggctagcccagtcttggttactctgttgcagcacatgggctagctcaatcttggttattctgttgcagcacatgggctagcccagtcttggttactctgttgcagcacatgggctagctcaatcttggttattctgttgcagcacatgggctagcccagtcttggttactctgttgcagcacatgggcaagctcaatcttggttactctgttgcagaacatgggctagctcggtcttggttactctcttacagcacatgagctccagccccacttgtggatcattacaatgattttagaataatctaaaatattttatcccaccccaggcagccaatactgttctgttcctttaagttacccattctccaaataacccctcttaatctatttctattctgagtttgattggcaatctttgctctgtcatctcacccctttgggtctctttgtggcttctttctttcccctccttacttggctttgagatgaagtagagaagaaaagtggggtggggaggagtataaagttttaccctgatctgatacagaactcaagaagagctattcagatgtcatcaaactgccatcagaatgacctagagaacacatgtgacagccctttgtagggatcagaaaagttcattttgggaccagcccctctgtcactgaaggtcatcattatcccaaactgtgcaaagaataagtttggaccaggccactgggtctcagagatgactcctgggtgcaatgtatcctgggaaatgtcgatgtacacccccacccatcccacctgtttcgaaaacactggccctacccacaccaccctcctgtatttaattgtgccccctagattgttctgattttattctagagtgctgagaacccctgaacttcattttgatatctgggttcccaccaactatcatcaatgaatgaatttctaggtatgtaaaattaaatacaatttttagcaagaagcggataagaagatgcttagttttgttggacccccattatttagtgtttcatttcaaagtcagatctgagtgatgtagttctattccaattaaaagcatatctagatgaaataaaatcacattcataccatcacacttctgtgtatggctcagggactctttaggcatatgatgtatcacatgaccttaaggtcttgtgtgtcactgacacttgtcacgtgcattattccacaggtctacaacatgggtcccagcacccttcctgggtcatctgtcagcatctccttccccagccggctgtcacctggtggcgcagagatgtttcaggtccaggacatggtggtgagtcctccatttgtgtcctatgttggtttcagctttgaggtgcctgtttgaaatttgtatccacttaccctggaatcttctcaggaggttcaggaagtcaaggtgttttcacacttaggagacataccaggggaaccctgaagaaagacgttcgtctctatgttgaggcaatttggttgatgccacaagaccttggaagggatgaggaggggatggttgtaaattcatcccccagggtggcttgtggcccctctgaaaactcccaaagactatctatagtctctgtgtgtgtgcatttccttgagaagagcctcaacatatgtaaagattctcaaaggaaaccgatacccagggattaaagatcaatgaggtaagacatgcatgatgagactgaaacccaagttcatgtgcagaatatgaggccacctgatcctgtgtcacctgtcactgactttgtctgaagggacactttataagcatgtatggtcattgctacacacctgcttgaaagtgtactccgtacctccaaggattttctcccatcgactttcattcttatcttcccaactgctaatgggctcaggcccgccttattctatactccttccctggggctcagcaagacccagggaccaaaatctagcctgtgctgatgacagcaccagtttccctccagcccagaccccttccgggaatttcgggatctaccaaccaactgcatcagtgtctaatggacttaaactccagtgtcacccctctggtcagcttgttgttgttgttgttgttgttgtttacaatcctgttgctggggtagattataaagaaagtaggtttatcctgacttatggtactgaccacagtctaggggatatgtctcatatagtgaaaaccttcatgtcaacagtatcccaaggtggtacagatcaccatgtgacagaaagtttgtgcatgtatctttgtgtgtgtgtgtgtgtgtgtgtatgcatgtgtgtgtgtttctgtatgtatgtgtgtgtctgtgtgtggacatatctatgtgtcggtgtgtgtcttgtgtgtctgtgcttgtgtgtgcatgtgtctgtatgcatgagtgtgtgcatgtgtatctgtatgtgtgtgtgtgtgtgtctgtatgtgtatctgtgtgtgtgtgtgtgtgtgtgtgtgtgtgtgtgtgtgtgtgtgtgtatgtttcactaggctctgtttctccctttatgtagacaccagcaattgatcacaggacctacaccctggtgattttgcttaatcccagtcaccaccaaaggtcccctctttaagcactgtatactaagcactgccatattaaagatgggagattagcagcccgtgtgagcattagagagcaaaccacacccacgccatagcacctttggcccgtttctctacctcagcaagcagccagtctgtccttcagcccagggcaaggctgtacatcatccaaaattcctcttctcattcacttcacatgcagcatacaagcaaacctaacgtgagcccttcgtgaaaatcccactgttagcactgtttgtgactttgcttccagagccctagtttaaaggctgccatctgtcactcaggttgtggtaagtggcaccctccctggggttcctgcttttgcccttacagcccatccttggttgggtcttgacacacttctgtgtaaaacctgcccatgactctctttcccccataatgttcttagcagctttgctgtctactgtcacagcctcctcttccccagcctccttgctgtttgcagacgctgttctacctccagcactcagcctgcctctccttcccacgggactgctctctccccagatgtccatgtagctgcttccttcaggttctatcagtgatccccttcttcagcctctgtcttaacactcctcacacctcttgcctgctcacatgtcatgttgtcaccaagctgacaccctacatctatattcttattaggtcacttaagctgcctcctgtctgatccctctaatataaggataggaatcaatctctgtgtatgtgtgtgtgtgtgtgtgtgtgtgtgtgtgtgagtgtgtgtctgtgtgtgtgtgtctgtgtgtgtgtctgtgtgtgtctgtgtgtgtgtcattctgtctctctgtgtgtctgtctctttgtgtctatctgtctgtctctctttctgtttctctcccctctctctctccgacctaatgcaatgctcagactataatacagatgttcagaaaacatctatggaacatgagaacaattccatattctaaagcaattgctaactctatgacttcagagaaacactgacaacactctcaacagagcccctctgccgggtgacttgatttgtcattgagtgggtggtttaatctctagggagatggagtgtggggcatccacctctctctgaacctctggaaaggagactcagcagagtcagcacagaggaaagcacggcaagctgggtcgagaggatcaggaaagcatgggagggcaaggcagacagccagagagatgctctctgcatcatggtttgaaaagtgaaccagcaagcccatggcctgtgacacatttaagcctagagcctaaaggacactaccatggggtggaggtctgggaagctttgtgggaagctgccatggttttggcgttggcctccttgggtcacatgggccatagaccaaaatcctgtgagtgttagagtgctgagcaggtcctggtctctgaggagcctgctcggttgcctgcttacctcattctatgccacgtatgcctgtgtgccctgtgctgtgcccttgtctgtgggccctgctgagcccacacaagacaatcccctactagtgtgtaccaatggggtgacagtgcctgaccttagcttgagctcagcaaagcacacactcctatcttcttgctttttacctttggtgctgatgattgagcccatgcaaagcacattctaccactgcactgcccccactcctccccttcttagctgttattaactatagtaaccaaagccttgcattggcctcaatagctggatgaatagtgttttcattctattctatatagcacaacagtgttctgtaagagctgatcatatgaacagctatattatatatgttttatatatatatgtatatatgtgtcatatatacaatatatatgttataaggagacacaagccccatccacccccccacccccaccccatgagcagaagtaactatggaccaaatcagagctttaagtcacgtgaatattcaaggcatttaagagccatgtgatatgtactttttttcatctttcctgatctattatccatggatatgtgttaggttttccccagggttttcagagcagcttctctggtgtctatctggtgattctgaaactcccaagaagaaagaggagctggcttctgggttttgagttctcggaagcaaacccttcagggatttttcaaaaccatatttagggcttggtcagtcacagaattctcagtggctaaccccagtgaaaagactagccatgcgcattattagcatgagataggacagcaattcccagacagcaaatgttgaggcattgtgttcctgtgaagagccttcacagtgtgactggtgaggagcctggagacagtcacgtgggccgtatgatacagcagtgaacaaggattccagacacttgtctcagaagcctgcagctagctcacccttgcttagggtccctgttttctcaaagtgaaggtagtctgcagcccaacccagccctctcttgctctgtggagcctgagacccctcagcaggtcagttgtgactggctaagctcatgatgtttctaccgcatccttcacgactttgaatggaatacggatttcattcaaggaactcgggtcgtcttctagtttcctttcggctcctgggataaaaacaacccaaccaaaagcaacttgggtagaagaatgggtttatacttccaggtcacagtctatcactgaggaaattcaggatatgaagtcaagcaaggaccttgaaatagaaaccatgcagaaatgctgcttgctggctcacacccagattcacacttacctagctttcttatgcaacccaggaccagcatttctggaatggtgctgcccacgttgagctggaacctcttgcatcaattactaatcgggacagtcccccatacactgtacaatccctaactgagactcccttcgcaatcactccaggctgcatctagttaacaattaaagctaatgaggaccgtcagcttagtactaattaccttttaggagtacacttcttaggagtgttcattagtaaagcctccaagaccctttctagaagacttgcatcaagcacacaacctcctgcagaaggagaggacatggaaagggggaagaagaagaagaagaagaagaagaagaagaagaagaagaagaagaagaagaagaagaggaggaggaggaggaggaggaggagggagggggggcagaagaggagaagaagaacaacaagaacaagaaaaacaaggacaaaaagaataagaacaacaacaagggcaaagatggctcccaaaggtggaagttgtatacagaccattcagcaaatgatgtaaagggatttgggaagaagtcacagaaaacttgtacaatgcagaaaaaagaaaatgaattcaagctatatggttagtttttcttttaaaagcatgaaaaaagtactgaatattctcatagcctttggatgggaagcctatctcctaagccagtcacaaatccctgaagaaaggactgacagatatatcagtcacttttcttttgtgataaagccatggccaaaggcaacttaaggaagaaagaacttatttgggctccaaattttagtgtccataatggggcagcaggcaggggagcaggaagctgactcatcatatcctcaactgcaaacacaaagcagagagaacaggactggagcgaggctgcagactggcaaagccgccaagtctgcgccagcaacagaggtgagagctcaactacctgaacccgcgggagacacttctcattcagatacaatgtataaagatgataaccttttgtagcatcaaaatacttcacagacaaagctcaaaagtgtttgggaaaagatatttgcaacatagggaagtgaccaattatttgttttttcaaagtaacaaggaaaagccaaaaaagaaaagatcatacaaatgggggtggccagaaaatccacaggagaagtttaattgggaaatgagcaaaacccagcctccctgtaatgagagcatcgcaagctaacaatgaggtttaatctttgaacacgttgttggctaagatcaaaaacaatgagtgtgtccacaaatacggcaggtataaaagacagaaagggaaactgtcagaatttaaacatgagtcctaaccccacacttccgggaatctgttccaagagactgtaatctactcagcaaaaagtctccactttcggagaggagatttgcattatcacggtctcagcatcaccatcggcctttcctattctgatgaagcagaagggaacctcaaatattccattcctgttctgagagggggctgttagagtcaagataacaataaatactaagtttatattactaggaacttatcacaagctggggggtggctcagaaaagagagggacatccaaggtctgagttcataagaacctgggttggtagtcactcttgaccactggaccacacagccacctgccaggcctcatgacatcattctgtctgccaatcatgatgtcacccagctgcagcaacaccatctagaagacagactccagccacacctggacttctgactccaaatctacactcggacaagccctgcacagttcacgtgcacacccctgtttgagaagccctctctacattatcatatttcctcccgtgtgcttccgtgttcctgtcggtcacagttccctgtctgatgacagttgttgctatatttggctgtcaggaggatttggttttaagccacatgtcctgtcattcaacgagtgctttacacccagcacatgtcaagggctgggttacgacagagaataaaagacagaaagacagagccgtgatcattgccagcccgagtgtagcttaccttctggtaagagaatgcaaaaataaggaaagcccacagagcatcacttgtgccaatgctacggagacaaactgaggaagtagaagatggccgggagacagggagggtggtcagcaacatctctgcgtcttcctatcggggcagggaacaaagcatccccaggaaaatatggaacgagatctttctgcttggtggccttgatgtgtttacaaatgatctgtctgccttatcattccttggcttgatttttctctttaaaagtaccagcccccaaccctcgaggctactcctatgtggcgttcagatccgactcccagaagtctgtgtatgtacgctcatgaaagctcacgctggagttccctatcaccacgaatcactcactgttctgtcagtggctatccacggtgacattgaaaagtcctgggctttaggatttcgctgtcctcggatgctaattgcaacaagaagcctcctttgcagcgggcttctaggaagttgtgcctcttgtgttcatgtaccagcagataccacaaatcacaactgagcagctcggttttgccttaatctctgatactgtacccagcatggactcatgctgcttctcctccctcagctttcctcaggaggaactcaatggcttgtcctgatcctggctgagagggtcttcctagggagaatactaggcttaagcgtcccctgcccccagcagtgaaagatggatttactgcccagagtggcttgggggactacatgatctcgctctctatcttcgggcagaatgtggtcaagatgtcttttcagtacaacagaaccatatttccagcaagttctctctgctaagccatcgcagcatccctcaaatcccactgttatgactagccttggtctctcaagttcatttccctcttgaccttttcttagctaaaatggaaaacagttgcctcgttccctcgcagagaagttgagctattacctaatcaccctcacccccttcttttccaaaaaaaagatgagagctattttctctcttttctatcctggggcattgccttcgttttctccgtgggctccaaaaagtaagagcaaaaattcagaacgaaccggcatgtgctgtgatttctgctcagtctctcccaccaggagccatcattgcgccaacgatgagaatcttctgtgcagttggagaacttcatcaggccatgtttgcctctctgtgcaattccaagacactcttgagggtctctgtaaaaagatcaaacaggagggtccagtgatagacccttgcgattctgacgctagggaggcaaagacaggaagatctctggggtgtgctagccagccagtctagcctaactggatagctccagatttagtaagagactttagtatctcaagaaaatatggtagggagtgactgaggaagatagttagcatcaacctcgagcctacatgcacacacatacatatacactcatatatacatacatacatacacacacatacacacacatacactcacacatacatatacacaatacatacactcacacacacacacagacacaccaagaaggttgtattgggtcaaccacagggtctgaaatcctccatacatatcccaaacatattgtctggccatattgtttactaacccaccctgacttccctctggtttacctttcagctcactgaccctttaaggctgctgagcaagccaccgtgtacttcccttggcccctttccttgctcacagctccttctccttttccgctcaccccccccccgccccacccccaccccatatccagttcccaggccctctcttccatcatgccttcctgggtttcatgtagacgatgcttcagaatgtagatcctagtccagggcctgcactctcagggagtctgcccaggccaccagccccaaatctgtgaaccccactcttggttccatttcactgtggcatttcctttccagatttgtcactcactaaagtcagtatacttaatgtctgtcacctcctcacaggagaaccaaacgtcacaagagcaaaggacatggccctgtgctctgtatatgtccacactcagtgcctgggggaaaatataaactaggagaaataaaatttccactgcccacatcagctacaccgccaccagatataattccttctgccatgggcttggaagatagatccttagctatcaataaactctacaatgtatctacagggtgttccttatgtacaaaaagatctgaaaattttatagtcactgggaatccctacatagagccaattttgaaaaaaatgccactcacacaccagcaaaagttgccttcatttccatctgagaatcaaaaagaaggtgataatttcaaatcagatagaactgcctacactgccaaaagcttcaatgagaaatccacaaactttgggaatggttgttatggaatcatatttcttcatacctcaccctttacataccactgatcttgtcaatagctttaaaccactttttttttcttctttatgtacatgtatagatgtgagccacatagtaaagtttcataaatagggtcagggtaagatctgggtttttgttttttttttttctcaacaagagccaaatactttataaagagggggaaatgtttgcctgaattctgcagttaaagagagattattgaattgtggagtgatagttacatttctgggcatttgatctgagtgatcaaggcaaaattgtgtgtccctgagctgtgtctgtacaccattcatatgctctggaaggtagtgacaagccagccagggctgtatggacatcattcaagccagagtctgacctctgagctatgtggatatcaagagtaaatcaagccagcagtgccatctcctagctgactgagggtacccattcttatcacttggagcctgaatgtattgtgtcgcagctgccgtgactcctcgctgccattgggtgggccagttggaatgcagcttacgcgcaaggtgctttctggcccccaacatgaataggccttaaaagtgagagctaaccggttagcttcccttcagcccttaaaacaaacatgacccccagccttgctggtgtgggcataatgggatgttaaagaagtccatagcacaaatttcgctgaagataaacagagctcatcagccgctgctgagaaacacgtggttctcatttaacctgctgaggccaaactgagtgtgcctcagaaacataaaaaatgggaccagctttctcacatgcaccccaaattccttctgaccataaggcattgacttggcattaccagtccctaagaagtagtttggtcttcctggccactggggtcttaccctttgcctcttcttaaatttcctggatactagacctgaggcacacttcagacttccctgaggtccttgaaacctgagacccagggaatccactagcagcttcattttaagctgctctggtatgcacacaccgccaaaaaacaatctaaaaggatagatagagcatggtgggtagagatgccatccggatggctacagaccttttgatagaaggaggattctcaaataatatgcctgacgggtgcagagtgaattctgcaaatccacatggacctgaactttgttcttcactgtagcaggatccaagagcaaaaactagaatttaaacaaactaatacaattccaaggtctgtgctgtgtcccagtgggtgggggtggggtggcttgacaggttcattcattatccaaatcagtagaccatcgcgcctccagagcgtctcaccatctggggaaggcgagcatctcgggcctgcatgtcaagtgctcagataacgtatttacgcctccatctctcactgcgacaatccagccacatctggaaattcttcgctgtcacttcatctccaaaactacttcccttccatatcactctagctctggtaaaggccatccatgcctgcgaaatgggcctctctggggcccgcctttctctgattacatggaaatgaaattctcttttatggggagcctgatgtggcctgtactcttgactccctggcatattggctgattacccccaaaggggagaaaaaggggcccaggactgagggtgaaagccttgtgtcagccatccctagagctggtggaaacacaggcattcctctatagcataagcgagcaggctcacgggagacgccgcaccctgcttcctggagtgttgatatcaccgcttcatttctccctgtctctgtctttggtctcggtaacctcctgacctttcagacagaacccagctttcctccgtgtgacgagaagcggctgcacaaaaatatattttctttaggagatagttttcaattagaaagaaggcatcaaagccaaagctacaacgtcttcaggattttacatttactctcttggtacagcgaactggtcaaggttcctgtcaccgaaccacatacacaattaagtaaaagaatacagtatgctcagtgtcgctttctttctagaataaaaggacctaggctgtcctggtggctgtgctccgtccccagctctgcagatctcaagggagctgttactgtgaacagatgttttgtgcccttgtttatcctttccatttcaacaacaaaactctgtagttgaggtccttactgatatgaaaaactggtgcattgggaggtggggactaaacatagttatagccttctctgtgcttacctcatggagcttgggatgatgggaatgggtttcccctttggaattctatttgtgtgttggaacctctggctacatgtagaaataaacatgagaacttggggctggagatgtggtaccatcagtgaagtgctaggcacacaagcgtgagcaacacctaccaggcatggcagtgtgcaccaataatcccagaactaggtgggcagagacaagagaatccctggagcatgctggccaattcatcctaactgaaccaatgagtttcactgacatgctgcctctaaagaataaggagggaaaatgactgaggaagacacgcggccttgacctctgctgtgtgggctctcacacacatacatgtgcacacacactgacacacgtgtacatgtacacataaaaagagaggcagacagacagacagacagacagacagacaggtatcacaagccaaactgacaagcagggagtcttccacaatgcgtaagaattcttccctctttaggaggacacgcccacagacacctccaggagctctctgctgtctttaaatggtgggtcattgacacccagaagctgtgttctcggcctttcaaagcgtgggtcacataaagctaggtgcatcacagctgaggactcaccgggactgttatttccatttccggccttgtattaggcagccccacccctgctgggcacgcagaaccaatcaggagtgacccagagcgtctgcttctctgtgggtcggaagcaccacaggcttgaagtggacgctgaacatgcaacccttcctctgctttaggaaaatcacgtcatctgaccatccatcagacagtaccgagagacacctggtagccattcgcagccatgtaacttaatacaagatattaaagtgggaggcgaccaggaatggaaatgtagttcacatttcgctgaatggaacagaatggaattggctcatttatgttaggacaggtacggttaaccaagtggtatcaggtctcaggcattttaatgagtcccgaaatgaacgtccccacaactgctgtggaacacagcgagcaagcgccctacggtggaatggggatcgccctgtcttctgaccgctccactcccagagtaggtggttggtaattgaattagcagagctggcattcacaacattctcttggtatcccatctcaaagggcgtgtgaattcagagaattcagaagggcccagcagctaagtctcaggcccagtcatgtttacccacttgccgtcagctgtgcttaggtaacgtgatacataaaagtggcccagggaaatgacagggagcagaatgtgggctgacagggaaacaggagttaacgggaaacacatggtcttgacacaaatgaacctgtgctgcttcacccatcagctctgggctcgtttcaagtcaacttcccccaagggctgcattgagggagactccaagcagggctcctgagtggtgcagagttagttcaagtttccgcttacctgtctctcggactatgcaccagaggcgtggagtcaggcaaattttgatgaccttctctgtaaatgcccagccagtggggagtgatcaggagagtgggccaaagctgattaaagagccatccaggcctcagatatgctgttaaaatagaagtcaggagcagcgggacacattcaggaggcaggagcaggtgggtctttgtgagttcaaagccagcctggtctacacagtgagttctaagccagccaaagatatgtagaggcaaagaaagaaaagaaagtgctaagaataccacaggcctgagtagagttggttccttagttctgcagcaggttaatccaccgacctcaaacctcacatcctccaacttggttcgctggttccccccatccttctgcagaaacaccctgctcctaagatttgcttacaagacacttgctttgttgtgcaaaatggataacaaagtatggagcggaggttcatgtggcaggtggtataggaagccacaaagtcaaggggtgtggtgctggcacctcgtgcttgtccaaggttgaactcaaggccacagtgtgcaccttcaggcttcgctcttcctttctttctggattccatgccccctcctcaagatctgggggaggcctggtagctcccctgaatcgggaacacttcaaggctgtagtggtcagggtgtgtgaaaccagccgttaggacgccatctgtagagcctgggtgttcggcaggaagcgtggcagggattctcgctccctagccttgcagagccacaggcagaggttgcaaagtttgggtgacagctagagacctggtgtcaccgtgtgcccagaacacctctgatgtctctctgttctgtctgtctgtctgtctcttatatccaatcaactccccaactccaccctcagtccattttaacagtggagtattattcagccctaacaaaaaatgtcaccctgtcatttgtggcaacatgggtgaaaccggagggcattacatcaggtgaagttaaccagacatagaataaaaatacacatgttctcaacaagcagcaactagaaaaggtgacctcacagtcacatgtcagacagtgtccaccggagcccgggatgggtgggggaaaaaggggcttgggggggggatagtttaatacggatgaggtgcagtgaagaagctaacagagaaggtgctgaatatccccgatacagacagacagacagacatccaaggcgatagatgctccaggtacaggatggtatccttatacactgcattgacgttctgaaaactcacagcagggtgggcagtgcctgagaggagcacttactcactacacaaggtgttgcgagcatccaacgttatgtcttaccggatagcacagaagtgttgcaagggtccggtgtcagttccacctgttagaatactgcctcatggaaaatagaattatcttttacatctggactctgcttagagagggcccacaaacaactccactcagatcccaaggagatgggcttgagaagtggagctagaaaaacaagcttagcgtgatggtgccactaaccccaggcattgtctggaggctggagtaggagggctatagcaatccaaggctagcccaacagcacacagcttctccgggtcaataatggacaccgtgatcctgagcctcacacgtgggaacatcctggttcctctgacccctttttctgaccatagcctacaggactatctctttctcacctggggacagaggctgggagtgtccaaaggaaaagtcagttttccttgacagtgacattaccaggacaagagccacagttcaggcttcaaaccccatgactcatgaggtaagggcacttagagtaaatggaacactatcctctgacaccttagctgcatccagccactaccccaggatgactgtcctgccacaagatgtccatgtcatcttggactccacagtgtgagctcctgacagcctcccacaccaccaccctctcttggtttcagcttacacagtgttttctttggggtcaggtttggagagggcagataacaacagaacaccctcaataactatgctggcagaatccagcctcaacaatgtgccccatgccttcctgtccctggttgtggacttagtaagttcttttgtgcagattccaatagccacgggcctccctcaactcccaggggtcctgctgagaaccagccctgtcgtgggaagcatttgggctccagcagtctgggaaagtatgagagtgagtgggcagaggccacagggcccccagacagctgaagatgggactgttgaacagggcagtgtggtgtttggtgtgacatgggaagaggcctttatttcctcatgattttgagcaaagatgattaaagccaagttgaggagtattctagtttgctttattttgcttcaataaacatccatagccaaaagcaacttggggaggaaaggatttatatggcttacagcgtaaagtccatcgtgcaggaagccaaggcaggaacctggaggcaggaactgatgcagaggccatggagaaatcctgttactagcttcctagccagggctcactcagcctgattttttttatagcacccagggctatgagccctcccacatttatcactaataaagataattccccatgggctttcacaagactgatctgatagaggggtggtttttgttttgtcttgtttcaacaactgaagttctctagacaaaattaaccagcctgtggggtagggttttagcaatcgcttatctacagaatggaagatgaggacccctggctgggaacagtgccagctatgaagcctggggacctgagttggttcccaggacccacatggtaggaaagaactgaccctgacctccacacatgtgccatggcacgcatacctccctccattcacacagacacaagatgctctgtagaagctgcacatatggtcctgaagcgtgtgatccgctcctagaagtatccatgtaggccactgtactaattccatggataaggaaactgaggcccgggagactcaaattgtcatggttgtgaagaggtggagctgggctgcaggaggtaccacagagtattcaagagtgtaaccaggcatggtagcacacacctttactcccagcccttgggaggcagaggcaggcaaatctctgagttcgcggccagcctggtctacagagtgagttccaggacagccagggatacacagagaaaccctgtctcaaaaacagcccagaaaagtccatggggttggagagacagctcagtggattaatgtgctcaccttataaacatgaagactttcattcaatcaccaacacccacattaaaaggctaggggtcagggctcacgtttgtaaccctagtgctggagagctggggacaggaagatccttaggggtcaccagccaggctatctagtctatttggtaagttccaggccattgagaccatctcagagaaggaagatggtatctctggagctgacactcgaggttatcctcctgtctctgtgttggcatgtgcccatacacacaaacttggacacacatttttaaaagtataccacatgattcaccacagtcaagttataggtgctcatcagcagaggtataggtggtgtagtggatagacacagtaaggcttgttcaaccatagagaggagtgaactttgtcagacacaggacaagggtggaataggagaccatcatgttcaatgaaataagaggggaggggacagagcacaagagtggtgtctgggatagcgtctgctccctgggttcctcttactgggttaggctgctgataacaaccaaccacataaccttgggtaagtcaccaagcctaaggtctcaggtccttatctgacagccaaggccaaggactgcctgatctgggaactgctttccaaaaacaacattccagggtactctattccccttccaggcccagagacagcacagagtgacctgacctcccagcctgcaggtgctcatacctcccatgggctgtccagcggtcagctttttgttgggggctgagaggagacagtggtaaaatgggccaccatgaagaattctgggtaaaaagagggcggatggttgtcctcctctctgaccccaccacagtctgtccttgacccctggacctagtgctagggggtgtgtatggtgcatggcccacgctcaagagcacctctgtctgcacgcctgccttcttcttcttcttatctccttgtacctccatctttaaaatggctccagataccggcccggtcccacagagctgttgtgaagcaaatgtttaagtgtgaatggccctcagagctgatcctggatgttaccgtgaccatgacccgttcatcctctcagagaagtgcctccctgctgtgaccctggtcagggactgagtggctgaattttagctgcgccagatcagacaccctagagaccctgggagccttcagtctcctgcttaagcaggaccaccctgagcctcccagaaaagtgggttatttcctgtttaaaatgattcccatataaccacagtcaggagcgcagtggccaaggttttcatccaccaccgacttcagcttctgcttcctgccccacattccaccggggccagcctgtcataaggcatcagatgccctgaccatcacttccctgtactcacaccaccccagagacgccctgtggaagaagaaattagttctggctgtgactctgcccaccgaggcctggccgtttctcacacatattgctgttgctcctggcccctgcccctctctgctggcacctacggccaggtatcaccaccatcttctcacactgggggctcttgagcaagaccaactagggtgggttggcaaccaggtttccccccctgcctggaaagccagaacaccagttttcaggacgctgaggaactcttgatctgcctctgacttcagtgagagtcagcatgtctgtcctataagttctgaggctttctcggcaccaactgggtgttggtatgatgaccaagccttgcggaggtagggagtcttcactggaacttctgtgcagaagactgtcttctctgggcctgtcagcattgtcccctcaagggacaagccagggaaggggagtcccacatgcatgagaatgaaaggagacagacgatctgagagcaagagctcacagaaccaaacctcaggtacccaccatgtggttgatactacagttggaacaggaatgaagacccagagcaattctctcaaaaacagctcctaaggggttttacagcatcctggtgtgctccacagaaccttctagaaacttccaacagcgggccatacatgaagcccacttataagcttggacagacctaaggtcccagaagacctgggctccagaccagggcttttgactctgttagcacgtgacttgaatttctttttgcctcctaaacgcctgtctgaaaggagtgatataaatgagctttgaaatcaggaagcagaaggtttaagctgttcctcaaatctcatttgcatgccgtggtcatctcagctcagtttattgaagaacttaatagccacattttctgtcagaacttctgccttaaacacttcccagccagagctgtggtaagcctgtgggcctggctgctaggcaggaggatgtcttgaacccaggagttcaaggccatacctggaaacatagtcaataatttcataaaatgaaatgccctttgaccatttttgtcctctagagaatggaagcagggagcgtctatgctcagctgctgtgtcagatgcttatagatctaagaccgctggttctaacagctctctctctctctctctctctctctctctctctctctctctctctctctccaggtgagccaagagaagggtaactgctctctacaaagaaacccgaccccctgcatcatccctcaagaacaagagaacatcttccacaccatatttgctttcttctccaagtctggaagaaaagtgttggtaagaagtcacttggtgacgggagccatgatggtgggcctcacagggaaggcatgtcggagatgagaggccagtcttctacttggcgcttcttatttctcaaatccagttttcactggttaactcaaaaagccttgaggactataatcaatccctatttttcagcccagggtttccctcacaaatctatattccaaacgccattgcatgactaacagaaatcctaaacaacctgctgtcaggaagcaaacgatttcttctcctagaaggaatctacagtgcaatggggaaacctcctagcggtttctattaaaattaaacatgtatgtattacacaacccagaaaaatgtaccatttctgggtctatccccaagaagtgaatgcacgtattgttgaaagacacaggaatatttgaaacaattttagagtagccaaaaacagaacaattcagatagctatcaacagtacaacgaatagacgagcatatccatacacatgaatattatagaactacaaaaaataaatgtaactaatagtattccatacactatgcagcataagtaagtctcacagaaattacactaaatgaaagacgaataaagaacattctggaatgtgtgtaaggagttcagaagtagtaaagatggcaaaaagatagcatggtcaggttggttctccagtgaaaacatgaaagacatacatgaaacatacataatacctatgtaaaatatatcaatataatacttagaatttgttctttttactgtgtgtgtcctacctcatcagagctttttcagggtcccttttcctgcatcctgattactttcactgagggctttacttccacctaagcacaccccacactcacttgaacacctctcccgccccttggagagctcagctgcctgctattggagacttagatttttttttcacttgcatactgttttgctttgctttgtttgtttgtttgtttgtttgtttgtttgtttgcttgctatgacattataccctggcaaaagcaacttaggagagaaagagttgactttagcccacaattcctagggctcaattcatcactgtgcagaagtcaggagatacccagtcaccttgcatccacagtgaaaaaacagagagggtaaaattaagtcatttctgctgtgctcagctcactttctctattctcacacagttctggaccccctgcctagggaatggcgccacccacagtgagcaggtcttcccacatcaatcagtatagtggagatagcccctcacagaccaccctgatccctcattgagactgtcttcctaggattctagattatgtcaagctaaccagtggcccacatagcaaggatagcctatctttgtaaaggccctaggggacagttagatatagtgacatcggctgtgtcttccatacacgctgaaatgtcaagctgaaaatgtctcctgcgattgaagcttcatacaggtacacacacacacacacacacatatacgcacacatccatactttatatataagatacacttccaaacacaaaagaaaaattcctccttggtcattggaataaacttccccttggcggcgtatgcgtcaccgagtcatatagcttctttgttctttaagcacccacccctgccccacccactaaacaggagcatggtgtctgcctgccaaggcatggacccagaatccgctgtagttggaaagtcttcctgtttaaaaactcacgaaagtacacagggatatctaaatgtttcttttggagaagaattgattctcctggtgaaattcaactttttggtaggattaaccgcataaccaccttatgtctacttgtggactcccccaaacacaggagaccagagccctagtgttcaactaggccagaaaaaccttctaccgccctctgctggtgacagagcaaaattacatcttctttactttggtggggcagggtatgttagttatagtttggttttttttgtttttgtttttaaagctactccatatatcagtacaatttatatattaaataacagtaattgaactgggtgatatagttttaaacagaagaaatcatggaaataattcaggttacacaatccctccccccataccatatttgtttaaaaatcacttttctaaatccattgatgggacaggtgtgttcagtgaccgaacacacctaattcctattttactctgtattttggagctgggatggaatcctgggccccagacaagctgggcaggaagtctgacattagccactccacgggccccatctcttcctcctgattttgcctcagttaacataacagacactctgcactatagatggctttggatggtctctgtctcttaattccatctgggaatttttctcctcaggactgtgaaaagccagggagcttctgcctaacgttgcactgcaaccttagtgctcttccgaaagaggagagccgcaccatcaacctatacatgctactgaacacagagatactgaagaaggtgagtccccgggctgcgctctcagcggttacccagaatcccttggaatccgttcccagaacacacgggctgccccttatcaaactttcccagcatgcaccactggcgattcgtccatcagacgttgccaagaaacagtatcagaccctcagtgttcaccttaatccaaggactggcggtgtcaccgagagtatcctagcatctttaccgagttctagcatcttcagcttcccgggttctcatctgcccctccgcgctgttgctctttccttttccttgggctaagctgtagggcgccctgtggcggctgcgtgccttcaggtccaggcagaggtagacggatctctcagtttgaggacatcctctcgaaaaagcaaatatctccttgggcttataaaacctcagattcagtgggggatgaaacctgagatggtactgacaagcttataaatcctgctgatttggagaccatgttttgttctgattttgatcaaaggtcgcccttttctgtcatgggctagcaagaacagttttaggctttatgggccagaatcatgcgtggtcaggcctttgaccttgtggcttactgtggtcacctgtgacagacaggcttgagaggctcatcagctttcaaaaacaacacacaataaacaagttttaaacaggttgattttgtgttaggctgcccatgttcatagctacatgctacactgtagctatgctaacttaatcgtttgcaacagtttaactctgtcagcagccacagtgtggactatatccaaatgcagggcatgttcttaataaaactttatttacacaagcagacagagggccagatttgacccatgaagccttagtttgcctgatcacttgttcaaatgatccctcaaagcagttgggcccgtgaacctcagaacactttgctactgtgagtttatcaaatatggttccaaatctctcagtcagtcagcaaaccagtggcccttaataaaggtttgctctgatttgttttaagataagagcttgctggttcaagaggctgtgcgccacaggatgctatagaaatagttggatatgaaggtaaaaagaatatgcatgttagcctcagagttcctttttagttttatttgaaaagactaaacatgcaagacgtatacaaagccatcggggctgtccacaggtgagaagcgtcagcgctgtctcgtggtcagctttgaattagccccagcagtgatgcggcagcctgagaagatgcagttgttgaggggaggggtctgcttgttttccccgtctctctgtagctattacagtctccacacaccgtggaaagctggacaccatctggttccctagtttggaaactagtttggaggaagttgggctcccactcagggcttccctgttcttgatataggtcagcgttgttagcagaggccaggtgtgagcttcatctaccatcgcccttccacgagtccctccctgacgtggttcactaggagtcaacatactttctccctggtccatcttagccaatgctgctgacagctcatttcccatgaacttgctcatcactgcccccagagtgatggcactggttgtcctgcctctctgtctgtctgtctctctctctctctatccagtagtgacacttaaccaaggactccatcccagaaacattgttcccactggtcgggcaaaccagtggagccccaggcaaaagagggtgacatctctgggttgtcatacagcagaaacttaggcatagagtgtgccttgagtctgaagcactgtcaggcctggaccttataaggcatagcgcctttgggggttgaccagatggctccagggccattgggtctccctggggacttggatcaacatggaccttgtggctggcctccgcctagggttgtttattttcctttgacctcaaggtctggctccagacaagggaatctgaggttttattgttttaacctccactagttttcatgtagaatgttgggtctatttttttttttaattttcagaggataggatttctttggcagtgtccctaaggcctttttcacagccaccaggggcctactatacaccagcccttcatctccttggcctctaacctaaccgttattgtcactgttaatatctacggtggtaacaccgatgatttataataaaaatacagtatgagaggacagctctacagctcagtgggtaaaggggcttgctgccaagcctgactgacttactccatccccacaacccacatgatggaaggagaaaaaggaccgataaaaattgtctactgatctctcatgtaggctgtagcctgtacatgacccccaataattcccacactaaattaagtaattaattaagtgtaaaatcaatagaaggccagaggatacaggaaactaaaatttataaaactagtaaattgctggaagatttttatgaagcagaaatattcttttgaatgacagtcctcccagaagctttttaaagtatttttctattaaggaagagagtggttaaaaaaaaagaaaagaaaaaagaaaggaagaaaaggaaggaaggaaggaagatgggggagctggagagatgactcagcagttaagagcactgactgttcttccagaggaccagagttcaattcccagcaaccacatggtggctcacaactgcctgtaactccaaatccaggggctctgatgccctcttctggcctctgcgggcacctgcactcctgcacatactccccacacacaaatagcagacacacagaaatatatataattaccattaatatttttaataacaaagttcagtttgaccaatgcatatatagttctcaagttcaagtgggccttacacataggagcccagcactcccatgggtgtctggagatatcccactgcatctcattcctatggacaactgagagatgtttatgtttaaaactcttaagctgttgttaactggggtcttttgttgtttgtttgttttgttctgtttttaagaataatttgtacacaactcctatgtaaagtactacgtcaaggatgtccttgttccaacccagggtgggctctgtggtttcctgggtgatgagcaaggggtccccttataacttaacatctagagcaatgtttctcaacctgtgaaacacaaccccttttggagttaaacaaccctttcacaggagttgcctgaaaccatctgcatatcagatatttacattatgactcgtaacagtagcaaaagtatttaattagtaacagaaataaattccatggttggagtaaccacagcatgtgggactgccttacagggctgcagcgttgggaagggtgaggaccactgatttatatagagaggtctttgttgtttctgtgtgcattgggccactgtaggtcaaagctggccactgactgtgaagtctgtctcagtccattttctgtgtcccagggggcatgggaccaggaacgaacgtataaacgataaaagtgcctttgacttctccagactcaggcctggaggatgagaagttcaaggacagggtgcgaggattcagcctctggtgggagccttgagctacagggtagcacagcaggcctttctacttcttagaaaactgccaccacagcatcgtgcaacaacctcttcctggaacacacacacacacacaccacacacacctctggaaggaaatccacaacaaaccaaagtaatgattgggccaaagtttaacctggtgaaccagtgaatatttgttgtggttcctacagatgtatagatgtttggccacttacagtagccaagatgactccaaacagcattgatgaaaagcccatcccccgacccctaccatactctcccatacacacacccattcccctacccccttataggtgaccatccagactccagccctgagctctgagaaattcccctctgtaactcatctggtcagagtccccctccccccagcagctgctttcctaaagctgggaggggggttgggggggggggggtgccagaatctttctagtttcactttcccagactggtgacctctcctttacctcccgcgtcacataaaccttcgactccctcttggaagaaaagatttcaatcccaggaaatccataagacacatggacactccatccttctcacttgcctaacctgactggctaccagaagcctcccactgaatctcacagcacatgaccttagggaataaatttccagcacctgaattctagggatgtgtgcaaaccacactggcttcctggagtgacagaggaactcaggtgaaaacactaaggatacctggctggcagagcccagccatccctcagggacagcaaggacactccacaatcagcaacagccccatctgacactggcctttcctaatttttccaacccacatctttttccaatttctttttccacctctactttggagccacgttcctgttatctggatggtggctttgaaatagagcccacagcaaggctttcaaccggcttctgccaacagccacttcctgaggctaggaggtccccctctttgaccctcagacctgattaataaactagatgtttgtctctcccaccctaccccgacctgtcattgtgccctcagatgccttctttgactatttggccccaagacagcttcattcaagagcaaagaaagagttaataatagctaagctttcatggttttgagggctgtggtctgggcaagaagatgactagaaaatgggaatcagatgccttctggggatgccaggctgggatttgttgcacacaattaaacagcgttatttatcttccactcttcgtgaatatgcaatatgtcagtatccacctccagcgatctagccctcaccactcggaaaccacagcacaagggtgtgcatgtgttcattactggaaaatgcaatggtatctgccactctgcatcttccaccgtccaaaggaattctcaagagaaggcagcagtgtgtgcgctgtgggtaccagggatgggaaagctgctagttcagtgataagctctgcatggactcttcacagaaccctgagagttccgcttggcatagtccccctcgtgggcacgtcattctcaatgtcgtttgaaagcatctcgtggtgaattgtgtcatttcctccacaggacagctcctctgtcatccagttcatggctcgagccaaggtgaaggtggagcctgccctgagagtggtggagatagctaacgggaacccagaagagactctggtgagtcggctgccctggggcagctctcctcaggggacagggacctgggactgggatctgtgaggaaagactttctaagccaagatgaagggtttgtggtagacccaaagccatggctgccccagcttccagggccccctggaaggcctcgtggctctgttgttgcgttagcttggttcttaggattcctctggtatttgaaacttttcttgcagtgattggccaaaggaaaaactgtctggaagcgtcctcaacaggccttagatttccactctgaggccaaggctatttttatctctcttgagcccttctctcaaaacctctcctgcctgtattgtttcatggctgagcattggggcggggtgggtgtgagtggggcttaagaaaccactgcttggttgtcttaaagaggccatgtcaagctgccaagacctagaaccttctctttcactctctacctcttcccttgtcctccttgaagccgacaggcttcagagtgggcagtctgcctcatggcttagctgtccagtgagagaaagcctggacagaaaggcctttcttgttcctggggaaagaagggtcatccactgtgtgacaccctcctgtgttcagtccctggagtgtagacagggaagtcagccaatgagctgctctgcggagggactgtgctgaaacctgctgccctttcctggtccctcccacggatttttacctcctctctggggaggcttgcttgctctctctctctctctctttctctctctctctcattgattctgtgttgctttaacaaacttaggaagtgaattcaagaagaattatgtacatacacagaaaagggctgttaacttattttctaaccgcaacagagaccctgcctcttcatcatgctagtacgtgagaggctggactatggtgcttactggacaaagatgatgaattcgagttcagttcccagcacccacggaagaaaccatctgtggcagtccatgccggcaaccccaattctggggaattgcggagaggcagatagatcccagggggcttcatgggcagccagtccagccaaaatggttagctctagggtcaatggcatgccaatcccgttcctaatgtcagtaaatatcacgagaacatcagccagtctaggatggcagcattcacgaggggtcagccatcccacaatgggtgcagggatgcggtccggcctgacggctcttcacgtggagaagctacctagaatgaaactcaaggcctccgtactcagtttttctggcaggtcaaatatttggggttggcacttggctcttgtctctctgcattctggcagagagctgctacttggcagctggctcagcctttcacctggaaaggaagagaagggtggccttcgttcactgtcatggcatgggttaaagggcactataggatgaaacatgcccaaccccgaggtttaggatgctgtgataaaccatggtatcaacaccgaagcaccactagaaatgttgaaccgtgtgcagcagatgaagcctcttgcggttgcgggtggtgagagagcgctgggtgtgcggccgcaccctggcgtccagggaggcgctgtggagcactgtgttctggggctccaagtcattggctctcctgttttgagagctgtggtgatattttccccaccaagtggccagaagctgctgttgggtttttgttttgttttgttttgatttgattttcatgctcccaaagggagggaaggagggcacaaggagaatcccccaaagagggaaggctcctcccaccaccactaccaccccaccctccagcccctctcctgtcaaatccccaaagagccctctcggaaagctcctcccacccctggctttttggtccatgaactaagattcagttctgcaatgttttctcaactttcctagtaggggaaaaaatcttctctgagtagaaagacttctagtttaagaacaagcacaccccccaccccaccccaccccctgcatgattcttctgagtgcctggctccaatcgaacttccatctgaaggggaatttccacagaggccgggcagcaaacttaaatcaggtgaaatttcacagcctctcagattcggcaccaaattgtgtccttgaaccggtgaggagatgaatctgtgtctggtgtccagcagggcgtggtgaggaggctagcagttggatttttaaccataaatagcatgcatgctggtgaattaggacagcggacactttccctcctgcctttcacgcgtatgtgtgtgcgcgcacacacacacaccaagcgtggccttgaaggtgttagccaactcatctaccctgaggtccatcctcagcccgcatgtcttttatttttatgtcaggatacaagtaatgccttgcagaacatttgttagtgactagaaacatggagtcgactgttcgaggacttgctccttaaggtatccaccagagatatttactcttggtggctcttctattactgtgataagacattgcacccaaggcaactcataaaacagtttctttgtggcttacggtgccggagggtgggtccctgagcatcagggtagggagcgtagcggcaggtgagcaggcatggccctggagcagcagatcacagttcctcacctgacccacaagcccgaggcagagaatagcatagacttttaaaacctcaacgcgcacccccaacccctgtgacagacctcctccaacagggccacaccttctaatcctttcaagtagttccaacaactggggaccaagtattcaaatatatggggggggggggcattttcattcagaccaccacacttaccagaagaatgcaaggtcaacttcaatggtgcttatggggtttcatgcagtctcagacctgaagaccttagtgaggtctcgaaggccacagggtcaaaggttgtgaggagccaataatgtgttgactttcatattcaacccaatccaacttactactaagagtgagttaggggtaagtgagaaaagaggaaactgcatcctgggaaactgttttctgtcaggggaaggagttcacctcagaggttactctccaccgtttgttcttagtcaaccacagtctaaaatactagtacaaaattccagaaacaacccaaaggcactgttaacacaatactgttataatctaccgtatgagttattattgctagtctcttattgttagacattaaactctattactgctgtatagggttagcattggtggggtttatcactatccacagagatccactgaggtgttagagaatactttatctggaagagctagagtacagaatgaaaatggaaatatactccagagatttccaaccctatttgtgagccaggaaaaggcactaaaagatcccggggaatagagctctccctgccctgtgaattgactacaaaagtcaacaaccgagacaaaaacttatcacgtactctggggtgattaggtttcttttgtcagctcaacacacactcgagtcatctgggaaaggggaacctcaattgggaaaatgcttctcttggaccgacctttgggcaagcctatgttttctggttgatgactgatttgaaagagtctgtcccatcatgggcgttgctacccctgaggaggtgggcctggtactataagaaagcaggctgagcaagtcataggcgcacaccttgcggctccctgcttcagttcctgccctggggaagttccggctgtaaggggtaagatgaaataaatctttcccaacctgagttgctcctggccatgctcttctaccatcaatagaaaccaaactaagacatacccccatagtttttgaagatttattttatttttagttaagtgtgtatgtgtgtattccacatccacatggaaaacagaggcactggatcccccggggctggatttacaggcagttttgagctgtacagcgtagatgctaggatccaaacttgggtcttctgcaggggcagtacttgctcttcatcgctaagctctctctccagccccaatcacctccatagttttagggagtctagccaacaaagaaggctggagactcccccaatgtagactaagagattagagaattgttagttatggggccatcaccccaaactcccttcctctgcatcagaggctggtatgaattctcacttgtcatctcggtgtcagcataaactggcaggacgttggatgagctgtcagggtatgtgcacttgactgcccccttgaggtcagcagcagaaacctacctttttctgctttgccagaagcagagtgggctagacttccacatagctgagagttcaaggaattgcctggagaaccagagagggatgagaggagtcaagaaacgtgatgaaccggggccatgcggaatcctgccacagggagaactcaatgccctggactctggggctagctcccccgagtcctcatcacctctggcactggagtcaagacactggggaccaggtcactagtgctatcagctgctctggcaagcacagtcaagagcccatctttccctatgactcacacagcggatggttccacagcatggggaggagatctcacactgggccactgatagtgacagctgtccccttctgtgtgcttctggagtcatgaagggcagtggcaagttagccaagcttgcatctgagcacatagttcaaatgcttagatcaccttggtgggagcttcccgcacaggcaagcatcctaatgagagagcacgggagccttgtcctaagatggcaggtgagctgtgtgtgctttggtctctttcaagaatccatgtgagctagcgtggtgattcatacctgtagttccagcactttggaggcagatggaggccggtcttggccacatagcaagaacctgtctaaaaacgaaacaaaagaatgtgctgcagtgagccatgcttcctggctggtgtgataggaaatatatttggagcctttgccttctaccatggagccatgtgggaatgactactcctccacgtggggatatagatcactgattcacagaagaccctagaaaatccacggctcccttctctgtgtgagaaccactaagccctttctctcgggaaagaaggagtctgtgatacctcaagttacattgtagcatacggtttcattgccacccctcctcctcccgcaccatcagatggcttgtagctcttgctctttacccaccaccctgtgggagaaccgagctctgcccatcagaaactgaaaaaacaaaacaaaacaaaactccaagtgcgttgccaaacacacaaactctattttccatttagtcccttggtgaatacacctgaaggcttactaagagctaggtgctgtggtgggcactggggacagagtgagggaggaggtggccatagccatatcatccaccctggggccgactacaggaaaacaataataataacgtcagccaacaaagaaactgacaaggacgttgtttccagttgagccagcctcggcagaaccacctttttcggattgggggttaaggcctggaagctggagaggaagacagggagaacgctgtgtggagacctggtggcttggcctggcatgtctaagtcagcaaaagcagaggacaagattgagccaaagaagcagggagccccatccccgctctgcaacagtggcttccagtctccatcataattaccagcattactgtgttaaaggacagaactcatatccgcatagaaatgtgctttggttgaatcgggagcgggatatctgggactccccagagttcctggtccccaaggaaacctcacagctatggaggataatattttaaatgagtaagatgtccagtgtaccacactctttcactgaccactaattataccccttaaggtccccagagccccatctggatagatgcagatgtacacacggatgcacacacgtgtacacacgtgtactattgtagacaaatttgtctttctaagcagccaacaagaaactgtcagggtgatacacagctgaccctctctcttagaagcaacctgggtctgcggtggcctcgggtgcacaccacattcagatttagtggtcagttaattgcagaactcttccccttgtggtctggtctctccccagagccacaagtacgcagccaggagagttaagatagaaggatggagctaagcggtatactccttacctagtgtgtctagtaccctcacttcaatccccagccagaggccttctgagggtctctgtatagtggcaggcccttgtcccttaacaacgtcttatcccttccgagatatctgggaggctgctccataggttataagttaagatcgtcagtgaggatgaaggtaatttctacctgaccaaaaatatcaccccaaagtgatcactccatcatcctatggaggactggccggttctgagtctgatttactcaacacatttcatcactcatgcgcacgttaagcccactcatcacacatgtgcatgttaagcccactttaacctcctgctgattccataaatggttggtgtcttcaacctatactcacctgatatttgctcgagtcgtgttttaatttgttaaaatattgtgcatccaggtagaggcggctcggtggctaagagcactggcttctctttgaagggaactgggtttgattcccaggacccacatgaaagctcacggccacctataattccagttccaggggatccagtgccctctctgatctgcaaaggcacccagaaaacaaacggtatcagatatacatgcaggtaaaatacctatatgctaaaaataaatgaataaaaatttaaagctgtgcatcaggccagatgtggtagtttacacttataatcgcagcacttaaaagacagacacaggtggattgctgcgagccacacagtaaatccagaccagccttggctatggagtaagaccctatatcaaaaaataaatatatacttgtctacatacaagttcatagatacataaatacacatgcagacagatataatttatagaacaatttttctttgttgttgtttgggggttttgtttgtttgtttgtttttgttttaagtcagggtttctctatgtagccctagctgtcctggaacttgctctgtagatcaggctggcctggatctcaagagctcagcctgcctctgcctcccaagtgctgggattaaaggcgtggaaaaccacttccagctggtttttcattttcagtagcttgtgatgttctgttttgtggttaaccattatgtagttaatgttatgatctaagtgacagatgccataaagtcacaccatgtgacagatctcacattggaggtttaattggggacgggatatcctgcctctgggtgagggtggagggaaaaagaggagggagtggctttttataaggggatgtggccacatgagcaggggaggatgtgcaactcgtggtgacagtgggattgtgttgcatcttggcagctggcgatgatgtctgctgttgctgggtccctgggggcaggccgtggagacgcctggttactaaaagtttacctgttgtcctttcgttagatgcttacaatagttctgattctgtgtttgtgtgaataattctgcagtaagtaccttccacttcttttaaaaatctttaattgcattttatttcttttgtggccctatgtgcctctgtgtgtgtgtgcgtgtgcatgtgtgtgtgttgggcacccacatcgctcgtgtctggatggaagaagacaacttttagaactctgtttcttccttctaccatgtggacctcaggaactgaactaaggacgttgggtctggcagcaagcacctttacccactgggctgtctcgccagcccaacatctctgcgcataaaactttttttatagtttgcattttctgcctttgatcgtgttttcaagtacggaattgacaggtcaaacggcgtgagtgtatttaagaaagcagtcatggagtctgagacacgatcaggatggaagggcgttccagataacaaaaacaaagacagggacctcaggggagatgagagtaggtagctaggatgtgaatacatgacctgggaggggccacaaaggaaagacagcagactgctgaggctcagtgtcctgaattagatgttcccaatcgacagagtgagatactgatgacctgccaggacctacgttcttggagaacaaaatgaatgactgggggtgctgtgaggggctgacacagtgccacatgcgtgtgaaggctgggcctgaactggggcagtgacaggtgaggaagatgcttagagaggcatgagggcttgtctgggcccctggccccagtggtcagtaacttgtcactgcattacgtgtcttgtttgttccccatcagtatgtatgtcaccacattatgtgctccgtgtgctccccttcctgttttcgttcatgcaaatttttttatcatttgtttttaatctgtgctatggctttctcagcacactgcatggcgctcagatcattcacagatgaatttattgcagtcaggatataagagacagatctgccaaggcctagagcttacatccaagaggaccaaggacatctctgagaaaaaaatcagagacacaaagtagcattccagggacatgacagggcattcttacgaaattcgaaatttgccagactaaactgtagtggctactctcatctctgtgtccacaaaaccagacctccaacgtggcttttgccaagaggacacattccgtgtcctgggccttacagctaaccccacactgagttcagagctggctcagaactcttgtctgccagcaagtttggctgacttttgcctgaacctctagggagggcttgaagtgctcctgattcgcaggtctgaaaaaccaggctcagagaaaccggctggtgctgctgatggcaccaccccatcccccaaggcgcctgctgggtttcctaggctggtttctctaacttgtccctctgttggaagatctttttctgctccactgaagttcccttaagacaagttctggattcagggttctgcatgtgaaaccataaagcctgtctgtctgatgggttatatctatatatgactatttataccaccccacctcaacacacatcactcagctcccgtccctcgctccggaagtagagacaaggaactaaaaatggtcagattgtcttttgctttgtaagaaggaggctcagtgacacttggaatctgtaaaacccctctcccttccaacccatgggaccagaagtcagtcaaggagtgcagtcagtatgagctagagtggcaaaggcccaccctcctgcaagaggaaccctggcctgctcaccagtgctatgatgtgatatccccattgccatccatttcaaactgtcatcatgatgcctctagagttgggaagagatgcacagttaactcttgagagctgacctaggacaactccatgacaccaacaaatgaccttcaaagttgaggaatatgcctcagggggcaggagagatggctgggcagttgagagcacttgctgttcttagagagaacccacgcacccacaggaggcagctcacaaccttttgtaactccagcttcagggaatctgacatcttcatctagcctctgagggcacctacatgcatgtgacatatacacacacagatacacacatacatataaataaaaataaacaagtgtgcctcaatgagataagacttctgtcttagttattctgtgaagagacagcatgaccacagcaactcttaataaagaaaacatttcattggggctggcttacggttcagaggtttagtccatatcatcatggtcagaagcatggaggcctgcaggcagacacagagctggagacggagctgagagtcccacgtcttgagccgcaggcagcaggacgtgaactgctacatggggtatggcttgggcatctcagacgacaaagtctgcccacaatggtcacttcctcccacaagaccacacccacacccacaaggccacacccaccctcagaaggtcacacccactcccacaaggccacacccactcccacaaggtcatactttctaatagtgctaatccctgtgggcctctggggaccgtttcctttcaaaccctcatagcctccaattgcacatggctcagattagaaatgacaacatgttgtgagtgaattccttttaatagttctggcacagctgtgagccccgagacagcggcttaatccaagtaactccacactaagggacaaatatgtcactgcttgagaaccccagcgttctttctttcagagccgaatgcaagatagaagattatcctctaattcccagctttctctgccatgcttttgttcagtttgtgatatttgaagtcggggtcgtcatcattacagccctttcgggatacgaatctcggtttgacgctctcccctctgtggtacctcctaggtggtcttcgaggccttgcacaatctggaaccccgtggctacgttgtggggtggatcatcgccatcagtttgctggtggggatcctcatttttctgctgctggctgtgctcctgtggaaggtaagtctggggaccacaagtgccaactgatttcccactcgggacaccagctctcaggcctctccagggctggggaaccttgggagatgtttccctgcacagtgcaggggcaaaagaggtcagcgcccccttcaggtagaagatggaaccttgcctcctcttggaccacctttgagagagagaagggtcctcaattgccccctcgtctatcctcagagattaaacccatcctgacagtcactgccaccattgcttctcaggagatcaattgggtccccatgagatgattgctcgtacagggggagcgatctcacaatgggtggtacagtgcttttcctggagtccgaggtgactacagttaaagacagggctatctgtgacttcagcctgaggcgggaatgatggagtttaggttctgtggatttttaggtaggcattcattaagaggcaaccggagcctgacccagaggtaaggaggcacacacaatggggcggaggcggctggctttcaccccgttttgcgttatcttatgggcacaagtggatacctagtgctcttttgcaaagcaggttttaaatgctgttactggaacaacctctgagagtttcacaggtagatgacttaaatccaaatacttaatttctttgggattacaaaacagtatacatgcataatcaaatgcggtaacgctaataaagaaaatgtgtcatccggggttacatcttgggaaaagctgtggtgaacacggccttgtctccatcttgacctgttcctctgcatagatgtgcgggaggctttctcatgggccagctcactcacggacaatttgctagttaaattatccgcacatatacccagtgtatgttcagataaagcacttctagagcgggagtcatgggttcagttcctgtctgtgtatgttcacacagtcagcacatgtgttgtgtggatcagagggacaatgttcagccggtcctctcctgccatgaaggctacagaatgctgactgtcaggcttggtggcctgactgaatcaactcacctgcctcctctccttgttgtttttgctgctcttttgtttttgtttttaagatttataaatttatttatttatgacacaccagaagaaggcaccagacctgtgagctaatgggtgctgggaattgaactcaggacctctttggtgctcttaactgctgagccatctcgccagcccctctttagtttttgtttctgtttttgttttttaaagatttatttatttattatatgtaagtacactgtagctgtcttcagacacaccagaagagggcgtcagatctcattacggatggttgtgagccaccatgtggttgctgggatttgaactcaggacctgtggaagagcagtcagtgctcttacccactgagccatctcgccatccctgtttttgttttttttttttaatttatttttatttcatgtgcattggtgttttgttgtcatgtatatatgtgtgagggttttggatctcctggaactggagttacagacagttgtgagctgctatgtcagtgctgggaattgaacccaggccctctggaatagcattcagtgctcttaaccactgagccatcagcccttcacccttgtttttgagagacggtttctctttagcctggcatgggcagatgaggctaacatggctggccagggagcagtaggagcctgcttgtctctgcctacccagttgtaagccagggccggtgtgcttggtatcttttcacatgggttctgcagatcagaactcgggagccactcctctgcccctgcaggttcaactctccaatctcacatgtgtaaacagtctagagctcccagagaactgtgtgtttaacatccctgtcgcagcttgatggtcagctccactgctctagacccagtgctaccttacttgaaagagtgtctggagagtgaaggaaacacatggcgcatactatgtggaaatacgtctgtcttccacccccgcgcatgtcagatatccctgtgctacctggcagcctgttgttccctggcagctatactacaaacctctccccatgttgttaggagtccatttccagccacattctactgacagtgcctactctgtagtctgcagtccccctagccctagaatcaatattgtccctggctgagcacagcccataacaatgccagtgtgattgaacaaatcctccaccgtgtccttagagcgaaaccctagaaacggagtcatgaggagcatgtagttcacactgtaagctgccctcctgaaatgccaccccaagtcacagcaggtttagcaaagtgtgaattttcctgtctatttgccagccgcagatatttcctcttttttgaatcttccagtttgccatctggttaccctacatggccagataaactcttaactctcactgtcttcagctccttcctgctgagagggcctgtgggtggaaaacaaggctcagtgttagaagaggttgtcctctgatctccacatgtactctgtggtgtgcgcatgcgcacacatgagaacccaaacattaactacaagttttaaacatctccgtatagtcttcatgtgagagggttgtccaccatcaggcatggctctaaagcagtctggctcttacacaaaaagatactgagaagccatgaaaaggaaaaaaaaagaaaaaaggtcttggttgaagactaagtaacgagtctcaaggaagttagaaaaagcagtcgagatgatggattgtttttaaagacctgcattccctagaatattgggctgcaggcattttgtcacctctgattcctctatctatcacctacaaataatgcattatgggtatcaggtagcagtttaatatctcactgacggcacagcacagagaagccagctgaaatctggcttaagtccagtccgacatctggcttgtctgacctcaccagtttgggcttattaccatagtccatatgtaatcacctccactcctctccagggaagccactggctggcacctgccaccagctgggtgcagctggccaggaaacccataatgaatagatggccagaggtcaggtcctcttcctgtatggaaacctgtatttccttctactattgtttaatcttgtaaaatatttattttgtggggagttgggggagggcttgttggtctgagaacaacttgcaggaatgggtcctctcctgagactgaactcaggccagtcagacttagtggccagctcctctccccactgaaacatccaggagacctctgagttcccactcagagagcctctggcagctgtcgcctgtgcttggtcatctgtgtctcatacacatgagtggaaagccggctcggccggaacattcacagtagcacacaggcctgtgggtcttacatgcttctcactcacaggtagccgatgtcttccttcaacaggtagcattgggtccctgctaggtggcgtgctccaagtaactgggcagaggcaaacaacagacctcatactctcttgaaaccctgtgagaaaggtacttcagtggcagagaggagcaaatgtgattaggcctggttcactggcccctgccccttgtgacatgtgtcctgtagggttcctatctttgtgaaatagaagcccgactgggtcccacaaatgccttctccatgatgctaagccccagtcctcacccttgggctcagcctacccagcctccccctctacctctgccattactgctccccagaaccttcctgaaggacctgctcacagcccagtctctctcacgcttggctgcaaaaggacctggctctgacacaaaatccacagcaaggccccaagctcagcagagccctgaaatggagcctagtcaacctcctcagagctgcgccatcctcggacgctgggaaccgtaatttaaacttgatgtgcgaggattacagtagcctgccaaaccactgtgcaggaggaagactttgaaacatgaaactctttcaagggagaaaattcaaaagcattcactctcccttgcgccagctcatggccgggatggaagacaccccagcccggtgcctcttcctagaggcctgtttatgggaaggttcaatcgttcagagacacgatcgttcagagagcatggggtagcatgcctgaggaacaccctcagctcaatatgccagcctgagcctagagggagagagagactcggacatttgccctttaggagaaaagtgcttctctgcctgcnnnnnnnnnnnnnnnnnnnnnnnnnnnnnnnnnnnnnnnnnnnnnnnnnnnnnnnnnnnnnnnnnnnnnnnnnnnnnnnnnnnnnnnnnnnnnnnnnnnnnnnnnnnnnnnnnnnnnnnnnnnnnnnnnnnnnnnnnnnnnnnnnnnnnnnnnnnnnnnnnnnnnnnnnnnnnnnnnnnnnnnnnnnnnnnnnnnnnnnnnnnnnnnnnnnnnnnnnnnnnnnnnnnnnnnnnnnnnnnnnnnnnnnnnnnnnnnnnnnnnnnnnnnnnnnnnnnnnnnnntgagatcatctcttcctgtttgcagtttgccaggcacacgggccaccccctcagtgaaggacctcatcccctgccctcgaccacgaaccctccatctcttttcttttctgactgacactttttcaaggcaggatgatttaaaacagtgtaccattctttcaccaggaggacttgtcccgactggtcaagtgacaaagaggcagggtgtagaaagggtttgtctaccctccccaccccctgaagagagctactcagaggcctccatcagtcggaacccttcctagagcctggtattctcaagcttcctgagagagcatggtttttattggagagcatcacttgtaactctctcacatacaaaatgattggcaatggacatctgcggagtggcatagaaaatgtgtaaggtttggcaaccactccagaggccactggggtcaccatcttgcctccaaaccagacttcttaaaagagtgtatagacatgtgcacacacagatacacactcccacccacccacccccacacacacccattaaaaatcatgtgcctgaaatgtgcggagggagtggtttatatttggagataaatattggtctgatgctgtgtcctcagcatctcgagatggagacatgctatataaacagtcaagtaaccgagggcccataaacacaaggtccagagctagtccaaaggaagagtgtacccaaagtccttggagtagctgcccaaaaaacaccccaaaggccagcgcacagatgggcaccccaaagagactagatgccctgaagtagtctgtcaggcgcatcaccccaaagtggaccagaccacagtacctcaggcctgggttcgctctcatctctctctctggcgttattgactcacccgcacccacctaaccaagctgctcagggagaatccgctactttgtgggttctctggcaggcttggagactcatcctgttagtctgtgtggagctgctcttggcgggtgtggactctgtcaggaccagaagatattctgcctctcccggcctccagctgaacaaaccttaaaactaggcatgcctctccttcaaacaggataattataaacgaaacatctgaccccctccttggaagattccagaaaggacacaggaaaaataagtgactacattggtttgaaagtatggggtcgctatgggtacagggtatgcttttgttaatcatttcccagaaggctcagggtggaccgcccaagacttttaagaattttctcccaaatactcgaatagtactaacaagagcgggtatgtatgcccaagggaggcctgcaagggagaaaagttcatcagatctcaagttattgagcatctcagaatgtgctctgctctccagtgtatccatgctgtaacaggagattgaaagtgtctactgggtccttgaagtttgctagattaacactgaagctttcttaacccgcaaatgttaccatacgagcccatggctgagctctttagtctgatcactgtagacacttctcattggatacatgtatcaaaacatcatgtttaatactttagacatcctcttagatctgctccccaggccttatgcgaaaggaaaactctttgttacttattgctggagatcgactctaggacctgacccgtgccaaaagcagcagcccagcccaggaaacaatttttaaaactaaaacgtatcatgctactggtttgtcagctgttaataacagggtcagtttttacttagtatatcttcccttcaacatttgggttctcagccaggcaggtggatctctgtgagtctgcggccagcctggtctacatagtaaatactaggccagccagagttatatagtgatacactctcttaagatatatgtatgtgtttatgtatgtatatgcatatatatgtattatatacacacatacatgtacacatacacacatacatttgcacacacatgttgtatacacacgcatacactctcacacacacttgtgattctcaagagtttacctgaagactctgattatgacccttatgatctgtcatggtagactatctgtctaccagcctgttcaaataattttatggtgtaaagatgactaaaggaaaaaaggagagtgggattctgctcacatagatggatgaagtcctgatgcctccctcagatatttatctctggagtctgctaaatgcccaggcatctgaggctgagatcctggcagtaagagcaggtaggagtggccaagcagcattcatgacacataataggttgaagggtgggctggtgagatggctcagcgagtaagagtactagctactcttccgaaagtcctgagttcaattcccagcaaccacatggtggctcacaaccattcatactgagatctgacgccctcttctggtgtgtctgaagtcagctacagtgtacttatttataataacaaataaatctttggaccggagtaagcagaggtcctaaattcaattcccagtaaccacatgaaggctcacaaccacctgtacagctacagtaaacacgtatacataaaataaataaatctttttaaaaaataggttgaagggtcttgctgccctccctgggaatatgtgaagagtgataattaaggcacgtgtctcaagcacaggacctagcactatttggcacaaggtaccatacagtgtggtggccatacaaactaatattcatgtattcactcattcattcatccatccattcattctttgtgtgtgtgtgtgtgtgtgtgtgtgtgtgtgtgtgtgttgctaggaacagaagccaaggccctgtgcacagtaggctggtactacatcactaaattgttcccaaatcttcccttttgttctcgataccttttacttcatctgcctgaaaatctgggtttgttagaataagaccctctactgccatctgttgggaagtggtccttgtaaacttctctatggcatctggtaacccccattccacttgtgcatggctcacccacactgccacactcagcctcccctgcacataatcacccataggttgaccatcgggatcttagagcctggggctctggagatgagagtggagtttgcaagggtgtctgtgtgggcagctgggatgattccttgagaggaaagaacttgctctggtgtctgcaggaggagacagcacattggctttgttggtgacaaggatgctatccataatgacatggacatgtgagtgtcaccattgcatcagctgttctaagtcctttcagcacggtgtctgcatttggcctatgaaatgcatatggtgcacattgcatccatgtgggcaagacactttatgcacataaaaataagtatttttttaaaaagatgggcctctctacaccaatcagttgaatcaagatcaccctccttccccataaattatgcccagaggcccatctcccaggtgactctgcattctgtcaggttgaaaattggtgctgaccacgacaggctacaaaaagttgcataaacactggacattgtaatgactctgtaaaataacccactcatcctaccatgtatgaaaagcttttggccaaactcagcttctgggctggaatagagaagtcttctgagtactgagctggagaaaactgccagcctgggtcaggatgcagagccaaccctagaggaacccaggctgctagctccagcatagatataccatgaatgcacaaatatgaaagttctagatgacaaggaggattaggatcctgtggatacttgaaaggtttgttctgtgagagcaatatttgtcagatggggtccacagatggctgctgtctctcaggacattagtaacttcatataaggattcaggacatagctcagttggtaaagtgcttgctacacaagtataaggacctgtgcccatcccaacacctatataaagccaggcctaaacttgctagcctagtgttggggaggtagacacagtcagatccctggagcttcctggccagcctgacctacttgacatggtccaggccactgagagattcatttcaaatatccaagtgttcccaaggaacagcccctgattctgacctccacacataaatacacacacacacacacatgcacacaagcatgcacatatacacaaacacaaacatataaacacatatatataagcacacagatatacacacatatatacataaacatatgcacatccatatacatatgtgcttatatacatgaatacatatacaaataaacacacatatatacatatacacataaacaaatacacacataagcatacacacatgtacacataaacatgcaaacatataaacacatatgcacatatataaacacacataaatatatatacatatatacacataaatatatgtatatacatatatatatatatatatatatatatatatatacatacacacatatacatacacatacacacacacatatgcaggagaaaaaacagcaattcggcttaaaaaatggtggcttctcccatggctggtcaggtcctttgctgtactacagtctatcacagatttctagaagaacgcagcttctccagaattcactgactgtgacatgtttatctttttcactgctccaaatacctttgaataacctgcagtaagtgatgttttccagcacccagtgctgtggtaacactgttcctgcgtactgaatggcttgctgggagatagactttaggaagtcagtgtggtgacctgagacatccttctagcatccccagccctgggaagggctaggtcctgcctccccatagctcagtctgccttggcacacagatccagtcctaacgcagagcgtcttctgtctttcagatgggcttcttccgcagaaggtacaaagagatcattgaagctgagaaaaaccggaaagagaatgaagatggttgggactgggtccagaaaaaccagtgacccaccgtgccagtcatgtgatgccctcatgtccccatcaccagcctgtggtccttgatctttgtatctttcatatttggaagaaagaaatcttctccagatttttcggaggccccactgatgctgttctcttcctcatcccgtcaagcccggtgccgacctgagatggccacccctccagccaggtcacatgactggggccaccaccactccccttctcaagatgaacttagaactttggaaaggcaagctacagagcaaagcaatatttatggatgcaacattgcgtggtcaaccctcaggggaaaactgttacctaaaagtattttttataaatgtaagccttttatattgatcatgtctttatatttgtatcaatgttttattatttctattaaatagttctataattcactcaagcactgaaatcttggaaatacatgtccctgcatacaaattttaaaagagaaggaacttattctactttggaacttgttgttagggaagaaaaaaaaaacttgcagataaaacaaactgaagaaacctcatgaaatgaatccaccaagctggaggcactgggaaagcacaaaggacatggcaaggccgcctaagacatttattccccattgttaccacccggagttaagttcagagagcttgaagtatcggtgttttctcttatggacctctcactgggagattctcagcaggaactgggatggaaagcttggtttcctctcagcagttgctctgtaccacactgatacatgcagcaggcactaaaccctcttctggagtcagcaagtgctggatggacaactggtcaacctcagaataacatctcatcctaaacaacatgtgtcagagttcagagcccaggaccgaagctgtgctctctcagcaaaggcctgttttctctgtgtgtaagctgttaccttgtggtataatgttaacacaagactctccatttcctctgtcactcttgctgtccccaactggtggtgctgcagatacctccccagagaggatcaccccacatggtttgtgtttatgtcttaggtggaattctcaagagtcgaaccctgaaataggacttgggtgtaaataatttattgaggaagtcttcccagaaggtaacagtgaggaagttgagaatacaagacaggagagtacagggagccaggcaacagtgtcctttcaggggacaacccacgaggtggcttcaaaccagttggatctaatgagcaagtcagactcaggaacctggacttttgtgatgccacgcctgcaggggatataaactttctgcccttaggtcttgctgacaagatgactctgtcctctagaggagaactttggggggcaccctcaagtaaggagatccacaaatcatgcaaagaactctgagccaagagctttagtgctcccctcccccacacaagtgaatgctaccttcagctttgtgtagccaaaaaagccatgagtctaagctggtcctaggagtcaaacattacatctgacccatgaccaagtcaaactcactacaaggaaggggcagcccccccaaaaaaaaaaacagtgcacacccagctcttttaagttttatcaaaagaaagaagaaagaagtcttggctttaccagccatgtacatcctgatctgtagtcaggcactatcctggtggatcccctgagaacacagtcccctcgtgcctcagggtggtaagcctcccacaataggtgcagagtgtggattcttcatgaaccccatttgcagctgtcctgtgatgatcgtgaattgtgtcatggtttcctttaataaatcatttgagagtctcaggtggtgagaccactacagaaccatctgcagttatactcaaaatgcatttgtccccactggcttacttcctgcagagggtatgactgcatcaatggagaaggatgcataactcagctagccagcagagctgcacctgagaaagtgtggaaggcaggaagggcagactcagctagaatctggccactcagctggatctcaaatggtgaaccgccatgactagtcacatgctcagatgtcgatacaacttcaggaggcagattttaaggaaactatatggttgctcaggaagcaaatcctaaaaggcaccataggggagaggaggcctctttgcctatctgataatgttgagagctaggggtgtggctgcctggcacagaggcagggaaaggggtggagcattgtcttggaattctctcagctgagttgttcaatgtctccatcccagtctccctccagggatcaggaaaagtgggcaggtggattgatgtgcctgtgttagctctttctagaacattctttttaaaagcccactgtgtcgcctgttgtagccttcctctgcctctgagttcattctgcagacgttctccagggcgctatcaatagcctgcttgtttttcagttgtgtcttctgtgggtttaaccagctcaagaaagactagagcatccccaaagtgaaccctgccacagaaaggctatgacgtagacaaacaagaacaccagcaagaggggctggtcgattgactagcgcacaccctgtgtcctgccactgtggtctcaggcaatgatttgggaaagcacctcggggcccagcggtttgacaggctgcatgaagttgtctgtccgagtcccccatccatctatccttgtgctctaccactcaaccccctacccaacccacccccacgcaccaaatatcacatgacctactaaagccaaaggcaagggaaagtctcaataaacagcatgctgttgggacaccccggggaccagtgacccttgtggtgtggtcaagccccagtgtggagggtgtggaaatgttattcacatttatttaaggatgacacatacgtgatcatatatacctgattaccctggaaacataaacctagagaaggggtgcccagtgtcaacttcctgagatttagcggcactgcaaagcactggcgtttgatgagtggcgtaggatgcagctcagtcacagtgcttgcccgacacaggggaggcatcatttgggggacctgtcccattgataaacaaaaggcagaaactgaatattctcagaatgacttccccgagaacacagaattttagtcgatgtgggtttgggtagaggggtatgtgttctatgataatgactgaagggaggcggcagagcccctggggccaagggagccttctagaacaacttctgggttttcagcatgagggaagtgatgagaaaatctcccccccccccgggtgtggcgtggtgctctctatagccgatctgcttttcagtctattaaagtgtttggtttgctgtgtttgatcctgatgtacacagtgtgattggtggtgtgagtttaagctttctgggtggtttgttgcatggcaggcacctctgctctctgcatgtctgcagctttactgaggtgcacacacacacacacacacacacacacacacacacacacactgcccgagaggatttggagtgggagggctgcccttcctcactgtgtcttgtgaattcatgtctatttctgcagtcacttctgaatcacttgcactgtttgggaaatgccaggtttacaaaaaataagtttagaataaaacaaaatctggcttcaaatgatcccagcgtgtctgactgtgatttctttgctgctaagaactctgtaagggcctgaagagggaattccaatataatgcaatatgagcgctaaagagcacaccaagggctgccgactcccatgggggcaccccacgtgatggggctgaacctgcccttaagacataatttggacactaccatctatgtgtattgcctgcccgcctggggctggacctggtgtctatctgtttacagcccaatgaaatgggcgtgttccttatcacaagcagacctcttccacatgtatgtaatgtaagtcactaagcatttgcccaggcaaatttgttgtatagccaaggatagcccaaattttaatatttctgcctctacctctagagtactaggattaaaggtgtgcagcagcacatccggttttttgaaggcgggaatctcattctaagcaggattcctccggctgcactgacgtgctcagcccctctgtaagctctctgccggccctctcccacatctacagacacttcattttcttagattttaaatctctatttgctaattacagcctcattcttatcacacatacttttaatatatgaattttttttcttttttccctagatattactaacaaaggtctacctaatatgttgcttgtcttcaaaaataagcctctggctctcttatgtctgggtttggctttctcgttcatcagtcacaacttccaggtgtacgaatatgttctctatagccgtcgctgttaacttcacccaagggctggcgggccagtttggcagttaagcactctctctctctctctctctctctctctctctctctctctctctctctctgtctctctctctctctctctctctcacacacacacacacacacacacatgctggctgctctttttttcctctaacgactctcattcatgggcccatgcatctcattagttatttatttaccgtgggccagtggctggtgacttcctttagaaagttctttgtggtaattctttgaagcctaggatgacatctgttcctgcagagagcctttgccttcacctctgccaggctcccatctgggatcaggccttggagttttaatggaccacccatggattgggcacagaaaatccactccaaggacagccgtgcccttcctttctctacagggtgggattcacacatgcccccgcacacggccctgtgctctgcaacacacctcacaccattccacaaagagccttggtcctggagagtactggccaggggcagaatgcctacttctgattggctcttccatctgttcattcattcattcattcattcatgattccggatttggctatgtagcctggactgggctggcactggaatccctctgcctcgacctgtaataaaatcagttgtgtgcctccatgcctgtcactttataggccatggatccctacaaggccatgaaagctgaacttctgttttgtatgtgtgtgtgggtatgtgcaacatttttactgtgaaacaacaacagcaaaggaaaactaagcatgcaggaaagtagaaagaattttaagtaaacaccaagccctgggcatctagatttacacccgcattttattacatgtagtttgtcatttctccaccaatcgtctttccgcacactcacgtttcatgctatccaatggaacttatagctgcaacccattctactctggatgtcagtagattttctgtttgaccggtaaccatatttttcacctatgatgtctatttgactcttttggaaatctgcttgggtggtttctagtctttttttttttaaattttcatctatataagcacactcatcattcatttctttaaacatacaaagctttcgtgatgcacacgccactcctgagagctgaggtctctgttgccgtttgctctgctgtttttgaactcgggtctattccctcatattttttttaaccttaaaccatttctcgtcttccttagaaggtatctgttggaacttgaagtggtttccccatagaacgtttccatttgcttctgcaggaagtccaagagactcaataactggtactgttttaaattaaatcctcgaggttcccggcccacccagctggtgagcagtcatcttcagagcagtctcttctcctgtccaatgccagagttctggttctgcacttgcctggtgtcctttggagggcagcaagagatgacttgtgactccaccgtgccacccttgctttcctgtctcagacgtatagaaaggagaccctccagattcctccccttgcctgatccagggctatccccactgcctgtgctccctggtgaaacagacactaaaagtcaaggtggcctggtgtggtgatgtgtccagagcagaactgggctttagcagtctgcttgtcaatcaccctctccaggggctttatagtcttgccatttcatcagtaatttacaaatacaatgtttcaactttttaaagattacacttgttaacttatttagtatctgtgtgtgcatacatgtatgccagctagcagacgcgtagaccacagcattcatgtggaagtcatccggtcaagtcacagaaacttttcactcctaccatgtgggctccagggatggaactctggttgtcaggcttggccgcaagcctctctacctactgagccctctcagcagccctcagtgtctcgtctttcattttctatatatctgcatttgccccaattaatctaattgggggctggagagatggctcaaggtgaagtatgtgtgctactcttacagaggggctgaatgtggttctgaacacagaagtctcaggactgcctggaattccagttccagaggtttgtgccttctgctggccttgcacgcatgcacacacacacaaacacacacacacacacacatctctaatgccagcagtcaggaaactgagacaggaggatagccttgagtatgggaccaatctgaactatataaaaacacagacacgtacatacacattcacacacacacacacagaagggaaagcctgaaagcaaaaggctgttatagcacgtgtacaccagggtaacatttgtgaacattatttattccctctgggttttccattcaccagagatgccttttggttttattaatgatgatgctacagatgtcgctactggcagtcactctgtatagtgtaaaacttgtttgatgtaatgatcaagactagttgtatgccagacctcatgtgatccagcagaccaggaagggaggtcgtcttgagttagtgcgtgtttaatgtcagctgcagtcattattggggttcatttcaatgctgcccaggtagacacaacatgtattacaagccctgactccctggaagtgtatatggaggatgggatctgtcacacaactccgacagatgtgatctgcccctatcgggctgagaaagctcactgcttaccaatgacatcatcacagcactggcgatttgtggatttgaagattttacaacttgacaatccacaggattcagacactgacctttggcagtctctgtcctgcggctgggaggcagactctctcaaccaccacgccaagagtctcatttcctgaacttgctctgaacccagaatgtacatccagctccaagttcctcctcattaaattgtccacagcaatcagaaatgaccaggtactccgtacccttcagttcctggcactgtccctagagtcaggacgaaagctattccgcatctccgtaactatgccttcttcgtgctagcatgcccgattctgaaatccggccatgggctgctggagtacccgcttacttctccacagatcctgtgtcagttcttttccttatgccaaaacaaaattcccgacaagaacaactgaaggcctggtttatttgggctcattatttaagggtacagcctgtcatggtgggataggcacaacagagggagctgggggcagctggtcacattgtacctgcaatcaggaagcagagagagagagaaaggctggcggtgctcagctctcgtctccatctttattcagctgggaccctggcccatgggatgttgctgtccacacttagggtgggtcattaatgaactagaaacccccttagagacattcctgctttgtctgtaaggtggctgaggactctgtcaggttgagagtcaggattagccaccacaggggccctctagctaagtgctgagttccctttgaaactaactccactcacgagggccatcatgagttaatcgactctcaaagcactcacctccaaatcctggggggtggatccagcttggtcacagggacaaatcgtagagcatgaacactctagccatagaactcacggacaagtgtcaattacagggaaaccctaaactgaacagagaaggaaatacaagcacagcccactgcacagttgagcgatgagcacatttatgtagtcatagtaaacactgcgtatcaaaccaaattactcttatcattagaacaagagggaatacctgggcatgatggccaaagattcaggcaattgaagcaagcagatctctgtgagttcgaggccaacctgatctacataaggtgtttgaggccagcaagggtgacatggtcagaacctgtctcagaatatatttaataaataaacaaatgggacaggaagtaggggctcagtagcccaggattccagaaatgaattagctcttcctcttctgggccagagagatggctctgcggttaagagcactgactgctcttccataagttctgagttcaattcccagcacccacatggtggctcacaaccatctgtaatggggatccgatgccttcttctggcgtctaaagacaacgacagagtactcacacacatggaataataaataaatgaataaataaataaataaataagtaaaatcttcctcttctactaaaggtagaatttcacctgaaatatcaagataaaagtgattgatacttgtaaagtagacagaagtcacatgcagtggtgcacacccatcatctgtcattccagcacctggaagcagagacagaaggtcatgagttcaaaactagcccagactacatagtgagtacttatcttaaaaaacaaagtgagatgacgacagcaaaatggagggctggagaggaagcataatggttaagaagaagagaagcataatggctgtgctttcagacgaccctgcacccacgtggtagttgactcacaaccgcctgtaactcctattctaggccagcactctctcctggcttccacaggcaggcatacgtggtaacagacattgatgcagatagcatacccctacacataatttttttaaatagctgtggcacgtgactatcattccaatacttaagaagtagaagaagaagaatcaggaactcaaggtcagcatgaggtacagtgaaaattcatctcagagagaggggtgggggaagagagagagagagagaatacacacacacattgcttatacaaacaagtaacggatgtgggccctgggagatgtaagcttctgccatactttatagagttacttaattatttaaattatgtgctttgtagttttcatatgagtgaaggcatcatttgtaacagatgctgtctgtgcttgaagagattataaaatgtaaggatttatctagggcagtctgcagtgtgtcggggaaactttatggagacatcgaatggactcgggacacacaggatgacagtagattgccccatcagagaacctgaggcagaggtttatacgcaaatgctttatcgggagtacagccacaggcgtgcaaaggcaagagtgtgaaggatgggaagcaaacaaaggcggggccacacacaggaggtcacagctgagctgcccgcttgcccaccctggggaatgtctgcaccagccagcctaggcaagcaagggcatgccattaactattagcccatctcttggacaccccaccccacctctgcaatggtcaaatgtgccttgctgtaaccaccctgtggggcacacggattgtgccacctgagaaactggcttggaactctgctgaggtggaaagtgttcagacccttaaaatttcaaaacctgagatttaaatctcatcccaagagcagcaggagggggactaaccccctctctatttccatgcctgcctcagaagtttgtcacctggggaccccaaccaggtggtcacaggtggtcagccacctggaattcttcctcatgcaaatagagcattgccagcaccttagcctccacccccaaaatcccgtcccgttcccaaggttcaaatagtccctgtccacatggaataaataacacaagctatttcaccaatgatcgtctgaaactgggtgtttttacagaggtgtaacacttctaggaggactacatactccaagcactcagggttggaccgctggacctgcctgcctggccatactcccctccctcttagaggctcacatcagagcagggccgaccatgctgttgccagtgtagccaccacggcgggactcaggacccaggacctgagccggccaggccaccagaacctctgtgctcctttcctaagagctgtgagggacataattctggcattccagctagcctggagttctgtggacgctattctccagaaggagaagcagaccacggaccccaccggttcaggagccagagagaggcagaacccggaaccacctcaccccacacttctcaacgactgcctgggagtcagctcctacacactgttttatgctacacactgttttatgaagcttagtccaagcgtggtaggagcagccgatagcaggcaagaccctccacggtgtctctgagggacacgatagaaccaacagagacgagctggctacactaggagccaaggcccgagtttgcacctggggagtccaccctgagaggtcatctgatgcacgctccttaactactggagttccaaactcacaatcctatggtggccgcagagccatctagccacaggccccccccatccagcgttcaaggccagtacagaactgttgacagtcgtagggagtttctcaccactgagagggctaagagcttcctgagtaacgttccaatacctcggtaaattgcaacaatgctggaaaatagagtctggtttgtactgacagattagtcaaattctcccaaatactaactagcctctctgtctcacttcaaaggtctgaatccctaaagggggccccagccctgagttggtcaatcaagaaagccgtctcccagctgccctctggcgatcagaatgcgtcactgcagttcttctttgatgtgtgtgggtgtttccaggaactcaactgaacttaactttccaaaaaccagtcagtgaaatagtgccaggggaacagcggtaatcaagaaattaagttaagcaattagggagagcaacgagaaatcaaaggttttgttttcgtttttgtttttttaaataaaatactccaaccataagcttacaaaatctaatttcaaataagacatttgtttctagctgcagaagtctgaagaaatagtgaaaagccccaaggtgaagtggggctgtcctctgctctgattcctggctgttccccaactccaaagttaaagacaccgcactgagagggtccctgaagtggaagatttgctacgatttcatcacaactacaaaaaatgttaaccttaaagatcccacataatcccaacagaggcgctctttgattctgaaatatagatggacgtcatgccgtgtttaatatagattacatgtgttcaaagatgtttaggtggtacccagagnnnnnnnnnnnnnnnnnnnntgtgtgtggtgtgtgtgccacatctgtggattcatgcacat

SEQ ID NO: 2 - DNA, 4700 bp, Mus musculus
cgcggaccggcgccggagggctccgcgcgctgctgctggcgctggtggccgcgggggtcccggccggcgcctacaacctggacgcgcagcgcccggtacgcttccagggcccctcaggctccttcttcggctacgcggtgctggagcacttccacgacaacacgcgctgggtcctcgtgggtgcaccgaaggcagattctaaatatagcacttcagtaaagtctcctggagctgtgtttaagtgtcgtgtccataccaaccctgaccggagatgcaccgagctggacatggctcgagggaggactcgtggtgcgccctgtgggaagacctgcaggggagaccgggatgacgagtggatgggggtgagcctggcccggcagcccagagcagatggccgtgttttggcctgtgcccatcgttggaagaacatctactacgaagcagaccacatcctgccccatggattctgctacctcatcccttccaacctccaggccaaaggcaaggtgctgattccctgctacgaagagtataagaagaagtatggggaagaacatggctcctgccaggccggaatagcaggcttcttcacagaggaactggtggtcatgggtgccccaggctcgttttattgggctgggacactcaaggtgctgaacctcacggacaacacatattttaagttgaacgatgaagcgattatgaacagacggtatacttatctgggctatgcagtgacggctggccacttctctcatccatccatcactgatgtggtagggggtgccccacaggatgaaggcattggaaaggtttatatatttagagctgaccgaagatcagggaccttaataaagatctttcaggcatcaggaaaaaagatgggctcttacttcggctcctccttgtgtgcagtcgacctgaacatggacggcctctctgacttgctcgtgggggctcccatgttttctgagatcagagatgaggggcaggtcaccgtctacctcaaccaaggacatggagccctcgaggaacagctgaccctgactggagatgccgcctacaacgcgcactttggggagagcatcgccaacctgggcgacattgatgatgacgggttcccagatgtggctgtcggggcacctaaggaggaggactttgctggcgcagtctacatctatcatggtgatgccaatgggattgtccccaagtactcaatgaagctgtctgggaggaggctaaacccgaccctgcggatgtttgggcagtccatatcagggggcattgatatggatggaaatggctatcctgatgtcaccatcggagccttcctgtccgacagcgtggttctcctcagggccagaccggtcatcacggtggatgtctccatcttcctgccaggctccatcaacatcacagcacctcagtgtcacgatggacaacagcctgtgaactgcctgaatgtcaccgtgtgcttccggttccatggcaagaatgtaccaggagaaatcggtctgaactacaatctgacggctgatgtggcacagaaggagaagggccagctgcccagagtctattttgtgttgtttggagagacggcagggcaggtctcagaaaggctgcagctgtcccacatggacgaagtgtgtcatcactacgtggcccacgtcaagcggagagtccaggatgtcatcagccccattgtgtttgaagccgcctacagcctggatgagcatgtgatgggtgaggaagaccgggagctgccagacctgacaccagtgcttcgctggaagaagggacaaaggatctcccagaagaatcagacagtttttgaaaggaattgccaatctgaggactgtgctgccgacctgcagcttcgggggaaactcctgctttccagtgttgacgagaaaaccccacacctggctttgggggctgtgaagaatatctctctaaacatctccatctccaaccttggagacgacgcctatgatgccaacgtgtcctttaatgtctccagggaactcttcttcatcaacatgtggcagaaggaggagatgggcatttcctgtgagctgctggaatcagacttcctcaagtgcagtgtgggatttcctttcatgaggtcaaagtctaagtatgaattcagtgtcatctttgatacaagccacctgtctggggaagaggaaattctcagcttcatcgtgactgctcagagtggcaacttggagcgctctgaagccctgcatgacaacactctcacactgacagtgcccctggtgcatgaagtggacacgtccatcactggaattgtgtccccaacctccttcgtgtatggcgagtctgtggacgcatccaacttcattcagctggatgaccaggagtgtcatttccaaccagtcaacattactctccaggtctacaacatgggtcccagcacccttcctgggtcatctgtcagcatctccttccccagccggctgtcacctggtggcgcagagatgtttcaggtccaggacatggtggtgagccaagagaagggtaactgctctctacaaagaaacccgaccccctgcatcatccctcaagaacaagagaacatcttccacaccatatttgctttcttctccaagtctggaagaaaagtgttggactgtgaaaagccagggagcttctgcctaacgttgcactgcaaccttagtgctcttccgaaagaggagagccgcaccatcaacctatacatgctactgaacacagagatactgaagaaggacagctcctctgtcatccagttcatggctcgagccaaggtgaaggtggagcctgccctgagagtggtggagatagctaacgggaacccagaagagactctggtggtcttcgaggccttgcacaatctggaaccccgtggctacgttgtggggtggatcatcgccatcagtttgctggtggggatcctcatttttctgctgctggctgtgctcctgtggaagatgggcttcttccgcagaaggtacaaagagatcattgaagctgagaaaaaccggaaagagaatgaagatggttgggactgggtccagaaaaaccagtgacccaccgtgccagtcatgtgatgccctcatgtccccatcaccagcctgtggtccttgatctttgtatctttcatatttggaagaaagaaatcttctccagatttttcggaggccccactgatgctgttctcttcctcatcccgtcaagcccggtgccgacctgagatggccacccctccagccaggtcacatgactggggccaccaccactccccttctcaagatgaacttagaactttggaaaggcaagctacagagcaaagcaatatttatggatgcaacattgcgtggtcaaccctcaggggaaaactgttacctaaaagtattttttataaatgtaagccttttatattgatcatgtctttatatttgtatcaatgttttattatttctattaaatagttctataattcactcaagcactgaaatcttggaaatacatgtccctgcatacaaattttaaaagagaaggaacttattctactttggaacttgttgttagggaagaaaaaaaaaacttgcagataaaacaaactgaagaaacctcatgaaatgaatccaccaagctggaggcactgggaaagcacaaaggacatggcaaggccgcctaagacatttattccccattgttaccacccggagttaagttcagagagcttgaagtatcggtgttttctcttatggacctctcactgggagattctcagcaggaactgggatggaaagcttggtttcctctcagcagttgctctgtaccacactgatacatgcagcaggcactaaaccctcttctggagtcagcaagtgctggatggacaactggtcaacctcagaataacatctcatcctaaacaacatgtgtcagagttcagagcccaggaccgaagctgtgctctctcagcaaaggcctgttttctctgtgtgtaagctgttaccttgtggtataatgttaacacaagactctccatttcctctgtcactcttgctgtccccaactggtggtgctgcagatacctccccagagaggatcaccccacatggtttgtgtttatgtcttaggtggaattctcaagagtcgaaccctgaaataggacttgggtgtaaataatttattgaggaagtcttcccagaaggtaacagtgaggaagttgagaatacaagacaggagagtacagggagccaggcaacagtgtcctttcaggggacaacccacgaggtggcttcaaaccagttggatctaatgagcaagtcagactcaggaacctggacttttgtgatgccacgcctgcaggggatataaactttctgcccttaggtcttgctgacaagatgactctgtcctctagaggagaactttggggggcaccctcaagtaaggagatccacaaatcatgcaaagaactctgagccaagagctttagtgctcccctcccccacacaagtgaatgctaccttcagctttgtgtagccaaaaaagccatgagtctaagctggtcctaggagtcaaacattacatctgacccatgaccaagtcaaactcactacaaggaaggggcagcccccccaaaaaaaaaaacagtgcacacccagctcttttaagttttatca

SEQ ID NO: 3 - protein, 1021 aa, Mus musculus
RTGAGGLRALLLALVAAGVPAGAYNLDAQRPVRFQGPSGSFFGYAVLEHFHDNTRWVLVGAPKADSKYSTSVKSPGAVFKCRVHTNPDRRCTELDMRRTRGAPCGKTCRGDRDDEWMGVSLARQPRADGRVLACAHRWKNIYYEADHILPHGFCYLIPSNLQAKGKVLIPCYEEYKKKYGEEHGSCQAGIAGFFTEELVVMGAPGSFYWAGTLKVLNLTDNTYFKLNDEAIMNRRYTYLGYAVTAGHFSHPSITDVVGGAPQDEGIGKVYIFRADRRSGTLIKIFQASGKKMGSYFGSSLCAVDLNMDGLSDLLVGAPMFSEIRDEGQVTVYLNQGHGALEEQLTLTGDAAYNAHFGESIANLGDIDDDGFPDVAVGAPKEEDFAGAVYIYHGDANGIVPKYSMKLSGRRLNPTLRMFGQSISGGIDMDGNGYPDVTIGAFLSDSVVLLRARPVITVDVSIFLPGSINITAPQCHDGQQPVNCLNVTVCFRFHGKNVPGEIQYNLTADVAQKEKGQLPRVYFVLFGETAGQVSLQLSHMDEVCHHYVAHVKRRVQDVISPIVFEAAYSLDEHVMGEEDRELPDLTPVLRWKKGQRISQKNQTVFERNCQSEDCAADLQLRGKLLLSSVDEKTPHLALGAVKNISLNISISNLGDDAYDANVSFNVSRELFFINMWQKEEMGISCELLESDFLKCSVGFPFMRSKSKYEFSVIFDTSHLSGEEEILSFIVTAQSGNLERSEALHDNTLTLTVPLVHEVDTSITGIVSPTSFVYGESVDNFIQLDDQECHFQPVNITLQVYNMGPSTLPGSSVSISFPSRLSPGGAEMFQVQDMVVSQEKGNCSLQRNPTPCIIPQEQENIFHTIFAFFSKSGRKVLDCEKPGSFCLTLHCNLSALPKEESRTINLYMLLNTEILKKDSSSVIQFMARAKVKVEPALRVVEIANGNPEETLVVFEALHNLEPRGYVVGWIIAISLLVGILIFLLLAVLLWKMGFFRRRYKEIIEAEKNRKENEDGWDWVQKNQ

SEQ ID NO: 4 - DNA, 388939 bp, Homo sapiens
gacatttcctgccatttgcgtacacatcccagcatagcattggggctcccctcaccccttcttgccccgccagggctgtgagtattctgtgtcgtttcccatgtgtgagaccctgtgtgtggatcccacaggcagattaggtcagaagaggattctgggaaaagaaaagtcaacctgtcattagagatcatggacagtgggctgagtccagcacaggactctgagagggaggcggggcaggaaggcagtccattcttaacatacttatgtagtcacttttctgtcttgaggcacacaaaaaaaacaaggtcatatcttttaatgtctcagtaaaacagcttgagccctccccttatcaccttgagaaacgcctcaggccttcctccaaggaaagacccccaggatgcttagtcatatccaaaatgtcaatccctgtcctttccaccttgcctttgcagtcagaacctccacccaaggccagaggatgccccaatgtcatgtgcactctatctaccccactggcatcccaggcagtgtgatcagggcttagtgtcctgcttctgccacctccgcaactgctggcacagaccttttcatagttgcagcagaccctggggcatgtggagggaggacccatcttcgactccccattgcactcagcagatgtggccaccttccagtatcactgactcagacacacgcacccagcccttgcccagggtgcaagcctgccttcaggaaggatgactgcacccaggctggctgtctcagctcctggactcagaatcactattacctcctcaaccccaacttcctgcaggagctagttcacctgttttttatgtcagggaccttggggccttccctgtcactggatttgattcggagtcatcccaatctcacaacatattatttattccccccttcatgtctttgaataaaattgatgcacccagaaggtataacatgtatatcttgcagcttcaagtacaagaggtcctaggcttcaacttaaaaactttctgggggaaggcataagaaggcttttcttgtgggagcgtgttaagcagcagaaggggtcccaaaacgtgtttagtgtttacccttccctaaagacatttgcttagagtttggagtacactgaggctgcctgaaagaagacagggaagaagctagaactgcccttccatttcctgcaaaatttcatctcctgccccactcccctactcgtaactctcctttagacacactcctctatggcagacaacttctgatacattcaattccaggtactcattttttggtgaatgttccattgcatctgaatgatattgaagtgaacttctcttacctgcatgtgtgtgcacacacacgcacacacacgcacgcacacacacacacgtgcgctcacatgcacatgcgcacacacacgcacatgcacacacgcacgcatgtgcatacacatgcacacacgcacatgtacacatacacacacacacatgcacccaaggtcaacaccttaaaatcccactgcatttaaaccatgagtgggtgggaccttgaggaaatcaccaaagatgtttcaggagtctccctctgatggcccacatctgggaagccctggagagatgtggatttgacaatttacgaaagctaaggtagagagggccctgaaaaaggagctggctagccggccgctgatgtgagagtgaggtcatgggtgcttgggttgtgactcacctctccagcccttcacagggcacctgaagcacctgggggtttgagggcttgaacacttagacaaaggaaggctctaaaatggcccactgaaacatgcagacaccttgagaaaagtgttttgagtttttcttttactccaaataaaaatagctattttaaaagagtggaataaatgacataataataatggcactaaattgctaacatgtaccagttgcttccctcatgctgcgatgtgcagagtggctcattacatttaatcctcacaacaaacctttgggtatgattccctgtaacaaatggggagagctcaaataacttctcagggccacatacctgatgctgtggactgaatgcatgtatcctccaaaattcttatgttgaagccctaacccccaattcgcctgtatttggaatatgaaagtaattgaggtcataagggtggggttctgatctgatagaattagtgtcctctctcttgctctcgctctcccctccctccgcctctctgcaagcacgaagaggtcatgtgagtccatagcaagaaggggaccatctgcaacccaaaggaagagccctcaccagacaccaactctgctgcccttgatcttggactttcagtctccagaactgtgagaaaataaatttatgttatttaagccacccagtctgtggtatttttttatggcagccctagaagactaatatatctgacaagccactacattgggattacgagcaccacagccctcactgttactcatcaccctaaactgcctccaacaaatatcatcattttaatattttatgttttgctaagccataggctagctttaatatttcaattgaagtgagaagtgtttttaaaacttggcattatgttgtacagctgtattctaacactgatggttgttgcttaaagccgtttcactaaatttagatctctggaaaaaaatttgtttgagcatggaaacaggttggaaatattgcacccaataataacagtttaacttttggcttatgaaatacttcagtgggaaagtatttgctcaaatctctgcctgctattatagttgaaggcttggcgatagtatttgcccttcctctgaactttctggatatcaaagccacgtggaagtatagcttgtcttatgtatgaaaaacagggcaaggcaacttttgaagaattgccgttaagaggtgcatttagctgtgtcaatcatttagacaacgattatctggtatgtgaatgatccaaaccctttttatttttttctgcctcttttgaaaatactgtgaggagccatctggctattgaccacttcttccttccacatgatggctggtctacctacctcagttggcaaagtcccctcaacagaggccagggccagagggcagggcttgttaatagatgggaatgagagctgcccttggctcctctttctttctctgttgtgtgaaggtcaagttgtctcctcatttggagatcagatagctgtgtgtgcacagctcttgatccacttccctatttctaactttgattagtgactttggctttacggaggtagcatcttctacatccactgctggatgtagacatccactgtgtctctgtagacaattcaagcagtactaaaggagtgatagatagacgatagatagatagatagatagatagatagatagatagatagatagataggcaagaatagcccataatctcaaccataatcattattaacatttagggtaaacttccaaatctctttctttgtgcatatatacatacagatgcatagaaatttacatataccagattatagtaggcatgtccttaaggaacttgagttattacccttgttatgctgcagggattgttccttgtcagtgtgtaaagttgcatgccaaccttttgtaacaggctgtgtaaggtgctgattcaaccaaatagtggatagtataggctggattgtgcattgttaagaaccaagtggctaagttctttagggctaactccaaagaaaacccgacagttggcattagatgccatgtgccccaagaatgagagaggatgaactgactttatgggccttgctcttttggagggattagaactacagagatcacttttggggggagtgcagtgttcatgggctggttatgtaataaacggtatattatcttgtaatatatggggtgtgatgctgtcttctcttctaaactgaaaaaacttgattgcagaaacacatttggccctaagagttttggacaaggattgtgaacccatcatatggtcagtcctcatttcacatggttctatggtaactgagataaaatctcagactgcatcttcccaactggatcactgtgaggtttacataagataaagtgatctataacatgcttagtgcagtgtgagacacatagtgagtgagccttccttgctgctagcagtcctatcaccttacagcagcatctgctctgctcgagtgtctgtacccgtcaggtctctgcaaaccgggctctcataatcagtggggagtgtctaaacctccatttagggtcctcctacggtacactcacacagaccccagaaatgcaagcagtcccttgggggagacaaggaggatgttagagagttatggttgggaagctttgtcagggagaaattagcatttcccatcggagaccatgggaagggcactctagaaaaaagagcacaggaaaaagtatggctcaatacagggtccagaaatactcacctggaggaactatgtgtatttcctgctatagtaatatagcatagtatttgtaatgaaaaattgtattctaaacctaaagattactaagccaattggcttgtattaagagccttagatatctacctagctttgacctagtagttaagcatttaggaaataatgagaggcagataaaaatctacaaatgtataagcaaaaagaaaaaaaaagatattagagaaaggaaggattaaaaagactaattaatcttaagagtttttcctttttcttttctttctagagacaaggtctcactgtgtcatccaggctagagcatagtggtggaatcatagctcactgtagcctccatctcctgggctcaagtgatcctcccatctcagcctcccaagaagttaggactacaggtgcataccaccatgtccggtcacttttttcgccctagagatgaggtctcactatgttgtctcaaactctggcctcaagcaatcttcccatcttggctttccagaagttgggattacaggcatgagcaactgtgtctggcctccaagacttttttgaggcttctgaaaagccaatgttgttttcaccccaacatttaatcattccaatattcctctctgcagtgaggcaggagggagcagagcagtataaccatcacttcttttgcattgttacagtagcagtaacaattcaacaaagtatgtatgtaactgtttaattgtttaacaatgtaactgtttaacaaagtaactgtggagagcaattttgcacagcttatagaaaacgccaatgctaggtgagctgatagagcatgctgttcagtttgcagccactaaggctaatggaaaaccttcagattccttcttgaagtgagagcataaaggaatggagggcatttggttgccatttccgttgggaaattggacaagaggttcagtttttcaaaagtctccattccataaagcaaatctacattttgcatggccaggtttgaaatagtatgcctctcccctccagctggtgaccctggagacacgcccttcaggtcaagtctctgtaaaacagcttattctggcaactaggaaattgagctcactcttgagctcagattatacgaataactaatacatgtttagcgttttatggttaggaaatgctgtcctgagaagctcatcaataggtttattagttattggtatccttgttttattgatttactaaaattacacagttgttcgggcctgggagttaaattctcttcaccagatgccaaatcctacgtttttcttaccacatcatggtgccacaggttaaggaatacagtgcagggttctgaatctctctcctgtaggacagtgcttcccaagcctggctacttgacaaatctcccaagaggtgttggaaatgcagattcctgggccttgcccctagattctgacctagagtgttattagtaaatctgtatttttaaatagttgcctggtggtctaatatacagtcaggattgacagctactgtttagttaaatcaaacaccaatgctataatttttaaccgatatcatttttagggtttggtttccaaagttggaaatcagtgtgttttagatcagtggtttcctgtcttctaaaacctaccttacctttaaagaatctgttgaaatctgtggatctttccctaagaaacacacaaacacacacatacacacttttatatataattctagagggctatattagtttcctgcttctgctataacaaatggtcacaagcatagcggcttaaaacaacaacatttattatcttacagttctggatgtcagaagtgggacaggagtctcactggattaaactcaaggtgttgcctttctggaggctctaggagataatccattttattgtctcttccatcttctagaagctgcctgtattacttggctcatgggtcccttcttttatctccaaagccaacaatgtggcatctctctgaccccacttccacttcacatctctttctcgtgctacagccaaggaaaggttctctgcttttaaggattcacataattagactgtgcccagccagataatcctggaaaatctttccatctcaagacccttaaccttaatcacatttgcagtccttttttgccatataaggtgacatattcacaggttccagggattaggagggggactattagtctaccaaccacaggggatcttaggacctctgaagcaacatggaaaatgagtgaactctaggttaggagcatctgttctagattccattcattctagatgttaaatcaacaagaaattctgcttgcctacaaataacagaatccctaaaagcagtggctcttataaattaggtgtttactttttttcaggtagtaagaagtccccaggaaggcatcccatgtcaggtgcagcagttctagcatgtgacagctgaagtctctgcaattctcctggcctttcctttgaggtggccctcaaaacagctgctgcatctccagccatgacctctgtgcttcatgcaagaggggcaagggcacaggacaaaagccataagtcagctgagttgcctctcctttaagaaacctcctgagaagcctaccacccaaataacatgctcatatctcattggccagacactgcacatggccactctgtctgcaaaagagactgggaaacatagttttatttatttttaaagctaggcatattaacactccactaactctgggctttgttagtaaggaaaatgggaagtataaatattgggaagatactagtgctctctaccacagatgaaaacttcagccaggcacagtggctcatggctgtaatcccagcactttgggaggccaaggcaggtggatcacttgagctcaggagtttgacaccagcctagacaacatggcaaaacctcgtttctaccaaaagtataaaaattagccgggcatggtggtacatgtctgtggtcccagctacttgggaggctgaggtgggaggattgctggagcctgggaggtcgaggctgcagtgaacagtgattgcaccactgcactccaacctgggggacaggagcgagacactgtctcaaaaacaacaacaaaaccaaaaaaagaaaaacaaaagaaaaccttgtgttttgtgttctacaacgagaattgatcatttttcactctcacacaaccaaaacatgaagaaagttaaaagtctccttcaaaatctcccccatagtgcctcatcctcttactaagcttgcttttctttaagcaggtcattctttttttttttcatttttcttgagatggattcttactctgtcacccaggctggagtgcagtggcacgatctcggctcactgtaacctccgcctcacaggtaaaagcagttctcctgcctcaacctcccaagtagctgagataacaggcgtgcggcatctcgtctggctaatcttcttatttttaatagagatggggtttcaccatgttgaccatggttggccaggctggtctcgaactcctgacctcaggtgatctgcccgctttggcctcccaaagtgctgggattaaaggcatgagccaccgtgcccagctattctttttctttcttttcttttttttttttttttcagatggagtcttgctcagtcacccaggttggaatgcagtggcgcactgtcggctcactgcaagctcgacccctcagcttcaagcgattctcctgcctcagcctcccaagtagctggaattacaggcatgtgccaccatgcttggctaattttttgtatttttagtagaaacaaggtttcactgtgttggccaggctggtcttgaactcctgacctcaatccacccacctcagcctccccaaagtgctgtgattacaggagtgagccactgcgcccagccagttcattctttcaacaatgtttaagcatctacctaagcctggcactgagctgggccttgggggctacaaagatatctaagacttttttctccttagagagctataccgtctatggagagggacagagagcccccaaaatgatgaacatgttctaagtgttgagatagaggcatgtgaacactctttggcagcccagaaaagaaaggggaagaggaaatggcacagaaagggtgaggcaagaactggcctggaagtctaggatggataggattttgccagttgaagaggggtaggcacatttcaggaagaaagaacagcgttggagaaggcacagatgtgtgtgaaaacccctgttggacacgttcaggggacagctagaagttgtgtgtggatacattgtagggtttgtgggaagtgagtcaggaaaggggcataaaatggggctggaaagagagatggagcctccatgtgaagttatgctaaggagatcgggctccatcctataggcaggagtaggtggtggggggcaacgggaagttttcaaccattatccaaactctgttgtagaattaaaaagtggaaagaagagaacacaggcagggaaaccataatagtgtggtcagacttcaacatgatagcagtcaattcagtaggaatcttgaatttgagtagtcaagttcatagagacagaaggtaggaaggtggttgccagaggctgggggtggggatgggggtagggttagggggaaagaggagttattgtttagggtataaagtttgttttccaagatgaagagttgtggagatggatggtggtgaaggttgcataacatgcatatacttaatcccccgaactgcacagttacaaatggttaagatggtaaactttctgttatgcatatttacaattacacacacacacacacacacacccttcagtgcacgcaaaccctgctggactccaaccttcagagcttccgatttagcagggctgagtgggacctgaggatttgcattttctgacaagttcccagatgacgttgatgctgctggtccggagaccacacttcgggaatcactggtgtacgagaccaagtgactagaatatggaggggtgctctgctcgcttccacgtggctactattgttatgaacaacaacagccggcgtttactgagcactgctcctacagcttatctcacaactgggtgaaggagcagaggatgcgcagggctagaacctggagtctaaactcgtccttcacccgggttgctctggatcttactggttgtgagacagggagggaaagagagacaaaggcagggagacaggcccagcagggccggcagagcctgtagtgacggaggggagcagccttatctccgggaacccgagcgccccgtgcgcggcggggagggggcagttcggggcgccccggcgggtcccaggggctgactcccgcccgggaagtgcgcgcagggctcacggcccgcagggggcgctgccgcgccgtccagccgccgccgcccgggccgcccacctcgcgggcgcgcccctccgcagaccagcgccgcccggcccgggacccgctcgcgcagacttctcgggcggactgaggacgccgccgctcggggccgcccctgtgctcgccttcagcgcccgctcagcccgccgtccgcgccccggtggcgggcccgacgcccgcattccgcccgtgtccaggcgcagagctcccgccccggggagcttcctggccgtcggcgggccccgcggcccgcgcgctcggcgccctgctcgccgggcagaggggaaggcggcggccggctggggatgggcggcccggctgcgccgaggggcgccgggaggctccgcgcgctgctgctggcgctggtggtcgcggggatccccgcgggcgcctacaacctcgacccgcagcgccccgtgcacttccagggccccgctgactcgttcttcggctacgcagttctggagcatttccacgacaacacgcgctggtgagtgcccgcccgactccgcgaccctggcccgcgcggccaccgccccggcccccaggccagcgccgccgccgcctttccggtctcttccacgccgccgtcccgagggggcgatttaaatgtctccgttgcgcgcggctcggccgccgggggacggcgggagaagggaggacgccgtccggggcccgctaaggtcggggtcggcgcctggaggcgggcgggggcgtccgggtgcctccctggggtcccagcccagagcgtggggggagagccgctagagttgtctcctccgccgcccagctagactcggcttcactctctgaatcgaaaagtaacttggctcctctgcctccgggcggccgccgctggcccagcgagcctcctgaacctcgcagggcctggaggagtcggggcactggagctgcacccctccccggttttggggaacccctgaggaaggagtatagcctctccagcgccgctgcgcggggtggggctccccaggggcagggtgtctgggatccactggggcgcactggagcccagagccccggcgccccccccccccccagctcctacaagaccctgggtggaagtggagcggagaagctcctaggatatagggaagaggaaggtgagggagcacttcccagtgacaccgccggtggggcaggtagttatctcttgggagagcctgagtctcatctcatatgggccattcgacccggagaccttcaccagaagccttaagagagagacgtgtttctatagtggccaaggggtccagttgtcccctgagtccggaggggtgggcctaagaagggggcagctctcccccattaagcaccataagccgagtggtacagagcttgtgcccaaccccagcagagaagcactaagggggggttggtgccctccttggccacatcctctggaccagagggtataaacagccacacagtggtcacttcttgataggagagagagttaggctgcgggaagttcccccgttcaaggtcgtgcctcatgggggcccaggtgacagccaggccggggttgattttattgtgtattcaccagcctgagcgtccttaggggtggcaggcagggaggtcgaggtcactgatgctggtgctctcagcatgtagttatgcaggagagtcactgctctgtattggacagaggctgatggaaaagggtggtttgtggatcgcagtactcaagcattcctggaaaaggggactctgagaccagcccactaagaatcatgctgttcaggagatcagccttcaagagaaccagttttcaaagccctcacatagctctcgcccagctccacatctccctctctcacttactccagttgctgggtataagaccgagtgtgtctgttcttaacacttgtcaaattccccttttaaagcggagcaggctgaacatttttctgtgtcctgcagactcagggtctgaggttgaagaacacatcccagatccccacactaggcaccaggcacgcgggaagcactgtcaaaaatgggagggctgctgtggacagcgggctgctgagaaagggcgggcagctgagcaggcagccaagccagccggagcattgtgtgtgatctgcaggctgaggctggctcaactgccttggagctctttgacagctagagggagagaggccaggccactgtcactgtggatttgcatgggccacaggtcaaagccacactgcctgggaaaggaatgggtagagacgagagcagatctgacagagaaaaggtgttcagcctacttggatttaaaacggggatgaagaaaagctgtgtgacatgagcagatttggccagtgtgggaaaagacagtctggccttcagcttggtacccagggtaaatggtagggagtgggtgtggagcagtaatgctgtgcatattcttgttgccagttgagatgtgggactggtatttcaggggtccatgggaacccatgtgtctgggctgctgagctcaaaagtgccctctcttgttctgatacaagctggctactctttgtattggagtgcttgtccccatagctgttcaggcaccaacttaactctactgaaatctttttaaaataatgcttctttttcctccctcacccaccatattgacttaattttttcttagattgtgttctccccttgatttctgttctcatgctgttgttttcaagtattttcctccccatccttttttctctttccctttttcccagtattctttgtcttagaccttgaatgtattttttgctgtatgtatgcttgaatgtgttttttacccaggcttggtaaactatggcctttggagcaagtgacttccaacatcttctttctcctttttctttcctctagaggctagacttattgtgcaaggctgctgaaacttaagccaaaggattcttgcttgcataggcccctattaatgccttgtccccaattttataattttatgttaattttcttaaagttagtcaccctaaatttgtaagatcaggtcctgtgaattctggatctgtcctaagtctgtaccttaacttcaactgtggggttggttgattgacttggtaactgattgttggtcgcttactcctaagcagtacctgagccctggatcttctagtcctgcttgagggacatgtcagtcattttcaattattcgtgattgcaaacagcagcaggggtaaacaacctttaacgaaacccttgaggacaatcttaattatttcctttgaataaattcctgggcttagaattgctgggtcagagaggatggaagcttcaaggcattctttatgtattaccaaagtgccagtgaagtgtgtgtactttagaaaaatacattaatttattcagacactggaggcttgggagtagttttgcaaagggctgctctagtgcactgaaagagtatagaacctacatgggggtgacttaaaaggatcacaaatactcgtcaaaatgagtgaggaaggtaaaatatagacatgaaagggaaaagcagtatagcaaaactttgaaaggaaaagaagacatgttaattaagccttgtatcttacgtctctcttctcgaagaaattattctttgttacttaattcaatattttgcagtctaagatatttgcttcatgctaattaactacctgttttacaggtgaaaagatgtgttgtctctagggaaagggagggagaagaatgtgctggaagtggtagggggagagcacagaccccaaagtcagcacggactctgcaggcggcagagtagagcgttcccatgttgagggacctgcgggtgtacatctcaaagcatgtgaatgtgctctgttggtggaactagcacttctctaatcccataactgagcatttctctcaattattttgtagaccaaaattgtcactaatcggaggatcctagatccctgtgtaagtgtgggggtgatcttgcttttcccagccctggtgactgaacccagctctgtagccatatcacactgagcacagagccccagacccagcttctctcagagtacttgcttgagtggtcccgctgtcactgtgctctgggcagtgagaactgtccccatggctagatggaccagaatatcctggacaatgttccagatgacgtttgtatcagctaggatacaaacatgcaagggactcaattttctttttttctaataacacccagagtgtctgcctgcccagagccagcttcctctcctatagctcccactccctgagtcttctggcgtcctttgaacaacaacagtaagtgccagggaacatggacaaagccgatttctgtccccttcctttagacatggaccggttactcagctgcagggctgacaactgtaacaccctgtgatataaataaatgctgcctggctggcgtgcagcctccagagcggacgtctttcacaccccaccccgtcccctcctccttctctgccccagacgccctggagtccaaagtggttgggtgcactggcttcctttctggagacgtgcttcctgctccctctcctgggacacatcaagacggctgtgcttaggcacagagcgagtgctcggaaatggaagatgtgctgggctttttgctttgttaaagttgtcagagtgttgttcagtgaggaataggaggcaattccaagccaaggagaacatatccttgatttgcatgaaggttgagaattaaaagaacaagctagatagttctggtgagctgtctgatgtagtcaccactagccagatatattggtatgtaaattaactaaaaataaaatttaaaatgcagcttctcagttgcacttgccacatttcaagtactcagtagccacatggggctagtagctactgcattggacacaacacagagagaacattttcatcatcacggaaagttctactgggcagtgtgggtttagagcaatgatgtaagtcttaaagggctagacaaggatcaaaaggagaggtaagaaaaagaaaaagaaaaaaaatcaacccatagcatatgtgagtactaaaaccgaaacgggtgcttacatctaactaaaaattattgcctgctgaagaggttgaattgtctttctactcataaaacaccgcagggcctgatctatatttagggctgggggttcaacaatgaaaactttttgctcacaatctgacaggtgagaaaattgtggggttctagttgtgtgtctcaaatgaaatttaagatctaggctctgatgggggagaggcttgtcctcaggcaggcatgagttgttcagaggggcagaagagaaactcctgtgaagggaaaacatttagaaggggagccctgggatcataggacctgctgcccctggccctgcccgtcttgctgaggaaacacccagaaatggtggtgggagccctgccttctcataacctcagtggtgagcatctttgcagagttcctctgtcctgtgccagactctaggggaaggtgtaggtccgcttcctcatttgaatttttctagggaaatggcattttcagacattgttcctggtcctcactcaccctacagagcctgctttctcaagctctcaagaaggaacaacacatatatgaggcctgagttccaaggggatccaaaaagcatcttctcggggtttctgggaaatttctctgaagatctggagaagctggcaagggtgctgttttctgagctagtgctgaatgctggctgggggcagagacagctgtcttgcccagtggagaaccttccagggcaagaagacagtcttgtctcaaccagtcattaacggccctgagtgtgagagtgtgaagggccgggccccagccagctctgattccctggtgacatgctgctgttcaggaaatggtctcctgataacttctattgtgatttgttcagggaaaatgttgtttttacatttgttaaaagcagccatggtgttctctgaaattccttgctttcaaggggttgcatggaattttaacaaccaaaatgaatttcgtcagatagtatctacaagaagtcagatgctttcacaggcataatattctttagttgagtctttgtaacatcctggtgagtggtttccagtttgctatttggggaactgaggcttacagagttacacgccttgttcaaggcccaccccagcctgagagatcaatgcacattcactgggggcttgtgtcagtttgcatcctttaggaagcagatgctaggacagagataggagtgtgagagaattgttgggggcgggtattgcctgtgaaagacaaatggggaagttggatgggacagagagagcctctgactctatgcagatctgattaaagtctcagtcaactcaacagagatcactgggcagaaatagctgtcctctgccagggtcaggtattggctggagctgtctgggaagagcacagcctcagctggaatcctgcagcagatcccaagaaagctgcagctggaggctgtcagctgacattccgccttgcagctgaacagcatgaagtgacccacacctctgtggctgccctggagcctgccacgcgtgaatcactgtgttgggagggtgtgagatgtgctccttggcctgcagtgtggctggggatcatctttgctcatacctctgtaatcagtgtgtggagcgtcaggactgacagtagggccattgggactggcccagaaacagaatcctgagcaatcttgccaccagctgactcacaaggtgcctctttctgatgtcagagaagtcacaggtgatggatttcagaagaaaggagctctgctttacgctgagccaccgagttctctgaactgcaaatccttttagccaagtggatttggcgatcaaccaaagcagaataaaatgttttatcccaaccttcctttttgccagaaggagtcctaggaagccgatgtaagtccaagattgggaaaaatctacagtctttgaaaccacgggctcacttggtccaccaatgtctgttctgaccaaaaaggacttctgtgttgagtttaaattagcaacagtagcaacaataacaccaaaagcagcaacaatgtatctgaatattcagtagatgtcaagtgctatctacattggtactcataccagctcatttaatgttcccaacagtcctttcagctggtagccatttgggctgccataacaaactgttataggttgggttgcttataaatgacagaatttatttctcacagatctagagccttggaagtccaagatcagggccccagcagatttgctgtctggtaagcacctgtttcttggttcatagatagtggtgttctcactctaagctcacacagtgaaagggatgagggagctctctggggccacatttataagggcactaactcattcataggttatatcctcatgacctaatcacctcccaaagtccccacctccaaataacattaccttggggtgaagatttcaacatatacattttgagggaacacaagcattcagtctgtagcagctggctatcattttatccccattcatggaggggaagctgaggtacagaggcattattgcccaagttacatggctaatgagttgtcgagcacaggcctgtgcctttgcccacccaggctgactgcctgtcaggaagtcaagaatccgagtttgggggcttcagggcgctcaaacatctgtcttgtgaagttctgttctgcctgctttcctggaaaagttattgaattgcaatagcagtagcttctctgcggcaccctttggggatgcttattcatgacccactggctactcttggggggatgctagggttctgttttctggagatgtttgatcactgagtgaacagggacccaatgattctgccagggacatttgaagggcctcttctcacaccaaggctgtctagcattaagacagaagtgtcccaggaaagatggagtactctgcaatattccatgtatccctctaacctcctggggctgctttgttactatccccccatccactctgagttctactggctcccaccacttatttaggaatctctgaattggggaaggtagccatggtggccagtgtttcagaatcactcctgggtttgtaactttattaaagaaacccacacagagtcaaacttctgcaccagtgaccaacaatatgtgagaggatgatttgtatcctcaaatatttgaacacttaataaaaggcatgaatgggtacaaaaaattagaaagaatgagtaagaatgagtaagaactagtatttgatagcacaacaaaatgacaatagtcaacaataatttgattgtagtttaaaaataactaaaagagtataattgaatcacttgtaacataaaggataaacgcttcaggtgatggataccccatttaccctgctgtggttattacatattacatgcctgtaacaaaatatctcatgtacctcataaatatgtacctactgtgtgcccaaatcttttttttttttttttttttgagatggagtcttgctctgtcacccaggctggagtgcagtggtgcgatctcggctcactgcgagctccaccttctgggttcacgccattctcctgcctcagcctcccgagtagctgggactacaggtgccccccaccacacccggctaattttttgtatttttagtagagagtgggtttcactgtgttgggcagaatagtctcgatctcctgacctcgtgatctgcccactttggcctcccgaagtgctgggattacaggcgtgagccaccgcacccggactatgtgcccaaatttttaagaaaaataaaaaatcacggaacaaatttcctccatcttagctgatctgttggtgtgttaaggccacctgggagatggcctttcctaccccttcctatctagtgtccaagtgctgtgatgtatgtggatcccagagtaaacttggtgttgtgcagtacacaccagtaggcagcattgcagagggtcttggcacctcttttgcaccaggatgggtcctagagggtggatgttccagattcagctgagtagtgttcctgtctctaccttcattgaatccctggttccacagcaacaaccagatccacgatttttgtgccataaaagggggcactgctgagatgcacaagtgcctggtggccaagagagtgggctccagcattagccctgccctcagcctgccttactcagctctctgcttaggagctgtgtgatcttgaccaattacttcagctgtttgaacctcagtttccttttctgtaaagagtaataagggtacatccctcattaggttggtgggggcattaaatgagatgatatctgcaaagcccagagcacaacacggcacacagtaagcccttgatagatgctcgtagttatttctcttgttacttgatctgatttatgaaaccaatggtctttttcatcctgacttgagatgctgagttttctttcagtatttttgttgattcattcatttattcatcagactttgagtgttgacactcaacactgaaatgaatgagatattctaacatagacacactcttcattatgtgtggcctctaacatttttgttatgctctacataaatctgcatttttgtgcattcatttacaccctgtctgcttccaaaaaggatctgagatggctactttaaatggagatctttgggattgtaaatcctagaattttgcctgcctgtttcttctctgtgctcttggaaagccaaggagcagatgggaggccacccttgttatggggagctccagctcccaccccaggctccagataagtctgggaggtagatctacagttccaggatgggatacttttttaaaaagtaaatgtaaatgtattgccatatttctcttgaaaaaaaattatcacaagaaaccaacaagaagatatcaaggctttttcttagatctgccagaagtctgtaatttgctctatcccttggattttagtgttcacttgctgctttcagatgtggaaggaaaacctcagtccttttgccttgcctccttctccagttgcctcccctcagtgtgtctgccaagacctgagccccaggccagggcagcagcctctgacctttcactccctaacacacaagctggggaccaatgtcactccaaggttggaccctgcccccgtgcctctgcttttcccagttgggcatggactccaccaatttcattctctgacttagcgttatgtggtgtggattgtactgctctccctccatttactgtaacctaggctctccaggataaaaattattattgccaaccttttatgaatactttctatatgccagaaccactgtgttcatagttccctttatgcagagcaggctaccactcccgaagcacagagaagccaagtcacttgtccaaggttacccagcaagtaagtaaattacagagttgtgctttgaaccaaggtgggactgatttaatgctaaactgactgttctcagggttagccatgctaccctccctacctccacctccatcaaggccctgtccaaggtatcaggtttctaaggaaaaaggagaagggccctgaaaggaaaagggcttcttcggagggcatttgtgtctgctcttggccttgcagataaaataccataatctactcttgcaaatcaggccatcctggggtgcatggtcccccaaacactttcatctgccttttccttttgtgcctcatcactgccttgggagggggatcatgcatttgttattatccttgttttacagaaaaggaaaggaagggtcagagtggccaggggacttgtctaaagtcacatagctgtagctggcacactcctgggtgtgacttcggatacactctttagggcctattctactactccaccatgcctgtcccatctcagggccttcagtaaaagtctgtggtcctggttggtgatgagattcctttgagggagggaaaggagaccaggtagctagaggagccatagcaatagttgtcagctgcatagttggataattggtttggacttagcgggaattagtgggcgatggaattaccacggtccagattccgtcagaagtggcatgccttagcttgatgacgtatctgttttctatcaccacaatattgctgcatccctaacaaaccaccccaaaacttagtggcttaaatcaaccaccacctgtagcttattctctggttggcagcttaggttgggttcagctgggtggttcttctgttctctccaggactcactcatgcatctgtggtcaacttctgggttagctggttggctggctggcaaaggatggcttcagctgggagggcttatttttgctccatatgtatttcatcctcttgcaggctagcctgggcttgtacacatggtggttgggtagggtaccaacagaacaatcagaggcttgcatgatttcttgaagcctaagctcagaagtcaaaccatgcccctctgccacattcttttggccaatgtaagtcacaggtccagactacatcaagaggaggcagaaacacatttcatctcttgacaagagaagctgcaaagtcacactgaaaagagcagggatacaggaaggatggggaattgtggccactttgtaatatattactggtggtgaaagcatcctggctgtccctgaattactgtgacagtctgaataaattcctgcccagcgcaccagaaaagggaacaaggttctattaacctaaatagcaaacacagagagaggctctctaaaagaaaatgtttactcaggaatagggcattgcagtgggaatacatgtgtcacagtaatctgcatgaatattcagggaggtaaaggaaaacaaaggcttttaaaggaaaaatgaggattacttaattgttttgagataattatctttggatacaaggatcagtgacaagggtggcaccagtttgaggttggatagagagttgctaggtagatttcctcacagaaggtgtgagtgtgtgtgtgtgtgtgtgtgtgtgtgtgtgtgtgtaaggttgtgatggcctttgtgcaagattgtgtttttgcagatttttttgtgctagttcttgttatcagttgtttatgcatgaaaacctttccttcatggcgtcccacagctctatttgtcagggttttttttttttttttaaacataagtgactccattttgattctgacaacttttgcaattctaaggatctatgagctcttgggtgctgccaggagttagaactgggatgagttgagtgtcaaggtgtttgacctactactgcccagcagtctaacatttctttgaacacctactttgtagcaggcactatgatgggtgttttataaacattcttttgcttaaaccttacaagaaaccttcttaggtacacttttattcctcctgttttacagaagaggaaaactgaggcttggagtgtttaagacacttgtctaagagacacagcttgtcagcagtagaggcaggacttaaaccctatgttactgcctgtgcttcttacactttatcaccatgcataactttcccataaagcttagaagccaggtagaactactggcttaaaaccctagaaagcagtcagtatccactgcttaaataccaggagcctcagtttccccaaatataagaagagcttatgaggcctttcaggtcccatggctccattgggcaagcattggtccctagtgagtcccctccctctggaaatgaagggtttggtgtggtcagaggtggctatcctggcaccagctcttcctttactcaagcctgggctgctttctgcccagtaagggatgcggacaattcctggggtttccccgtggtggacacacagtgaagaatttgactcatgtaaccaaaacgtgggtccctggggaagctttggctttgggatcaaatgctgaaagcaaacctaatgggtttaaagtttttaatccccagttgctgtccttgatctggctataattttgcctgtggaatcgctgctgtggtgtttgtggggagggagggaatctttgagacactgtcagttctcagtcctgcccagggaggcagctgcggctcagtccttctctgtcacccgctctccagagaatttacctgcagattaccctcaaaacatgagacaggttcagagcgaggtgggcggctggaatggagccttcacagacagcttgaccacacacagggagctcaggaagcagctttgttggaaaaatgcagggcacttaaactgccacaccaggagggggtttggagaggctggaaagagcatgccattggacacagacactctgggttcaaatcccagctctgccacttactggtggtgtgacccaacatctctgaatggaaaacacatgagaggctgcctgacaggatggccatgagcaagaaagcacccttgtgagcataaccagtgttggtgcatgaaccgatgcacccacactgcttattaagagaggcaaacctctggttaacaccatgacagcagtgtcaatgctttggaaaagcaaggtgattgaagttcaccttttgagtcacctgagcctgatggggaggggaaggtcttttctcttccaaaccccagcatgccctttgacatgacggagctttcacatcagagttctcacttcagagctgccctcaaaggctcactggggcttgctcaggtggggattacatatgtgagtagctggcaccagagggggcactgggtacctgttggttcccttttcctcctttcaggctgatgtggggtgggtagaatagggcacgggtgatgtatttgactactggggtgcgtgctacagcttggcatcttaacatgaataaccatcttaacctcctctggccacctgcttccctatctgtaaaatggggataatattagtacctcccgtagggttgctgtgaagagtaaatttgatcctgcccgcaatgagcctaacccagcacctgcacactctatgtgcctgctacatgctggttgccctaattagaagtttagagtcctgcattgatgagaggacctaaaaggcttatgaggccaggcatagtggctcaggcttgtaatcccaacactttgggaggctgaggcaggtggatcacctgaggtcagaagttcaagaccggccttaccaatatggtgaaaccccatctctactaaaaatataaaaattagcggggcgtggtggcgtgtgcctgtggtacccagctactagggaggctgagacaagagaattgcttgaacccgggaggtggaggttgcagtgagcggagatcgccgcactgcactccagcctgggtaacagagcaagacaccatctcaaaaaaaaaaaaaaaaaaaaaaaaaaaaaaagggcctttgagtttgtggcatctttaactggggatgggataggaggagagagccttgcttctcaagggcaatctcttctactggctccaaatgaacataattatttgtaatcagtttagatagttacatagtacttcttaaactatcaatcacctggagagcttgttaaaatgcattctgatttaatgggctggggcctaagattctgcatttccgacaagtgccaggtgttccccatgctgctggtctgaggaccacacttgaagtagcaagcaaagcagagaagtagcttgatgctttgttgatggcagcctgttggtggggacactcaggcccttttatgtggtaaccatagcagaaaggaacatagtcttgttgagagtaccaggagagttggggcgatgtttgaagtggctaggatgtctttttataacttagcagatggcatcttttcagtggcttgttctgaactctgggccatggtaatctctgtatcccttgggatcagcctggtaaacagccagctgaattaacttcagaaaagacccactcatgggctggcctgcggtagtcttgctggatggtggcctaggtacagagcagtgctgggctgcggaggaagccacgatgttctgtaaacacatagatacaagcacattcccgcgtgccacctcgtgagtgtcatgcatgtgtgtgcatgcccccttatctctagcctgattttccattgcacaggatttgggaaaaacctttcatctgaccagctgatcagaagttttgaactgaaaggttgttatcagggtttgaatcagctattgttgttagaaccattgagtaccttgggcttggaaggaaataataattcagcaggttcctttccactttagattttggtgtaaactttgtccctgtcagtcttggctctaggctggaggaagcagtgcctgggaataagctctccagggtcccctcctgcttagataacctatgaatctgtgtctgtgaatttggagccatggcattatctgaaatttccagggttccaatgccagtttgggagacacagtggaggaagaacctgttgtttcttgcagccttttcccttccctcggacgtgatgaattctcactcttgtgaatttttttgtgatttttgtaaaataaattacaagtggcaattagtcactgtgctgatgtaaatttggagttggtgggaatttttggactctgctgtgtggccctggggtttttgagtggaagaggtattttatgctccccaggtcttagaacctgacctgtggaaaggctgaggatgtttcagcagtttagacagggcaaactgctaattcttctcacctgtgaaaacagctggtcttatgaagcgcaatatgtgacttaccccagtggctctaaagctcagccgctacagcaagggggaaaattgatcccttaatgtggctttcttctcactggagttttgttttgtacgtcattgtgcatttgagttacagcagacaagggccagccaaactgctcttgtgtgggtgagggaggcaatgtgatctgtttgggaaagtgcttgctttgatttccaaagggctgtgggttccagccctgcttctgcttgggaattctgcagttgtgcccagcaaacacctggggaggtgcatcccagggcattattgaggagccgcagggcagcctgggtacctgcaccattgggagtcttgcttctctcactccccagcagggcatcttcctcatggaatcagatacagaccctccaagactgacctggaaggagacactccagtgaggggtgggtctccctggctctttgtaccctccaattcttcaggttctaggtgttgagctcagggcagtgggaattaagatgggacccacacacattcccatgaaccttaacaccatgtctctgagccaggttagtgacgatgtcctttgtgatatctgccagcctttgctggagtcccctttgagggcctcagacttctgttgtatgatgtagaggccttgtttgtctgcccctttgcctagctggagtgttgcaggaggagcagcagcattccaagaccagggtgcagtgaatgactgagatcccaagatgaaggtggctttcagggcagagggaagggagcctgggtcagctttctacatccccaggaaagctgtccagggtcatcctaacctctgctaaacaccttttccacaaatacataatatgtaatgcactctattccaaggcatgtgggagatgatctatttcatgatacagaagaaacccttgtgaggtgaattccctctcttttctaggctgctggagataaggaacaacgcctgttctcactaagaagtggcttggcattttctactctttgaacatcagtgtggattttgtttgaagtctcattgtccaagaccttttccaaatggctcgtagctcagcacaaaccgtgcctgattagtgttgtttggtattctttgctatagatcttctgttgactgctttccggaaacaatgcataaaactgtaggtcagaattatttttgtaacatctggaggggagcttactgccatttcccccgtgttctgcactcacacaggcccaaacctgcctcttctgtcttctgggtgggtcttgcccctttcctgtagccgggggatgctcctgctggggatggcccaccctaggcagcttttcagttcaagatggaggatacagaggttcattcttgctcctgtttgcatgcaaactgttctatttctgttttgcagtgggagagaggatacggtttataattccgcactgctgctattttttttcctatttgcccctaaatgtccatgctgtgtgtgtggtgggtggtaggaggaggagagggagacagaagagaaatagcgtttctaaattttctatttgttactgaaatgtaacacatccaggaaagtgtccatatcatatacagttatcacaaatttgtataatgtcactgaggttgaatgacaacattatccgcacccccagcaattcccctccctaattgcaaccctgctttctcctctccagaggtaaccattatcctgccttctaacactatagttaaatttcacctgcttttgaactttagataaatggaatcagactgtgagtatgctattgtatctggcatcttttgttcagtattgtatttgtgcagttcatctctgtggttgcagttgaatgctgttcatttgttttcattgctgcatagaactctttttttgttttgttttgtttttgagacagagtctcactctgttgcccagactggagtgcagtggcatgatctcagctcactgtaacctctgcctcttgggttcaagcgattctcctgcctcagcctctcaagcagctgggattacaggcacctgccaccatgcccagctaattttttgtatttttagtagagacagggtttcaccatgttgcccagactggtcttgaactcctaagctcaggcagtctgcccacctcggcctcccagtgctgcatagaattctgttgtattgctgtaccatgatttacctgtccactctagcactgatgggcctttaggtttcttcttgtttttttttttttttttttgatattacatatgcagctttgaacattttgcatgtctcctggtagaaatgtatgcatctctattaggtatagtcctagaaatggaattactgggtcaaagggtaggtgcatgttcagctttattaggaactgttgaatagttttcccagtggttttaatggtttatactgccactagcagtgtatgaaggttctagttactctatatccttgccagcacttgggattttcagtctttttggtttgagccttctggttggtatgaagttgagtttctctgataactaacatagttgagcaccttttcatgcatttattggccatttggctatcttcttttgtgaagtatctatgcttgtctttggcctattctgttgacttgtcttttcttattaatcaatgaggagtttttaaaatagattttggataggaaccttttgttggttgtacgtgttcccacccatccatcgcagtctcctgggtaggtgggactaaaagcgtgcgctgccttgcctggccatttttttttgtgaagatgggatttgccatgtcacccaggctggcctggaattcctgggctcaagcgatccacccgcctcggcctctcaaaatgctaggattacaggcatgagccaccacattcagcctccttaagctttaatatgcctgggaaagatctaacaggtttcactttaggacctctcccccaagcccacacagaaaagtataataatatgattttcaaagtgagcactcagagagcccacccgtggttgggtgaatacttagccatctgcctcctattttcttatcgtaggttgtgacagaatgcctttttctcttgctgcagggtccttgtgggcgcaccaaaggcagattccaaatacagcccttcagtgaagtctcctggggctgtgtttaagtgccgtgttcacaccaaccctgaccggagatgcaccgaactggacatggctcgaggtgggtgaccattactgctgtggtggaaatgggttctgtacccttataccttgctcttcttcttcccaggatggcctgatcattcactcacccatccatccttccctccttccctccctccttctctccaacaagcatgtattgagtacgtaatagttattaagcactgggatacaccagtgaacaaaaaaaacaaggatgctgccatccctagtcccataaattagtgggcaaaagagatattaagacaagtaattgagagagaaaagaccagagggaaggtgagtatttgatttaatctagataggagggtcaagaaaggtctgggacctttcgacatgattagaaggatgcgtagtcgttagctgggcaggtgcaggaagcacagccttcaagcagaggtgccatttggaagcacagagcgaggttgtgcagctggagagggagccaggagagtggagcacaggagggcagcaaggcaggctggggccaggccacgtggggcctagcaggccagggcaatgtgctggaattttattctgtgtgtgagtggggaggccactgaaatcaattttgggtattacattttaactagggaaagatatgatcagatggatgtttttaaaagctcactttgcgctgggcatggtggctcatgactgtaatcccatcactttgggaggctgaggtgggcacattgcttgagcccagaagttcaagaccagcctgtgcaacatggtgaaagcctatctctactaaaaatacaaatattagctgaacgtggtgatgcatgcctgtagtcccagctactcaggaggccgaggcaggaggatcacttgaacccaggaggtcaagggtgcagtgagctgagattgtgccactgcactccagcctgggtgacagaactgagactcttgtctccaaaaagataaaaaaataaaataaaagctcactttgatctagcagaaaatataagatctttggaatcagatggttctgactgcattcaaagcccagctgggactgattgggaatgtcctatagcttcttgggcctcagttccctcaccttcaagatcaagactaatatacctacctcgcaaggatggtcttgagaagattaagtgagataatacaggtgagtacacagaactgtgcttggcacatcagtacaaaggaggtattttgttataatcatgactgcaagcatttctttctccaaagtctttttgcataaagattttctaatttttttgttgttttttgtttgtttgtttgtttttgagacagagtcttgctgtgtcacccaggctagagtgcaatggtacaatctctgctcactgcaacctctgcctcccaggttcaagcgattctcctgcctcagcctcccgagtagctgggattacagtgtatgaccatcttcggctaatttttgtgtttttagtggagacggggtttcgccatgttggccaggctggtctcgaacttctggcctcaagtgaaccgcccacctcagcctcccaaagtgctgggattacaggtgtgagccaccatgcctggccaagatcttctaattattttttaaataaagagttattgtgattttctttagcagaaaaagaggtttgtgaactgtttgttactggtgcataacaaattaaggagcttacttcagaacataaatcaaggccctgcctctttccatgagaaagtcttgccatgtggttgggtgcagtggcttatgcctataaccccagcacttcgggaggttggggtgggcggatcacttgaggttaggagtttgagaccagcctggacaacatggtgaaaacccatctctgctaaaaatatgaacattagtgggatgtggtggcgcacacctgtaatcccagctacttgggaggctgaggcagggcaatcgcttgaacctgggaggcagaggttgcaatgagctgagatcgtgccactgcactccagcctggacgacagagagagactgtctcaaaaaaaaaaaaaaaaaaaaaaaaagaaagaaaaagaaagccttgctatgtaaaaaaacagttgtctggattaaacagtatagtacatagtgatggagttgatttacattttgtggaaagttccttatttcctcatagggctgtggaccaccctttgaaagcagccagcagaacatcactcctcaacccaagtctggctcttctcctctttctccagggaagaatcggggcacgtcctgcggaaagacctgccgggaagaccgcgatgatgagtggatgggggtgagcctggcccgacagcccaaggctgatggccgtgtgttggtaagtccctcctgggggtgctgtgggaagggggtggcactctgagaatgaatgatctgttaggaaggctggatggcatggtgacaagtgcatggctttgaggttgcttattctggactactgcttagacaaatgacttatcttcttattttctttatctgtcaaatgtgaataatgtctgtcccaaggtgctgagatgtgactattgaaaaataaaacatatgtgaaaagtgctttgtacatctcattcattacataggtatttgtgtgtgtgtgtcttaaattgaggtataatttacagtacacaaatcttaagattacagtcttgattttcacaattgtacacacctgtgtaaccatatgcccactgagatatagaatatttccatcgtcccaaaagtctccgatgtccctttccagccaactcctctcacctgagacaaaccacagctgtgatttgtataatacattacttttgctttttctagaatttcatataaatggaatcctacagtatgtgctcttttatataagacttctttcactcaaaataatattttctgaaattaatccccattgtacgtatcagtagttcattcctgtttatctctacataatattacattttatgaaataaatgttatttttaactagttatttatcggacctccaaagcacctatgctgtattttgatccgtaggtgctttgagggagatagaaagaaaagtctttgcatttgagactcctgagatcctggagttgtgctgtgcagtaaggtggccaccagccctgtgtccttatttaaacttaaatttatccaaattaaactagaaattcaggtttttagtcatattagccacatttaagtggctcaataatcacaaatggttactggctactctattggaaagcagagagagagaatattttcatcatcacagaaagttttattagactcaacacgaaaggaatttctaacactgcagaggttttgtttttgtcaatttttcctttaagcttttctatgaggtataatactaaagcacttaacacacccagctgtgagtgcacagcccgatgggttttcacgcatgtacacttatgcatccccattgccagtactccggaaggacccctgcaccctttcccagtcagttcctctgcccttggtgagtgaacaactattctgacataggctttctcttgcccttgacttttatcagaagctgtacgaagatttttgttataaaagcgtaagctcaagaggggaaagtaatactagctgccgcttatggagggcttcatttgggtcacatgctgcaaagctgagggtttcgtgtgtattttatcccagggaaacaggttttccttaaggcactaggcaaagtgtttttgtcccctctctaaggagcccacttttgtgttaaacttcttcatggcataagctgttaatctgaattccgtcctcagcacaattaagcatctcccccttgtcgggccccttgggagaggaggaagcagctggatgctgtcgccagcatggtgggggcctccctcctggaagccgttgtaggtcctgcacaggctccctgagcccgctgtttgccttggtttccagtcctttcatcactgtcatggctggccctggaccctctccaaacttccacattcctccaggcatggtggcctgaccctgactggacaaatgggccccagaggggctgaacccttgtctgccattctggggaaagaaagggaagaagctgactcatctgtaaatcaaagggtagcccaaggtcctgattcagaacaaaaaggaggtggtggccccgtggcagcataacacaagatgctcttaagggcatcgagcctagagtcagagtttgctcctgtgaaaatatttcctctctgcaaggaaggataacctctctgtggctgagggcttgtttccagaggggcaagacagaattctgtgttaccacagatcagtatcacaaaggagtcatttctggggacagtgaacagcaatgaggaccacagggaagatttagcaaagggagccaagaaggcagcactagagcatttgtggataatggtgccatggatagtcctgtctaattaattgcatgcaggactatttttttaatgttttatgaagttattgcatcatccactcagtaagccactgtatatgggtgctgggcaaagaggagcatctgacaccatctgctttccttgtgccttttgtttgtttttctaattgtggccaaacacatgacataaaacttaccaccttaaccattttgagtgtacagtagtggtaaatgtatggcacattgttgtacaacaaacctttaaactttatcttgcaaaacttacatccattgaacaacactctcctttttctccttcccgtggttcctggcaacattgtatttctattaagagtttgactactttagatcttatgtgagtggagtgtggtgttcgtccttttgtgacgaacttacttcatttagcataatgtcctcaaggttcatcatgttgtagcatgtgaccggatctccttcctttttaaaggcagaataatatttcattgtatgaattcaccatgttttctttattcatctattgacggacatttaggttggttctatctcctggctgccgtgatgaatgctgctataaatgtgtaccaatatctctttgagatcttgttttcagttctttggggtatacacccggaagtgggattactggatcaaatggtacttctatttttaatttttaagaaacctccatactattttcccaaatggctgcagcattttaagttctcaccaacagtgcacaagggtttcaatggctccacgtccttgccaacatttattgttttcctttttttttttaaatagtggccctcctaatgggtgtgagataatattttattgtgattttggtttgcatctccctgatgattagtaacattgagcattgtttcatcatctgcttgttggtcattttatatcttttttggagaaatgtttaggtcctttgcccaattttaaattggattgtttggtttttattgttgttgagttatcctcatggcattttgcacatgggcagtcttgctaggaaaggcttgtcctaagtcccctctgcccctgccccactctgtcctcggcacttctctttcttcccctgtatgggctctgcctccttcgtgaagcctgttaagggttttctggaacaagctgagcatcttttgtgtcattaggaactcaacatcatcttattacttatattgtgtgtataatttattttgtggccatatgtccccttttatggaagccacttggggatagagaccaaatctacccactttcattctcagcatctggaggacatctctctaaggaatggcatctgaaagtgtgtttgaataatacagggactgagggtcaatgttaaaacaattagaaaccaaattagttgccatcttttcttggtggctgattctaagtggctgaaggaaacaccaggaaacattctgtaaaatgttccttggaaatggcaggcaaaaacaagatacagtgagtgtccctatttacatttggaggtctcatagccatttgcttttttctttaatgtttcaaccctacctgtcagagctttctgggaggcaagtatttacttttaaattaaaaatgggaaggatatgtgttgttcaggtgcattttgagaacttgagaagtgcctgggggtgtaggcaagagaccagtatccccaaggagcacaatattggattccaaggttgggtttgaagagggagaggtgggctagctcttttgaaagtggtgtctggtgctgatagaaaacctaagaacaaatggagaatttgaaagctgcaatggggcgtgaaatgtctcagtgaccaaaggcattatgtggaccatggacccagcaaccagctctggcaaggaccagattgtcaggctggtctggcaggttgaccttggcttagtgcctgcccatctcagctccatggacactgttgcacctcccaggttttccccagaaacaaatgatactggatgtaaagatagcatcaggattagaggcaagccccttcccttctcactctctcatcctgagcttcctgtgtgcagacgacattttaagaaatgagcggggaggggaatcacttcttgaaataaccactgaacaaactctgtataggcactgactgctgctcagactttggaggacaactcaaaatgttcaagtctaatgtcgccccttttcatcagacttgccaaggctcagacaacaaataatttaagcttctagattatttttgtgcagaagcagtattctctggttctctttgtcatttcctttctaattatcagggctgtccttatctgttcagtgcttcccatctgtccatttttttttttcaaagccacagggtacatttttgcatttacttctgttgctctgtttcctgattttttttaaagtgaactttttattgagctgtaacacacatgcagaaaaaggtataaatcatcaatgtatacctcaataaattttcattaggtgaacgtcctcagaataacattttcacaccccagcagccccttcccaatgcccctcctggccacttcctcctcggttggggagcttcttaggggagtctcatggcatctcagcctctctgtgatcctgctccccaccacacaccattcttagcagccaggcccagttgtggccgtgcactgtggacctggatgcatgacaaaggctttggccatctctatggcaggtgcgaatgtaggagggttggcagggactgatgtgcctttgtggccgaagcacccggaaagtgccattacccacctctaggagggatgtgttgtttccatacaacaaaaaaggcctttgaaataaagtgtttattttctttctctttttcctcttttgggaggaagagcaatccttataccttgaaatgtgtcagattctaatatttggagtgggacaaggccctccttcccctttcttatgattagttgaaatctgagtttgagcaagtcttgctgttttcagagaatgctctccttctcctgttcttccctcacagccgaactcatttggagagattgatggagttactaatgctttggagacagtccctaggaatttttttaaaatgtagtggtcagattgacatgtgtgtatatataatgataatcaaggctaaacacagtcttctctttctgtaatttatattcagagacactttgcattgttttcctacatgaatccttcctttgacactttgatctctgacctcccagaatgcttttagtttagtatgaaatgcaatatttggatcttctaggaattttccaagatcaccccttaaatagtttatggcacttaaaaaatgagacaatacaccagacattaagtacagcaaagccttcctataagtgtcagtgtgcagctggctatcagacagcaccatgataaacatccgcctcttttcacagcccctccaactcagaaatacaataaaacatggtcaacccttgaagccaagggctttgctaagtccaaaaacttagcaaaaccaaaacataactgatttacccacaaattagataacaataagtgattcaagtttgcgagccataagaattgagtcagaactttaaaaatcaattatttagcagtatggagtgattatttacttagtgatatattttttatagttctctgcctcatatcatttcagtctatttagaaacctgctattttagcacaaaacaatatcaaggagaggagtgaatgtggtttgcagcagaaaaaataacaatagattgttttctgtagtttaatgtcatacgacaagaggcagaatgtgggcaagctcaggttttgagagtcattctgagtgtgtcctcttttgccattgggcagagagtggccttgtccagggccttggtggcagtggcttgaaggatgaagagcagagagcttagaaggctgtgatcttatcatagaatgatgtcagggagaaccaggccccaagagccccctcactcactcggtgacgtggggcattccattcgaccccagagtggttatttcacatgtcctgggacatgtggcaggggggctgtaaagaggataaagtcaccaggcctgccccagggggtgggttttgatggcctctcaggtaggaatgagaagttttaagatggaaaatgcttcatagtgaaacaaggaagactcagaattcctggattccagtgctgtttgcagcacttactagctctgccacttaggcaaagcactctttgatacatggtgctcttgtacagaaaatgggaattctaaagacacctctgctcaccttccaggattgcagaagaggtcagaggtaggccataagaacgctaaatgttatcacttacgaaaacaatgcgtttgagggaggcaaaccaagatgttaaaaactgattattttcaaaagcaatattttaagaaaatgcattcactggctggggtgaagtgaactgatatcagaagtgagtagtgaatgcccaggagaagtggaacgggctgggcagggtagagtgtgtgcctctgagtaagcagctcggctcttcatcagcacagcagtgacatctggatgtgcagagacatgcacgggaactggggccactgtcatgtccaagcagaaggcaggggcatgtttagtgtggcagaaggacgatccaggcctgcatcctggctgctggcactgctccagtgtctgttagcagagctgccctgcctcatggtgtcttgcgtggcttcgaccctagtgctgagaggctcctctggagagctggccaatgcatctgtccatcttcttcgccagtatgcggagctctcatgcaccccaagacccttggccatgaaccttccttcagctttctcctcagagaggccttccttgacctgcctggcaaaaccagccactccctggcatgagggaactttctggtgagatggagatgttctgtgtcttgctagggccttggtgacatgagtgtgtacatttgtcaaagctcatttgtgcattttgctgtatgtaagtttccataaaaaaacaactctccacacacatttacttctagttaatgagatgcatgctgaagtgtttctgtgggtagaaacatggttgaatatcagccattcctcccttccctgctgtctccacatcggttcagtcccttgggcctgtcagctctgaagccacccccgtcgcccatctccactgcccctcctggtccagacctgcatcatctctcacctggtgttcatttgcacttttgccctcctgcagtctccaccaagcagccaaatggtctttccaaactgtcacttggatcatgcttctcaactgtgtaagactctccaccacttcccattgcagatctgctgaagtcacagccattcctacgtccccctgtggtccaaccttggccgcctctttgatcttatctccttcccaccatggtcactccagaccggcctttctttctcttgagcctctgagcctttctcacgatgtatcctttacattctgctatcctttgaatcctcccagaaccctcttcccctcatgcttcaggccttcccgacctctggtggaaactatccttcccactcccagattctctattctataaccttgtttctttccttcccaatgctcaggactagctacaattctcatttgttgatatatttatttcctgtctcctagtaggctcccagtggcttgttcctgttcatgcagttttctgatgcccagaaaagtgcctgttatgaaggtgtggctttctggtccctctgctcctctcttctcccacagaaagaaacatctggcactgacaggagtctgctttgtgatcttttggggccaactttcctgctctcaactgctctctatccctttaggcctgtgctcatcgctggaagaacatctactatgaagccgaccacatcctaccccatggcttctgctacatcatcccctccaacctccaggccaaaggcaggacgctgatcccttgctatgaaggtgagcatggattgatttttcctcatccccctacccacctcatgccctaagcccgccttcccacctctatgcaccaccagctgaacatttccccagctttccacatgctcatgatagggcagcactgtttgctcccagatggtctcttggtccccaaggccctgcccagagaagaggcaggtacagagggggcagcagtcccaggcctttccaaccctcacctgacttggctgcagagcccacggtgcttaccaagcattatgaagtctcagggaccgaaattcaccaagcctcagccaagtgacctaacagctgccttggttttctggtaatgccaggtgctgtgttgccttgggaaacttaccttctctctctggacctcagtttccttgtccgaatattcagtggttggcccagatgatctctacagccccaggcagctccaagtcagtcattaggctcccacacagcttctggctgcactgtggacagatgtcctgaggctggggggagaggagacccaggattcataaagcaacagctggacagaaacctgacactctgaactttcagcatttcatgacatttgaggtctgactttccttcccatgtggtcctgcagcccaggcagatgctggagaattgggcgcatcctgaatgtggttttaagagctcctcgccaaggggcacttggaaggaaaatgtatcctctcagacttagaaccttcaaatgcctgggcatcgaggacagtcactaatagtgattgagtcagtcactatttagcccagtcgaatctgagctttaagcgttcagaaaacacggttattttcttcagtttgatagctcgtagtttcaagttttctcagcctaattttgggtaagctggaacctgctccttctgtaagtgctggactatttatttcttaattcccctcctactttatttggacagaagtctcactggcttatgtccacattgcctttgggcctccctgggttttcctaggtttcaaattttgtggacactaaaaaggattcatgagaaacactatatggacactgggacccttctgggtactgaggtgacacaggtagggtgctctgggaaacgtcccccacagaagagccagcaagatctctgcaggaggcacaaaccctctcccctatagagtgagccttcctttggtttttctttctcctctgtatcagcatttgatcagctctggctgggccatgtagggaaatgaaactctggccctgtttatatctgtattgtcccaaacagaagaagaacaaacttcatcttaaaaatagaggatgatataatcaatcaagagtggagggatcgttggtttcagaaacgcaaagcatgtgtcaagcctgggtttccactgccccagtttactcctcctttttcctaaggaagaaaaaggaaaagcctctggaacaaccggtggggcagctcttcaggctgagaaggagcgatgggctcagcagggtgatggaggcagtgattgttgaaccatactagttatgcataggaccagtactttggttttcccagaagatgacatgttgtgacagggacacatgatggtccctgatgattcctctatatataccacaagcacaaggacagccctctgaagagggaggtggagttcaatgtccatgtgtacgcaggtccacgaggctcataattctgcattactttctattaagtagctgtggatcatcagtaggccagtgttgatctgaggtctttacacattctctcatctaatcttcccagaagctgtgaaaaatgtttgtttcttttttttcttgggtctgattacaggtattttattttggaaattgttctagaagacaccagtgaggcagggggaagtaagaatgggaagggaaggcagcccatggaagatgtactcctcagcacgttacctgggcgagtgggtgcagtctctggggtgggtgctggggccagtgtggagcacacatctagagtcctcctgcctgagggctgaggggaaggggcttcctccacctggcatcctgtcctgccatgtgtgtgggctgggaaagcctccaggacagaggtgctggcaggtggcagtcaggccacatcataggaacggtggtaggagctggggggagacaggtgggatgcccaaaggccagcttctgtgttgtcattctcctgtgacaggagtaagtggagactcagagtgtatgtgaattgccccaggtcactcaaacaataaatggtggagcaggattttgaagctggcctctgtctgactcagcaaaccattttgtgtcctggtaattaatggtaatttctgttagtttgttttttagggtttctaatttaaatgagaagtaaaagccagtcaacaaccctcacaaagcaagaaagggtgactgaactatcccaaaaatacaatggacttaatgatggttaaatggaactggtgaagaaattagcaaaatgattatgcccctgcccaatcttccttcccatgggcgcacacacacttttatatgctaacccattcattggcccagggtgggaaataagggatggatggggctggcatgtggagtattggggtgtaagagcagccccttagaaaaatgggggactaaattgaaagtttctgtagttcttggccctgtaagaggagaggggtagaagatgctgagtatttttctagaagactggactggacgggtggggctgggaggatgccggccgtagtgagagggctcttgtctgtgctctgttggctttaggcatctccacctccctgttttgtggtttaaactagacctactatggcttttaaggccaccattatttcctcaatgtggagaaactcagtaatgcaagttctctgttccacgttaggggtcacattatggttaaagacaatgggaagattttagagtttgacaggacctttcagataccacctagaacagcctcctgtctttcatgaggtccagagaggtgatggcctgagtttttctttctaatctgttattcacatgccacacaatggagaggcagagtagcttggtggccaatgcacagattctggacacagactgccggagttcaagtcccggctctgctacttcctcttattaacagtgtaatctcagatgggttatttaagttctctgtgcctaaccaacctcaagggtctatgaagaggactgagttaatgcttctaagtccttagaacagtgtctggcatatacttgctaatatatgctaagcatatatatactaatatgccatgtacaacatactgtattctgagcaagtgtttgttaatcatcatagggtgactgacttgtgtaccgggaatagaatccacttaatcttaagtacttgttagttgccagatagacaaaacccaagtgacacagttccagctaccaagaagctccccatctacaggggaaaacagagaggggacagggtgttttaaaagtgggagggccgtgtggagagagaatttcctgccagtgtgtactgctggagcccgtccccaagggcttgagctgcatccaagtgcaaggtggcattatttcattttacaattggaaaaactgaaacccacttaaagtctgcaggctgttgagactatggaagagagggatggtggaaattcgagactggtcatggtggtgggaacagggcaagggaggagggggacggctgcctctaaacccacttcttgtgggatggtggaaagaccgtgggaggggctgtgggttgaggacggctctgctgcacttctgcccctttagcctcaggcctgtcacttggcctctcagtgggagtcgatgctgtgatgcctccactgcatttaccgctttgggttatggtgaggagctcccgagaaaactcaggtgaaagtgctcagcaaggccacccattgttctataactgtggcctcatggtaagtctccatatgggccagctgtgctcctttacaacattggaaggtcggtttggttgcagagactctaaatatgtggggatctctccaaaatgtctcaagcttttgaattcttaaaaaattggtctctggtttggcactaggacatggcttctcaggtgcttcctgtttctggttggatgggaaaagctaccagaatatcctgttggaaccaggaaaaacagaggaaatgggaaataaaaatgaatttaggacataaactcatggagcatatccttcagtcagtttagtttgtgtttgtctgatgtgagaacatcattacctaccatatgttctttggttttatcagaatgtgtgagaaaacgagagctttggtgggacgatgtatagggaaaactacttgtaaattaaagggcaagcactataaaacattaattactattaaccaagctatgatattttaggactccgaaatgttaagtcaatgcatgtgataaaatcaagtacagagatttctttcatcctttgcccttgagaccactgaggcaagaagccggaacttagcaggagtgagactgcaaacaagttgtctttttattgtgaccgaaaaacctgatgagtgtggaatagtttgggagcagcatggcaaattaacaaagcctgttcaagattaaactctgagaaagaaatgcaagaggtaattatgatgccatggtatgttagacctaaattgtggaatctggctttactactcacttattgctatgattaaacctatatgctcctactttctgacttagtgaccttaggcaagctccatgagcctggtgccctcatctataaaatggggagattaagatctacttaagaggtatgtgaggtataaagtgcctaccacagtgctcagtcgagagtgaatgctgctcattgccttcaattagaaaatgtaaattttctaattaattttcaagcaacataatagtattcttaaatattctcagaaggtgtctaacatatcctgttttagtgactagataatgaagggtagaaagctggatattcctaaaatgattttaagagcccttggcaagttataatttctcaaatactgttgaagatcatattggcacaatttggttggtaagtgttccttccctctttttgtagatgacctaaaactttaactcatgccatgtttaaatgttcttaaatttgggattgttgaagtctgaattttactgtgctttaaaattgtgatggaaaaacttcctatggattccaaagatttctgtaccactctattatcagggaatgactggcttttatttctagtgtgtgtttgcatttcctaggacagtgatcatttccagggaaggaaatagattacccattcaaaggtgaagatttttttcccctttaatgttaaaagtggtctccacaagggataaaaatcaacgaaggtccatttacaaatgaaaaggaattggggttttgttgtatttttgttttgtttttgttttggagagaaccataaaaggctaagttgatccatttaaaaattcaagaacaagcctcataaatttttattaaataaagacctctacatttacataggattttatggtttccaaggagctttaataaacatatcttatttaaataaatagagcaaattaaagagaagaggatgcagttgtacattatggccagttaaacagagagggattctgagggggaggaagggagggaggccccagaggacagccatggctgtaaggaggaggccagaggtctccagcagggcctctctggggctttccaggtttccttggagccaagaattttaatcttgggcaaacctgtctcctatacttcaaacgtgtttccatgtattacgtggaattatagactacctaaactgcatcttttgtttctctcagaaaaattcacagattcagattcacctaatatttattgagcacctacctggtgccaggggttgtgctaggtacttaacatttttgatcttactgagtaatcacatcattctcagataagtattcttatccttgttatacagatgagaaaactgaggcccagggagcttgatgaaggtcacaggcttattagtcagaggaggggttgacggcttttaagtgtgtagtaggtttctttgtagctacctgttctgttgggatcctggttttcttggtgattactgagtgctgtggcctatcacagaaaaaaaagtcatattttttttcaatggcataattttatgaatttttgggacactacactatagacttgttaagctatgtttcagttttgcaattatagatacactctgtagacaagtcccagtaggtacagagggcagacgtgggtcctcagactgataaaatgtagccaggagaccaatctgctctagtctggagtggctgcttactgggaacatttggtttcagtatctgcacagcagtttgtctgtccatgctttggtgccagttatttcatgagtctttttatttttattttttggttatatagatcagaggtttccgtgttgcccaggctggcctcgaacgtctagcctcgccttcttatgcgccaggacaacaggcctgagccactgcagctccctatttcatgagtcttttagctttggtcccaaaattgaattctgctcagttctgagctggggttctcactgaaatgtgactgtcccatgttcagggtcacttttttttttctgagagtagagcatgacataatgcatagtaagttgcatgtctatatatacattattatgtgcctgtattattacttgctgctgaagtagggagttggcaaaatgggttgctaagttctaggtaaagggaacgctttaaagattacaaaactccttttttggtaatattaaaaaattattggccaggcgtggtggctcatacctgtaatcccagcactttgggaggctgagactggcagatcacctgaagtcaggagttcgagaccagcctgaccaacatggtgaaaccctgcctctactaaaaaatacaaaaattacctgggcatggtggggtgcatctgtaatcccagctacttgggagggtgaggcacgagaatcactggaacctgggaggcggcggttgtggtgagccaggattgcatcactgcactccagtctgggtgacagaatgagactctgtctcaaaaaaaaaaaaaatattgtaaaaaataaataacataaaaattaccattttaaccatttttaagtgtacagttctgtagcattatgtacattcacactgccatgccattatcaccaccatccatccccagaacttttgcatcatcccaaactaaagctctgtacccattaaacatgaactcctcattccctgcttcccctagtccctggcaactgccattctactttgtctctgaatttggatactctagacacctcatgtaagttgaatcatacagtatgtgcccttttgtgactggcttgtttcacttagcataatgtcctcaaggtgtatccatattgtagcatctgtcagaattttcttcctttttaaaggaaggaatatttaataatattccattgtatgtgtgtgccccacatttatctattcatctgtttataaaacattttctttggatgataagaatgttttcactggaaatgtgctttgtgaagcataagggagtggcagaagcagatcagaagttgggagccttgctcttgggtcctgatgctgaggctaatcagcagtgtagctttaaacaaaccacttgctctttctgagcaaaaatattccatttgtaaataaatggacagagttagagttattaggcattccctaaagatcttttccccttttaaaatctttctttcatttaattctaagtttctggctttatgcactttgtgtttcatgcacaccatagcttagtcatcagttattttcataaaatgttctcgcttcctctttaacctagctgtttaatttatttacattttttcccccatttatatggtggtcccttgtaaactgagggtagttttattctctcttcatttttctgtataattgcccttttttttttttttttttactagagctgtgtctgcccaaatgcattgtttcctgtattgtacaattatcagttatttagatttgccactctgttagaaacaaaatgcttgttcctcagtgccacaatgaaatagcacttgaacataaatttaattttctcagcaaggcaatttttacttctactgaagcgtgcgacttgtggatggagtaatggtgagagcacacctggacaggggaggggcaggggttcttattcctgttgcaggtagcccctactgctgtgtcgttcccctatttcctggggttcaactgcatagtctgagctaattccaactggctgttttaaagagagcagactacgatcctgagtggcggggtgagtagtttggtgggaagggtggttacagaacaggtgactcaggatgatttgggtcagagcaagtgaccaggggtgactcaagatggagcaggtaaccagggtgacttaggttaaagcaggtgaccaggggaacagatctgaactactgattagaactggcgggaaagttgtttactgaaactagaggcaagggggccaaagagaaccaggaagttaaactttaaaatggaaaatcaaagaataagagagctgaacatattgacatactgattctttgaagagaaacttggaattcgctataacaactccttggtgaaattcagaataaagactggcaagctatttttcccccagtattttatttcagagctaagctaaggaactacagaaaaataattgtaaaattgatgtgttaaaaagctttgaaagacagaactttctcaaatgggtaatatgaagggagattattaggaagaatatatgttatgctgtatgtgaatcttgatctttctgtggaatggttttatcctggtcttttggaaagggtacaggaagtgaccccacccgattggtggtctgcttgaattacattcattaatgtaggctccatgcattgagttgcggattgtgaacatttggaaaccagtattttttttcctctctgaattgccttctgtttagacagggcttaataaaaccagcagctaaaccaaggaaaatactcccatttttagaatggaggagccatacgacttaatgaattaaagcatgtaatgcaggccaagtaattcaaacccacccatggcaggaagagttccacaacctggttccagctcctctaagtgacttctaagtccccttgttcaaccctatcttttgggtctcagatttggcttcccccccgctttttttttttttttttttgagaccgaatctggctctgttgcccaggctggagtgcagcggcatgatcgtggctcactgcaacctctgcctcccagactcaagccatcctcccacctcagcctcctgagtagctgggactacaggtgtgcaccaccgcatccagctaatttttgtatttttgtagagatgggggtctcactttgttccccaggctgattttcaactcctggactcaagtgatctgcctgcctcggcctcccaaagtgctgggattacaggtgtcagccaccgtgctggccagcttccccaaatgtaagggttaggtttgttacagtgcctgtgagctgctgtcaggcaaagcctgcttttcccctgcttctttgaggtggataaatgttttgttcagtagtggagagggcactagctattgtagtcctctctgcagggccatgtccctgggggcatttggagaccaagtagacatgcccaggagcagccaactgctgggccccacggcctttgtgtttgtgcaggaaaagttcttcctgggaacacaggagactggaggtcacccccaccccttcccaggtccctccaccctgcacttcctggacttgtcaatggagggagggtgtgtgacccaggcttgttggggatgttgtttgtggggcagccccttgcctctctctgcgcctacctcacttcccatagctttgtgatataggctgtcctgccatctcaggtctagacaagcaaaatcaagttgtatttttaagttttttagatacgagtatggtagaataaccctatgtacatactctttggggaagaaaggctcgtacatgaacatttagaagatggattagggagaaacctaaacctgccctcttgacatatatatgaaggaatcaggttaaaataatagtagtgcccttaactcacagaaatagcattcaaaggagtgaaaacaatggaaagcatgcttgtggcctaggctgtggaaggtgtggaatgtgaaactgtctaatccaataacacccactaactttcctagactagagttgccaggccccacaactgcccccaaagtgtgtgtggcagggatcggataggtggtagaaggattagaactggattctactctaccttgaagggattaatgacagtcacagaagtttctgggaggctgggacatggcctgctctctgatctagatttgattataggagccagtcaggggcccccattgtttgattccttgccctagagcatcctgagaaggcagcttagactttgggtttcagaaacatgaaagtcagtgatggtaccgacttccatgtgtgtcccaggccctcagacctctggtggggcagtcccagcttgggaaggcggaggctggcctgaaaacagtgcttcatgctgcctgaaacaggggtgcctttaagggcttccccttgctggccttcagcctgggccagaagtggggtattcttagctcccagtgaggctgtcaccacctcggaaacccgaggtcctgctcccaacatagaccacaccaagtacagtttggggaggaggcactgaagttctcaaatctcccattttttggagaccttgtcataaagagaccttgagactgctttaaaagatgaaagagtcccacacaattcctattcatgtcagaaatttatgaggctgaactggtggtgtgtcttgcactatagtttcattcagctcatggggtctgaatttcctttttatgtttcattttttcaagagttacaattgggtgtttagtctctagagtcagtgggatggatatgctttttgccagacttttcacatttaatatgtaactgtttgtttaggttgagacattttgatcctttttgccgttgtgctatttgatgcaggatttattattaatttgtattatttcttgctattatgaaatttgatgcaggatttgttcattgctttgcactagtctcactcgcagccctggtgcaagattctgcagggaacaaacaagttccttttgtcactggactgctttctggcaggtctagcagttgtccttataataaccggacaaggcgggagaactgattttatcctgcatggaagaggagtaactcaattgacattctttgtcatttagcagtcagttaatggccacttactggaaaatgttactaggctctgtggtgagtgttgttagaaactgaattactctgtatatttccccagggccctttttccccttgcctggagtagacactcagaacggcaggaagtggcactgtgttgcaatcatagtttcattgttcctttgtattttgcatttcaaaaataatgatattgcttttaatggtaccagagacttgccaggagcccagggggtggtacagggtcactggggtagccccagcctgagggtgcccaggagtggtctgtggaaggtctccagcaatgtcagcctcacatgtgattaatttgagtcactgtgaacatctctccacctccttgactttacccatgaaatgatttccaacatccagtcactttcctgggtatttttagtcactcactttgcagaacctttgatggtctacagaagtgaaggaatgggtttctaagtccaagctgaggtagaatcctggcattgccatttactagagctgtgtgaccttagacaattcacttaacctctctgagcctcaatattcttacctgttaacaagtggggatatgggttcccagggatgagggaccggtgaaatgatatgcctggagacagctaacacaatgcctggaaaatgctaagcacttgtcaaaagtttcctacccctcttccttgccagcttaaaattataactgcagcagcagaacgcccccatttgttgggtagcagtgttgtgagctgagggggtggaggagaaaagcttatctgttagttttctttccacctggagagatcttccccctttccttccacacagcaatagtgtaaccgaatgccagagcagtcccttcttcttgcggtcctctgtggacggcttgtttctttttggatggtaggaggcatccaaagcctcttttagggaaggttggtcttcttccaggagactccacactgggatggccacatcattccatttctgggtcacgttttcagctccttgggcctgcaagggatctctgtcccttctggagtaaatgaaataattgtcactagcctcccacttaatgactgtggctattgctcctctttctcgcacacgaggggaggaagtctgctggggcactgggcagcctcccttcccgatggcaccagagcctggatttttgaggtctggtggattcctgagactttccttcctcaccccagtctggacagcatccctgggcccagcctgccgcggcactcgtgggaagtggctggctggctctgctggctccacgcacagctggcatacactgacatggctgtggtttgcttctctctccttccttgcccctagagtataagaagaagtacggagaggaacacggctcctgccaggctgggatagcgggcttcttcaccgaggtgggtgtctgctgtctgggcatttctgttctcttgtgggtgttcatttccttgcttatatgattttggcaacccttagaggtgggacttctggagtcccagatacttgagcctcgagggagcagattctggtcctcacaccagaggaggctatttctacctgccaggagggcaccagctggccagagaccactgggcagaggaggtggggtggctcatctcgaggctacccctatttgatgatttttgtaggagtctgcttgactctgagacctggggaaggagtcgatttggggatgtgtgagtgagatgacattcagtcaggttgtgccccatcattggcgactgtgcagatacatgaagcgtgtgagcatcccctcctagcagccttctctccttagtggagagacttgtttgtttttcgagacagagtcttgctatgtcactcaagctggagtgcagtggcgtgatctcggctcactgcaatctccgcctcctgggttcaagcaattctcttgccttagcctcccggttataggcgcccaccgccacacctgtatttttagtagagacggggtttcgccatgttggccaggctggtcttgaacacctgacctcaggtgatctgccagtctcggcttcccaaagtgctgggattacaggctgagccaccacacccggcctgagagacttggttttacacacaactctaaccattccttttcccagattcagaaggacaggacacctgcatgcttatgtgcccgtgtggtagtagcatgacttttggctggtagtacatttttagggactgttttcttgtgtcattcttacttactgtaagtttgcccttcgtatcagttcctcctctctcaaacactttcatgactgcctgctggcactgtctatccatgtggttgctcaggccaaaaaaagagtactttttacttctaattcatctgcagtcctgttgttttagcctccaaaacacatcccaaatatgacagcttttattactattacaatcacctccattatcaccatcatgcttctagaaaggccaccaccatcacctggaggtacactggccctgattggtcttcttatgtctattatgcttttttaaaaattgtggtaaaagatgcataatataaaagtcaccactttaaagtgtgattcagtggcattagtgcattcacagtgttgtgcacccatcaccatgggctaggttagaacactttatcacccagcctgcatccattctgacctgtgaagtgtgctttctgcatactagccccagggtccttcaaatgaaacccatccttctgactccgaggcttcccagtccatggaggattacaatgtaaagctcctcatcctggcccctggacttggctccctgaggccacctctctcttttcctcactccaggagagcagagagctggggaagggcatgggacatggggggtggagggaggatgaagggtgctctctggcttccaaagtgagggcccctcctgagtcaggagcaagactgcctaccttcctttcagaaactgctgtttaaatccaaagagaacatagacagttggcaatatagtgtctgatccagaaagcaagaaagaaaaggcagaaagtctgaagttttattttcactctcaaaccaataaataggagatgctaccctccaacccccattccgcaccctcagtgattcttacctcgctggagaatcatttttatgacagtcgacagagttctatgccctgggaatggcaccgccaatcatcctaaccattgaggccgaatttaaagattgttctctcacctcactctcctacttctaagccaccttgcaagtcccaccacctcctatgccctcaaaacctctaacaatgacatccattgccctccacatcctctgccaccctacaaatctaagccatagttgtcttgcttccaacccactgcggaatccttctgccgtcttgcttccacccttgcctctggacagactggtccccatgtagcagccagaaccaccttttacaaacaggaaaaatatcatggtgctcccttgctcaggactttctggtgtcttctcatcctacttagaatgaaatgcaaatgccttcccttggcctcccagccttcatacctttccaggctcatctcctacctcacccactacatggtattttcagctgctgctaggacatgccggactcccactggtggcattgcactggagatccattcacgtggctccttgtacacaagtgtttctttagaagagacactaatggaggaactgctgggtccaaaggcactcagatttgaattttgatacatgttggcaaattgcacttcagacatgtttaccagttgacactcccctgcattgcttctgtctctatcttctctcactcagactttaaatttttgttatgaaaaaacatctcgttttaatgtcactttccctgattattaatgtcatttaatatccttttaaaatattgaccatttgtatttgttttcctggaagttgcctgtttatgttctcagtacattattctgttttgttgttgttgttgttttcctggtttttaggaacttgttacatattttcaacagtaatctcttacctgatctatgtgttgcaaattttttcatcagcctttttcttatgttttaagtttgcctatgatgtctttatcatcctggcaataaacatgcacatttggccaaatctatcagtcttttttttttttccctctagattctaaacttatctcttaagaaggttattccttatgtatactgcaagttggcatgaacagctgggcaggagagtgcccgggatctacaacacatgtctgggctgaacaaactcccatattttatacttatattttcaatatacttgtatttttaatagcactttcataggttgtttttaaaaaagatttcgatctttaatctttctggaatttgtgttgtatacattgtgtgatagaaactaactacattatttttctaaatatatagttggttgttctgatactggtttgttaaacaacttttcctctccccattgaaatgccatcctgccgtgtggcgacttcactctcttcttccatctcagcaaacatttagattgtgtgacaactatggctgttgttcctccaacaggcctgtctagtattgtatgacttgagtcaataggcagtgggaaccactgtaagttcacaagcaggtgacacactggcagatggcagtgttgaaagaaaggctatttgagctgggtttgcccagaactttgggagtggaagggcctgaagggaggcctggtaggaggccgtgatgtggtaggaggccgtgaagcaacaggacagtgtagagggaggcttaaggaataaaaatgattgggggaggcagagaatatgaaggaaatgtcaaggggctgggtggccagggagctgtggggtagaggaaggagggtttgagccaggcttctggagaatggtggtgcctctggtgaaaaggggttgcctgagaaagaacccattgggagatataaactgccaagtctgctttcagacacagggagtgtgcgatgtttttagaggacgtttggacttagggactggagtcctgcctggggcagaaacttagatttggcccttgctcatgactctcttaggggatgagtgtgcttagtgtagggcatgggggagacacctccctttagatgggaggagaagctagattgatgggagacatcagaactcaacggagatgttgacagagagccgaggagaaagtgttcccaggagggaagtgtcattatgtttgccgcagcagctggcaagtcaggcattgggctgagtggaggcagggagtggtaggaggaaccggcggggcaggagtgtggaggggaagtccaggtagctgtgcaagctcagggtgaccagaagaacagaagacctgctgaaatccaggctttgggatttagaacctgagggaaacatggggtgtcagcatgtgctggctgtgctcatggtacagcaaagtggggacatggtgggtgtacagagtgtccggggagggtgggcagtggtgagtgggaaggcagcccctctgggcgccactctgtcctctgaccccggcctgctgtctcctggctactttggactttggcctccgcttcagttcccaggcttttggcctccttaaacaggaggtctttgaactcactgcctgccttgtttctggaagttcagctgtttgtggctgagcaggaaatgtggttgaagggtccaggccagcgcgactcccctcctctgccctcttgctgacctcgccacttgggcttgccttttctgtgagctgttgtcccctcccaagctggacatggatctgtggccttctggtcatagctatgttgccccaaaatattttggcctaaggtgcctgcttgacctacaggtcagtgaccctgagcttaacaaagccttcggagctatggataccacctgaattttagcctgacattgaggattagagagaatttcctgggaggtttatttatttttgtagatgaggctaacagaggtagtagatactgcttagcagcaagagaggatttggaccagctgggctggcgttcacgcctgctgtagaagcctagaggcacttgggtgggagtttgttcagcacggacttctgttgtagatcccgggcactcctgcccagctgctcatgccaacttgcagtacacagaggaaatatatggcttctcccaggcccacctacataccccggttcctctaggggttctgctaataaatgcatcttgggaaaaagctgcattgcttattgatgggattccacaaatgtgatttaggtagtggtggcctttgcttagagaagctttcatttgtgtgtgtgacattgacactggctgttcctgcatggtggggagctaagtattagtcactttttcctagcacttgtgaacagcaccagaaaggtcacaagcatcatccatagggaacagaaaaaacaactatgagggatttccaggaaggcactgtccctcccttcagcctcagccctgagggtcgcaggcttggccctgttttatgtagtatgggctgaagggagaggggtgtgagcactgggggcggggtggcgtggtgcggtaaaaacaagagctgttggttttaaaggtttttgaagacaggaattactttatcttaccctgtttataatgtttgagaggggatgcagtggtatggtaggcatacatttttcaacttttatcctgggttagtctaaatcatcagaaagcaacatatcccatccctgcccccaatgttccgaagagcctttgcaggcctgtgctgatgctcaaagctttggcctgtgcaaagctgcaggtggagaaagctctgcactgaggatacatctggggctgaggaggttgctcattaggttcttcagtgccctttgtattatatttggacactgattacaaattcctttccaagctcaaggccaggagaaaaagtctctcctctgatgaacttatttctgttttttgtactctttctagaactagcgtggtctcttatgcaggacagatgagtgtaaaaagaatgagtggatggatgctctgctgtgtttcccagtggagcgtcctgactgcagaaagctatctatttttataaaacagtgagatacccctgggaacatctggcttatcatcaacagcttccttcaaggggggtaggatctcaaaactttaaaatgaagtgctcatcaacagtcatttcttgtctacaccctcctgaattatcaaaaagcaagcctttccggcgagaatctagtggcttttcttccatctgtgttcctgccctatcctttgttaaggctcttccccaaattaaccataacacgtattgtttaaggcattgccctcttgcctgcaggctctatcctcctctctctattttttttctttaggtacttctggcttttgcagacacttgctccctgagaattcagtggtgactttatgaattgtcctcagaaattctaaatctctgcggcaggatctagcctccagggacttgtcagagccagcagcttctgccagtgcgtgggctcgtctctgcagagggagatcaacctgaaaagatctgtttctgaaatatatgtgggtgaccaagggacggggtgcaggggaattctgaaggctcaggggaaggtcaggtgggtttcagcagtgagagacttgacctgcacagcatctgttatccccatgagccttcatgaccagtatctttggagttttgtctatagctgaaagatttcctctagaaattttgttgattttaacctgtttgcatagaatttttttctgaaatactttgcacattaccatgctgtcttaccccaagaatgatctacgaagggactttatttatctttatatctagtgtgaactctgagatataatagtaggtgcccaataaacattgttgagtgaaaaattactgatttcattagaaaaataattctgattatttcttattgcagtgtcgaaactttagaaaataaaggtaatccaaaagtagggattccctgttggggaaaggaaggactgaaagccagggacctctgatggatacaagcacagcctgcctcctagctccagcacagcctctgcacaatgggagcttcgtcttaatgcttgtaaaatgtcatctcattagcatgttttgtgtttttatgtgatgacttccttgttagtgtttaatcactgttctggaattttaaaaagtcaagattattaattaaaaaaattaatacatataataaaatacactattttaaatgcagagttcgatgagttttgacaaatgtgtataccatgtcgtctctgtctgaatgaagatgagaacatttccatcactttgggaagttcctcatgcccctttgcagacagtgttcctcctctttactccaggtacccactgatctgacttccatcagtgtggattggttttgctgattctagaacttcctatgaatggagtcatttttttctcatcaacatttggtctaggattcacccatatttcaactgagttttgaatactgcgaaagggttacacaagcagaggaagtgtgagggcattgcacagatggagataaaaagatcagagggagttccgaagaccagaattagtttagagtgtcctaggcatgcagtctgagggggcagtggcaggagaagagcctaatgtggttgaaatagtggacagtgttgaattttacctgagccctgtactcttggaaaacagtgtggtctagaattttgaaaaatgcaaaggaaataaactttgggagtgagagaacaggggatgttgattgatttccattatcgtatcacccaggggaaaaccccagcagatatctgtgctgacttccttgggtgaccaaatcatttctgggaacttagggttgttgtcagcattggtgatggttctggggcacaaacatgctctcagccctgttgaccatttccccctgatctaaatgctgaagacagctgtgcctcttatgttcttgagtctttttttttttttttttttttggcagagtcttgctatgtcacccaggctggaatgcagtggcatggtcttggctcactgagacctctgcgtcccgggttcaagcgattttcctgcctcagcctcctgagtagctgggattacaggcatgtgccactacacctggctaatttttgtatttttagtagagacagggtttcaccatgttggccaggctggtttcaaactcctgacctcaagtgatccacccgcctcggcctcccaaagtgctgggattacaggcatgagccactgcgcccggccttgagtctgtttttaacagtgataccgtctattgctgccttgtggtcccctcttccagtttgtgtttttccttagttgaccttgctggtctcttggttttgttcttccatgtttgcagtggactgtaatgatcggaaaaccatgttctagaacgtccctgagagggtcttgagtgtggtctggaggggattccctggagtactagtgcacagtttcctctcgctacgcatcaggtcgggggagttgaatggtgagcctggagtccaggcagggtgcggtattgcttactgcttttcatgagtggtgttccccagaatctgtggttgaggtcaatgtcagctgtttgtcatttccttgttagagcctgatgtaaagttgaggaaacgtgtgtggtctcatcgtggatagaataggggcctggcctgtcgtgaattctgtcaccttgctcagtctcttcacatctttagtcctgataatcccgtctgtataatagattccataatgctgatgaatctggtgaaatctgtttttgttgcttagctggggaaaaaaaagttcttggtgtgaggaatttctcctttgttgtgactgtggttctcattgcattcccctcctcccctcctcacttccttctctgcttaccgttggatttctttttggtaggagctggtggtgatgggtgctccagggtcattttattgggctggaaccatcaaagtgctgaaccttacggacaacacctatttaaaactgaacgacgaagtgatcatgaacaggcggtacacctacctgggtgagtactcagggagagaacaggtaagaaaggggaaatgggagtgattcccaccagattcacaaattattgcttcattgttggaaagaggagttagttggctttgacgcctgttgttctaatgacttacatctttagccagggcatcttcacatctagctccacaaacacaaggtagagaggaaaaccaaggagggaactgaattaaaactgtatgctttaattaaaaagctgacagttgaacctccagggaaataaacattttattttctcattttatcaattgttgaagttcagatggtcaggtagaaatgagtgtgatggagtcttgattttccacgggcgtccctttggatggagtccttgctttctgatcacaaaactggtagcaaatagaaagataagaactagaaattatcatgacagatggcaacctaatgctgaaggttaattaaaggctcagaaaaatttctcttgctttcttaactcttttaatcttctggaaagaagatagacacaatttaatgtagctatcaggcagaatgacactgggacaaggtccatgccaatttaagaacagacataggctgtctttgcttgtgtagatgacaattacaagactcttttctttaatttatgccctaaatgctataattctggattgaaagcgaagctaaatttaggaaggcctaatgatgacacacaatgctctttcgcactcatgatacataacttacagggaaaggccctgactccctttttgcatagcgtcactgggaacttcttgttaaatggggttagggagtcgttgacttgccttttcccttctaactacaagttttttgcctggtagcatagacccaacaatccttctactctggggtgtttgctcctgtaggcacccagctgcctagtgctgttgcttattaagcatttaccctatgccaggctgtatgtattatttctttttaatttctgaaacaaccttatgaagtagctattattatctacattttatagataaactgaggagcaaagaaattatacatcttgccaaggtcacatggctcctaagtagcaaaattagggtatgagcttgtggtttctgagtgcagagtctaaatgctgagctgccttccctgtgggtgcgtctgagagagcacctatcactggtactgtacttctcactgggctgggagcaccttgaagacaaaatgtgggattgtgtctcacatttggtatagtgcctggtgtatagtagtaactcaacacatatttattgaatcagggaatgaagagagagcagaagaaagcccagtttggatgatgggtttggggtctagaacagctcctttgaagcttcgagcctgtggtttctctttgtatacacattagaggctcttatcagctgcagggattatcaaggatccgttcaggctttgatctcactcagaatactcttaggtactatcagtcgccagtctgagagaaatcagccacatggtgaggaagaattgatcatgatatgatgtcatcgcgaaactcaaacaacttacaatcactttagggttagagggtgatgacaagtttggggattatatggcagcctgtacaggatttatgctggccagaggagagctttcagcctgctagcaaggctctcagaaagcaggagacgttgaggctaagcctaggcaatcttttcctttgtttctaggttccttttgcatccatattttttcactgaccaccctcccacccatccacccatccatctacccaaccatgcatctacccacccacccactgacagcttcttttgccttcttgtaggagggagtgtggttaacagcaggggctttagaggcacagattagatttgagtcttgctgtgtgatctttggcatgttgtttaacaggtttttctaattctgtatctgtaaaatggaagaaacagtcatgccttcttcataaagtttttagactgaaagagatacctaaagacatgcataaaaatgttggtagcaaccttgttcatattaaccccagcctggaaacaacctaaatgcccagcaacagaataaacatatgacatatttatataacggatattactcaataataaaaagaaactactactgtactcaacgatgtggatgaatgtcacagatgttatgttgagtgaagttcaagaaaaggcaaacctaatatatggtgatagaaatcagaatagtggctacctgtgtggggcatattgactgggaaagggcatgagggaaccctctggggttatggttctgtggttatagtcacttccttgatctgggtggtggttgcatggctacgctcatgtgtgcattcattgagttttacacgtcagatatatgaccttaccgtatgaaaactatgccttgaaaagaagaaaacagatatatagtatttcatacagtacttgtccgaaagaagacactcagaaagccctctttcctgccctgatatccttgtgaacatgactttttgtgagatgagagccatttcagcatgagaaggttgacagctgccatttttttcctggtagtttatgttccaagagtagggagcatgcttgagaaacattttcctctgatggatgtttttttttcccttcccttctttttcaaccgtgtgcttggtttccgcccatcctgttcaggctacgcagtgaccgctggccacttctctcacccgtccaccattgatgtggtaggaggtgccccacaggacaaaggcatcggcaaggtgaggagaaacatctgtggaatagctggggtcagacagaagaggggagcatgctgtccctggtgcagaggtttgccagctgacattgacctgaacattctactgggtggctggtggggaggtgatgaggaaccccctgactgccccactccattggaaagtttcccttgaaagctcaattagagtgtgagtatactcacactctcgatttcctgcacactctcatctgaggtttttcacagctgaccatgtgtgtgtgtgtaatttataagactgagccctggccttatggtgtccttcaaaagaatggcatttagtgctgtccaacttcaaatcccaaacccttcccaagtttggctttgatttaatggagctaggtccagtctcagatatctttgaggctttattcatgccccaaattattctcgtatttatttccccagtgtttgagaaggaacattgggttcccaagactggttcagcccaaaggctggactggaaatatgtgggtctggctttccctaaactatagtatctgccaaaaaacccaccccctggatctagggctgcctgaattcctttgggaaacatgacctctgaggggcctgaattgtgaactacgcttgttggttctttatcatgaaggtacaggaaatccagattgagtaggtacagatggatcaggaacccacatttttaagaagctccataggttgtctgatgggaaagactgagtgaacagaggaatgaactttggatctggacctttaggggtagacctgtgatagagtctggtcatatctcccagggcttggagaagtggaatctggattctggattagcccagatgagctgagaccactggtaattggagccttcagccaggaggtcaggatgatcagggagctgacgaactttccagttgactaggcttgactaaggataatttctgtggatcctcctgggcagaggttaggagctgctgctcacgtttctggagcatgtgcctccctcctccctaacactgatgctgtggaaagaggttcttcaaaactgaaaccagataaaccagggccctgagctggcagggaggagggatcaagcaggtgaccttcgatcacctcaagaaagaggtggttctttctgagttgcatgaatttatctaagtagagaaagaagcactgagagctgttcacattgatgttgtcttcttggggaggggctgcgggctaccgggcatctctgtagaaatggtaaaaatgcctacgtctagttcacagtgatgcgggtgcctctatgctaatgatagcagctttcttttctccctaattgcagaaaacacgacccagttttatagtttttccttcagatgattgtgatgaacttcatagtccctgtcaagtcttaagatgacccctccgcaaacccctctcactggctatctggggggtgcaaggtataaagttaaaaagttgagaatggtacttataattgatagagccagacagcgggactcctggacccagtttataaagtacataaaaatgcttctttcaattagaccacctgagaggcatggggaaactggtcatagtgacaaagttgctgacaattccacattcccagggattggggctagtacagacttgattcccaaggacccctggccttcaggattttgctggatattctagtgtcagggcacaaaagcactcacactaagatggcagttccttatctcatgggaaggttatttacactggttctcatgagacactcttcccacgagatgtaatccaaaaaaaagaacttccatagtcaagtacatttaggaagttaaatgtcagtgatcgtctttgcagtggcgatgcatagttcacatgaacatgctaaaggctctaaaaagttccacagtcaaagaatttacttaatgtttaactccacatttcccaaatgaaactcatttttacccaggcagatcacatgactctaatattacgtgaaatcactttgggaaactgctttgtctacagtactcatctccacctatccctttatcttctgttgtaatgcctggtaaagtcttactgggaataaagtccaatccataccaccaactaattttaaaaacaggaataaaggaaatatttcaagaaacaaaatactagctttttctcagagttgaattgtttacttgtaatttggaagcttcttgggtcttattgtgtgtggcttttataagtattgtggttcaggagcagtggaggtgatgtctgcctcaggattgaaggacccttttttttgcagggctggtaaaatgacagctgacttcttcatgatcatcagctagcataagcacatctgctgtgcacctggctcttaagcttttaaataggactcccaggagagtgctgataaatatctttgatcattgatttcatcctaactagattttttttttttcattccataggtttatattttcagagctgaccgaagatcaggcaccttaattaagatctttcaagcatcaggtaaaaaggtgaggttcttggtataagtgactattttttatttgagagatgtgatcatgtgggagtcagtactttttagaaaattggtttgaaggccctacctgtgccctgtgtttatatggcagtgctgtctgcttgttggtgtctttaccttctcagcggtatgtgtaatctgtacattcatgggattcatactcgctttaggagacattctgtagcaagatgagttatatggggccaagttacagcacagagttttaagagattgtccgtagttcagactgtcatcaaagtgactgcatgccctgtctctctgcctccatcctttctcaacgaatctccacctccagagagagcagatctttctgagtacaggtagcaataaatgcttctcactgagcctgtttcaccagcccaacattacccccttccctaatcctcagccctcaactgtcattgccaaggtgactgttgccacacaaagaaaatccaaacacaggttgcctgattcctcttagaaccttgaagcagaaatagctcagggtgctgccctaaagttagcctgggtgagattactctgcctgggtcctccccaccctgtccctaatcctctctctgctttctgaaagtttccattatactgccctgttgtctaaaattaagccaattagagagtcctgctattaataagcaacagttttcatgagcttatcagtcatgcacttcttgtgtggcttagatcagcaggactgtttggctgagcttggctactctaagggacacaagtttaggctgggagctgtgggggtaatttggaggtcttggtggaggccttagtgggatctgggaagaagcataggatgtctgggacatgggaggaggccatgtgcctcctcaattctgttcctgccgagttagaactgctgtacgccagcctaggatccttccatgttgttctcccattcaagtagacctttttgcaattttaacaatccgaataggtacacttagtgtataattgtcattatcttttgaataaaaaatgcatcaccaaacttggttttgcatttttcctcagaatggctctgccttcccgagaactctgctggcttgtgttattttaacatttccaaaaccccaaagcaacagcactggaaaatgactgtgagccattctgcaaaagggttttccaagcacccttaaagttagaaaagaaataactctgtgctacttgtgatttacaaaagagagtttcaaagagcaagtagggtatgagtggaattaaggctaacattttagatcttctgcagaagataacaaatgggtgaatgtatctagcatggaaacaatctccctcttcccttcaaatgtacctgggtttgaaagcctaaaggtaaaggattcctttttttttttttttttgagacagagtctcactatggcatgatcttggttcactgtaacatctgcctcctggactcaagccatcctcctacctcagcctcccaagtagctcggaccacagacatgtgccaccatgcccagcaaatttttgtatttttttttgtagagatggggtttcaccatgttgcccaggctggtctcagactcctgggctcaagggatccacccaccttggcctcccagagtgcgggatgataggcatgagccaccgcacctggccaaggattatttaaaatgaattgtggagtttctgagtatctttatgttcagttgtagctgtgcccccccaaactgcttttccttccctgccctactccttactgtctgtgccctggggaggtccggttaattcctattgccttcgagtaattaacaatctgtaattgtgccctctctcctccttgaaaacctcttggtttggatgagaacctatgctcaagttgatcaggtttttgggggtagatctgagagtgggtggtgcaaggaggatgagattaacctttgagaacccacttgtctaaacttcctgaagacttctgccattgagttccaggacaggttcaggcctgaatgtctgcttggatgtccttatcataccaagatacatcaggttccctgagaagggacagaaaggcccaggtattcaacttcttggcttcgtagccatttgactttttcttttctttagggctcttctggccctaacctttgcaccattccataggcaccccttctttctgccactcactcacagtcctcttgccttcacttccttctactagtgtctccaactagatttaccctgtcatcatcgttctgcttttgaaataggccatgacctttctttatacaacttattctacttcttgccagaagaaatgagacattcatgtctttctgacttctccattacctcctacaaaaggacatgaccccaggctttcaaaggatgcctttagatttatccctatgtccagagtcacatagacaggagggttctaactcagcaaaccaccggttcacttctgcttccgtttggctagaatttggtcagatagttctgtatcctggcttcctataagaagaaacaaagcaaaaagattaaaaaaacaaaaccaaacaaaaaaaacctggttcttgtctttattggttgactttctccaaatagtacacttaagaaatcaccaacatgtgtgcagttcagatgttaatacagacacacatctccacatttccaggctgatggggagctctgatcatcggacacacaccccaaagcatgtcattgccatattgaagttttattgaattaacggagtatgtgaagcatttgtatttcaaaactgagataggaaacttcacatatagagatttctaatttaacattgatgaagatgccaagttaaatagtcctttggaatgaaacaaatagttcccctggggctcagccagtgagcgcagccagcagcttggctctttgggtctttgcctgtgtcttactgatttcttttaccaaagctcagatggggagattggcaaggccactgaaatagtgactggcaactcggtttctttcctcctcaccctctgtgatttcaaccctttcctgctccgttctcctttgagaatgggtaatcagaggggaggaagatggccttggcatatcactggggaaggatttctgagcggccactacaaagccctcctgtgaccctgttagctgcaggaaatagattggagtgtcctctacctctctccctcaaactccctgggtcagctgccaacaaactccaacagtaaaagaaaaggcttgttcatgtccatcaacccaggggccttttattagaaaacatttattttaaaagaataatgctttttctctttcttttcttttcttttcttttcttttcttttcttttcttttcttttcttttcttttcttttctttctttctttctttctttctttctttctttctttctttctttctttccttccttccttccttccttccttccttccttccttccttccttctttcttttcttttcttttcttttcttttcttttcttttcttttcttttcttttcttttcttttcttttcttttctttctttctttcttctttcttttctttcttgacagagtcttgctctgttgcccaggctagagtgcagtggcatgatcttggctcactgcaacctccacctcccaggttcaagcgattctcctgcctcagcctcccttgtagctgggattacaggtgcctgccaccacgcctggctaatttttgtatttttagtagagatggggtttcaccatgttggccaggctggtctcgaactcctggccttgtgatccacccgcctcccaaagtgctgggagtacaggcgtgagtcaccatgcccggccttcttcttttatttttttttaaagtagaggttgcaaactgacagcctttggaaagaatacagcctacaaatacttttgtttggcttgcacagtatttgtttattgtttttacacacgaagaagttgcgagcatttaaaacactggcactttaaataaagttttaaatttttggcttcttttggaaaatggaaaggttgctcctctctgggtcagcattcctcttggtggcagttagctgcagctgggttgaagctgctcctttagccaggcttgtgggctccagtttgccacagtctccaccactccctattgttatgtagacaaggaagacaagtgtcacttgccacattaattttttttcttatgcctgttatatcacctgcctggatcctgttggtatttgggtttgagacccctaattaagctataattaaaagtcaatattatcttgctctgttccctcatcagttaaacagtcttaaaagttgtacctttttctgtcacttcagctcatgccttcctaaccaatctttcacctgtgcataggaccaggagagaataacctatttccccatgtaacatttattttcatgcctttcttgtgttgtgagatttcatattcctacttgcttggccttgtcaaatgtctgatataaggagcatttttattatggttgtaacataactttgtgtcctcagcttgcatttttaaaaacagcacctcattctgtgggcatcaatctatttatcttccccttgataggactccaggaatgggggactttgggccagttagctttgtctcacattgactggggccctgccttgctgctggaagttgggtatttcactctttgctaggcattctggtttagggggcagcatagccatccagcctctgagggatgtttctttttttttatgtttttattttttagtatacattaagttttagggtacatgtgcacaacgtgcaggtttgttacatatgtatacatgtgccatattgatgtgctgtacccattaactcgtcatttaacattaggtatatctcctaatgttatccctcccccctcccccaaccccacagcaggccctggtgtgtgatgttccccttcctgtgtccatgtgttctcattgttcaattcctctgagggatgtttctaaagccaatggggtggaggaaagcgagggcatccttgtgtgagagcagacactgaatgctttgttgcaactcaacttggttgcagatgggctcttacttcggctcctccttgtgcgcagttgacctgaatggggacggcctctctgacctgctggtgggggcccccatgttttctgagatcagggatgagggacaggtcactgtctacatcaacagaggaaatgtgagtacaatactgggcaatgtgcggatgggtgtgggggagggacatttgtccagccagcagtggccgagcacccctctgggccggcactgggggcaatgttacccagaggagatgaaaatatgtgatatctgtcttgaataagctcaatggcccattaatggaaagttatatacaatgttacaactgcagacacccaggggccaaggaagaatcttaataattgtcttttgagtgcttactatgtaccagggactcttcttcctgctttctgcgagagatttctatgcaatatacacatggtatcaagggtgcccatttttcaggtggaaaaactgaggcccagagaggttaggtaatgtgtcccaaaccacacagctaagaagtggggctgggatttgaacctaggcaagctggctttagagctggcatgctttgtctcaaggttatgccacctctctgggagcatatgcacattttcccagggaagcagaggaggacacaatggctggggaatcttgaagaaggagtaggagttagcagacaggcagggtgggctggagcagagctcccagtgcagagctgggcaagtgggttggggtgtgaggtggcatcaccactcatttcagcatgggggggcaggggactgcatgggaaccataatctttttgttcgtttgtttgttttgaggcaaagtatcactccatcacccaggctggagtgcagtgacgcagtcttggctcactgcaacctctgcctcctgggttcaaactcttctcctgcctcagcctccccagtaactgggattacaggcacttgccaccacacccggctaattttttgtgtgtttttagtagagatggggtttcaccatgttggccaggctggtctcaaactcctgatttcaagtgatctgccctacttggcctccctaggattacagacgtgagccaccacgcctggccaataatcttggtgtcccctattctgcagaaccatgaaagggacgtgacatggacagaaagatgcctctggccctctgtagctaatggagggtgggtgagtgggggctgggttgggggacagcagtgcatcgtggaagcaggagaccagtgagaaagcagtcttttcaggatctggaagtacaagtgttcaagtacaagtattcagcaagaacaacatggttcaatgaaaacattctggtgccgcctaccttttctctaacatgagaaaacgcttatggagataatcagtggaaaaatgggatgaaaactgcatgtacaaccagtcctcagaaatatgccaaatacatagaaaatgtgaataacagctctctggatagatgtttagttttatctttatccaaatagtgagaatataatttcatatttaaaaaaatcgaagtgtactgttaagcagtggctgagatgctaggtatcccagttgggagagggcagaggtttagctataactaagtgggcagatgccagaaaggaaggaagcagtgaaaggagagccagggattgttagagccttatgttgcgtctgaggttttcaggctcttcaggaagtcagatctaaaaccagggaggtttgggaggcccaggtgggaggatcacttgaagccaggagttcaagaccagcctggccaacatggtgaaaccctgtctctactaaaaacacacaaaaaaattagcctggtgtggtggtgcttgcctgtggtcccagctgaggctgaggtgggaggattgtttgagcccaggaggtggaggctgcagtgagccgtgatcatgccactgtactccagcctgggtgacagagtgagaccttgtcaatcagttagtcaacaagccaacaagcaaggtgcagtggtggttgcctaggaggctgaggcgagaggatcccttgagcaccggagtttgaggtggtagtgagctatgattgcaccactgcactccagcctgggctacacaatgagactctgtctctaaaaaaaataaaatatctgggagggaaggtgcttattggtacctgttgcaggaactcttggcacctgcatacccactgacattccaggaagtcagggcagggtgcagggagaaatgaaggggacattaaataaatgagtgctgtgggcattcagtggtgcctgccattgtatttgcaggagactgagacatttgtgtaggagtcaggtccaacagccagactgtgtgtctaaatcagaaggtggactcttgaagcacaagaactcccccaggcctccactgggcatgatgcacccacaccctcccctgccaaccagtgtttcttgatgttgtatggttattctaagtaccagagtattctcatttctgttgaacatcagccatttgaataaagatcggaaggcagtgtggagtagtggaaaaaattctgactttggagcaaggtggacctgagtttgaatcttggttttgccatgtcctagcctgtgtgatgtggacaaatggcttgaaattggtggcccaatttcctcatctgtaaagtgagaggcatcataagatcttccttatggagtcattgtgtgatttgaatgaggagctggctgtacagtacctggtacataggagcaatcagttgctggtgttcctctcctcttccccactacactgaaagaaagaaattaatgcatatttgtgttttggggtggaggtttcattcacccaagaaatcatctcaccttgactgttttcaaggtgtaaattgtgtttatagtgaaaaagaagacttggtcatgataaaagccagacactcgtgggatggcctgtaggatatagtgggcccagactgcctctgcactggggaatgcatacatcttctcatgtctcaggacatcagattgcattgtatcactctggtcttcatgtgtcagtgatttggggtgagagtaggtatgactttttcccccaagttagatgacttttcctgcctttgtacaccattaaccccctccctctgttggttagtattttctcaggaaattcatacctgagccatgcatgaataataggcacagtgacgtctgccatcacagccaccctctggccaagaacgactgggtgcttggattttctgaaccatgactccctctatcaagataactcatatatgcactttgcaaaacagttttataaacttgtaccaaaaggcacaggaaagaaaaaatagaaaaatgtatacccttttaaaacaacattggggaaaaagtgctatgccttaaggacgtggagagcacatgggggaaaggtgggtagggaggtttgcttgtgtgtagtgtattaggacaaggcagagagtgtagtcattggctaccatgacattctccttccctcaaaaatgcatctcaggctatgggagaccatcctgctaagcaggtaaaagggacgcattttgccagcaggagagagaagtttgggttcctgtaattctgcccaggtgtttcctgtcaatgagtgtgctctagcagggcagcattcaaactctggttttttattgatttttattgtttgttctgtttgtttttgttttgttttccattttctcctccatcctgtttcccagggagccctcgaggagcagctggctctgactggggatggtgcctacaatgcgcactttggagagagcattgccagcctggacgatctggacaatgatgggttcccaggtgagtgagtgctcctggtgcacggagcccctccaggtgcagcacgctgctctgtttcagaggggcagcctgctcgctgactgtccatctctagtggcatgctcctgggtctactgatccccttcgaaggcccatcaatgtgctgtggggagataggacacgtttagaggtgctctccctgtagacacgcagggctgagcttccagcccactggagttttgcctctgcataatcccttctcaccagctcagtgttctttgttgtttgcagtggaagcaaaccttggggctggtccatttgggacttcttatggcaagaagtttgaatagcttcatcctgccatcaactctccttgtttctgagcctttgatgctccatcatgctctaccatgttgatggggaaatgagtgaggagagaattagaaacccagacatcttctgcctgattatagcagcagctagattgacttttgagagtgtacgcgtgtgtgtgtgtgtgtgtgtgtgtgtgtgtgtgtgtgtgtgtgtcttgggaggcatggaggcatatgtacctaatgtctaggtctgtttggacagcagtgttcctcacagcctcttggcctctctctctggcttgtttgagcctcttcacctcgctgcatacacagcatacagacgtcgggaggcagagcaaccatgtcaccagggcatgtggtggtggaggtggggcaacccttgcccaggccagccatccagacgtctttgatacctcctaccactggctacagtgggcttcattttcctcccccttggcctcacttctgcagacacatgactttgttagaagcaagggaaaaaagttaggaagatctaggttttgttctaggagttgccagtttgtgagagtaatgttatttcttgtgtgtgaagtgaatgcccttctgtatatttcctttatccaggaatggatttattatcaaataataataaggaatggtcctttatccaggacctcagactttctcagttacacaatagccattgtctatggaattctccctgatggaaattatggcacgtagtttatatttgcatttcttttattggatgggtcagtggtttttcttacgagcataaggtagaaacttttttggaactaaattcttctcagtcagcttctatagttttcactgtacttttttttttttttttttttttttttgagatggagtctcactctgtttcccaggctggagtccagtggcacaatctcagctcactgcaacctccgcttcccgggttcaagtgattctcttgcctcagcctccagagtagctgggacaacaggtgcgtgccaccacacccagctaatttttgtatttttagtagagctggggtttcactatgttggccaggctggtcttaaactcttgacctcaggcgacctgcccgccttggcctgccaaagtgctgggattacaggcgtgagccaccacactggcctacttttttttttttttttttcctgctgagggatcttgtccccaaattaatgcttgaacaatcaacaaccaataatttctggtatccagggactcagacatgacaaccagaattagggaagctgcacttgtattattaatgtggctttttaacccatagctgtttttttaccctcagatgtggccattggtgcacccaaggaggatgacttcgcaggggcggtctatatctatcatggtgatgccggtgggatagtccctcagtactcaatggtaattagtgtgagagtgatatggcaactgttcatacattcattcagcaaacatgtatggaaccttcattatgcaccatgccctggaggtacaaagaaaaacatttttcttgccttggccttcctacccttttgtgaaagatacaattaatattgcttattaaatactaaaaaaagcattcttagaatcccaagttcgctaacactcagggatgcattttgcctaaagaagataattttcaactcttactcagagttggagccatttatttaagaaaggaaaggaagctttctctttttggtgactactttgtcaaccgtctatgctaaggcaaaggaatatgttttaatatataatctagaagaaaaatggtccatggtggaggggcctgaaactgatcacagactgtcgtcccagctggcctcaaaaccaggagccagttaggactctgcgcttgcgccctatacttgggaacatggaagtggtgagttctgttttttgccgtatcagcttggtgttcaatcttgctgatggtgtcaagcccagcccatgggaaaaaaggaagtcatgctctcagcagaagcattgtcaggatatttgtggatgtctgcctgtggagtggcactggctctggtctttctcccagtgggtcagagacagaaggggacacacattgagaaatttccaatcaacaaatatttatttattgaacacttactacatgctgactacttcctactcatatgtatttgtattttaattttaagaggcagcaggtaaatgcaagtacaacttctacatgaataattgtccttggcagatagagataaactagttaagggtggagggttggttggttgtcattcgtgcctcagatcccctctctactggcctcctgctgagctcagtgcctcacctgcaggagacagggctttgggaggcgctgcgaagaggagggactgttttttgggtgcctactctgccctttctttacctttaatcctcgcagcagccatgtaagatgggtctgtttattatccaccatttatttatccacgaggcccaaggaggttatttaacttgcccaaggtcataagtggcagtatggccacagaatctttgccagtctgctgcctgaaacttgttatcgtaaccaccatcctcaactccacattgcaaaaaggaacgctcggaaactcagtaggaaaacttacgaatatggaaactattttgccatgaggcatacatagtctgaggggcatttatctatccagaccatcctcttttcattagaagtacataacaggagattaataaacttcggtgattcagcccacaaggcaggaggaagagagctttgggcacagtttgggggccacatctgagtcacaagagctgccctaggctgcggcagggatgctcttcccagggtgacaagctaaaagtcacccaaggagccccgtgctcgggcagcggtcagggtcattctccacgcatcctccgggaagcttgttttcctggacctcggaagctaatcacacagtgaggcaacctgtgagagaccccagcttcccctcctccggggccctcccagtgttttgtttggttgctgggtggaatccctgtagagaaccacagtataactcttgtggttagcgtggagcgtctttagtgggaagcagggatagcatctggaccagcctgcctttgtcagcacgcaggctggctcctttgctttgacaaagagaagtggttttgggctcttaaggaaaaaaaaagaaagaagcaactatgactgtacgttcccaagctgctaatatgcatatgataagggcagagatttaaaagaaaaaaaattctttaatggcagattcttgcaggcccaggtcctggacagagcaggcattgtgtgggtgaactagaggaaggaatcagaaacaactctgggcaatggaatcactttgctttggcccagatttgtattatttctgctgggtaaattgtgagatcagggcctacacttcttccacattgctctttaactctctctcgagtttaccacggagagtgtttattttaagatccttgtgtgcctttcccaatgtgagagccctctgggcatatggcggcccctatgatccttctcttgctggaggggacactgcatagaaacctggtcaagtggaggtttccagggctcctggttttcatttagggttattagcactgggcagacttatcttcttggcttttagcataatggcctgcagatgtctgtgggataacttaagcctgcatcaccaccccagatggaccaccccttcgctctgcccctcgtcccagccacagcataccttagaaatgtagatccaggggcaggctgctgctagagttcttggacttcagagccaagagggtctgcttcaaaacgtggcttttaagaaatgtgcagacacacgtacatgtttgtttagacagagccatgtgggatgtagggctttgcctgttagtgtgaaacatttcttcagtgtttcctacagtgttctgatttgtactttggtgcttggacatttcctgttggatggcttaacggaggatggcaagcagccttctctgatcacttctaggagggttatttgcagttatcagctgctgggggtcagggggcatctctcgtgcctccatctgtagatcctgtgaaaactcccccctccttgccttcgtgacttctctgcaggatgactcgggaaagagaaggataaggaaagaaagtcaaagtgagcccctagatagctgtaaacctggttctattgtactttgaaaacaaagcatttctcttgtcctccacagtgaggacatcaggaagtaagcctcccctgggggaccatgcagataaaggcagaaggagtaggtcagaccccagaagatgggacttttctgattcaagaagttcagtatctttgtgaggaactgcgccacacgaatgttgatgcgcagcttcagtgtgacaaaggctgtttgtacaataaatattgttgaatcagtgctgcctgtgtggatatgtgatgaacttaatgatgaataagaagtgagcacagccaggagtggtggctgtaatcccagttccttgggaggctgaggcaggaacatcgtttgaggcttggagtttgaaaccaccttgggcaacatggcgagaccccgtctgacaaaaaaagtaaaacagctgggtatattggagcatgcctatagtcccagctacttgggaggctaaggcgggaggatcacttaagcccaggagtttgaggctgcagtgtgctatgattgtgccattgcattctagcctgggcaacagagcaagactctatctcttaaaaaaaaaaaaagagaaagttttttgtttttaaaaaacatataaagtaagcatagatgctagtgtgtcccatggtgaagttgtgaactctggttggttgagggggctgttttctagaggggagggcagggcatcttcttcagctgagtgcttttgatttcctacagtttaagaagtgttcaggaccatggagttctagatttactgggtaaaactgttcactcctgtctgtgaagctccagaatctatagatcatctggttggctggatggagaggtagtttccacatggccatcttttccagctggacatgttaattacctgtctgtctagggaaagactctgtaatgtgtgcctcttaggagcagagtgttaaatatttagtacatatttgggaagaaagatacaagctaaatatgttcttagaatttcagccagctacacctgtgtaaaaacaaacagaacctgcattaggaatggaagttaaactttatccattttgaatttcaacatgtcaaaacattatcatggtagtctaggtggatttttttcattaacacagaacttagaaaaaattttaaatgatgacgtttggccaagacaagtaataataaaggagtgtgtggccttcaactgcctgctaaagacttgctgatcacattaggattactttttttttttctttcaacaactttaagaccaagtgtcctagggaagctggaataaagcagtcacagttcttatttgtgactgtggtcttttcctgtgactccatttccctattatctgtttcagaaactgtctgggcagaagataaatccagtgctccggatgtttggtcagtccatatcgggaggcattgatatggatggaaatggctatcctggtaagctgtttttctttaaaggcacatgagataaatgaagataaatgcatgaagtagaataattttcagtctggttagcaatcatcacatccatttaggattaggacaattcacacaatagaatagggtgttttgcctggtgttcaattttaaggtgaaaataatgttgatatttattttggggttttaaactgatctactctgaatggcttagcaccaggagggtggatttgtgtagtggtttctggggcggtaattctaatgaagaaaaaaagcactggccacatctaaaatggttgaatagtgaaacctcatgttttcctttgtatttaaccacattcaaaggcttcttactcttgagagggaaaaagagcagcacccccaccgccccctgcccctactcttgaaataaaatgatggagaaagatttggagttaaaagaaaaccaagtcctcttgcgtgtggacaaagcagaccttcaccattcaatgctggctggcttggctttagagttaattattgcctgtggtggttgtggctaactggataaagatacatgatttcaaacccaaccccaagtgatatctggcctaggtcaaattgcctgggtggtggagtagtggttcttcaggtgtttcaagatggagtggggtaaggtaaggaaacaacagtaagaatttgaaaaaatccagaatggtcatggaattcaggaaacatttctctaaattttatagtcatcttgcttttgagaaatatttctttccactaaaatttaagaaaactaacgcagtcttgtatgaggacaccacattgtgtatttttgtacagataggagttttggaaattcctcaagacaacagagccaggaggaagtaagggaatagaaagaagtcagtgttgaagcttttgtcccaagaaagacccttgtgggcctttttaagtttgagaaagcagttcttgttctggaaaatttgtggccatccccaaataataccttatatgggtttagcatttaatatgtacaaaatgcttccacatgcaatgtgcatctcgcagtgaccccagcaggtaagtaggatagggtgttttccccactttataaacaaggatgctgagactcattgtgaggggctgcccagagcctgcagtgcacggggatccatgcttcccagtggttcagctacttttctgtaaatgtgaggtgagcaaggtgttcacagttcacaatggatctgaatttctgatcttgtgtttttcataagggaaattgacaaattcatcaggttcttttatttttaaacatatagcaaatttaaagactattgaagaacaaaattgatacaacacccaagtggagaaattttaggaacactataattcatggatttgccatttgtttttccctaatgagggcatcatatagatgctcagtgcatttagtgatgtacagattcagaccctcttggactcagatacttggttctgtgaagtagtagtgggaaccccagggccagggatttatatggccgggttggggtggtagggagaaaggcatagaaccactggaagagtaagtacttcctaaattaaagttatttaggaataaacattaccagttaaaccagggtcttggtttatagcttaccaagtatttccatgaatttactgacttaaatatctgatttcatatatttaataaatatttactataaatctagtgggtacttaatgaatattatataatgactaataaatattttctgatttaaatgtaatgaaatattatcagcttttgaagaaggccctggggataattatcttcattttacagacagggataccatgagatactcaggtcacatagagtgaggggtggagggtgacaattccatgttcttcagaacctagagcattttccaagagtcactgaattctaggtatgtctttctctaattcactgatgtgaaaagaagtataagccatatgtgtaatctaaaatattcctgtaattacataaaatgataaaaaaggtgaagttaattttattaatttttttagcccaatatagccaacatattatcatttcaacatataatcaatatgaaagttattagtgaggtagttaatggttttctgtactaggtctttgaaatgtggtgtgtagtttacactcacagcacctctcgactgagactagccacatttcaaggccccagtagcctgcgtagggattggctgccacgtcagagagtgtggcttccattcttacaagatcattgtatagcccagacagtggtcgtctgagggctctccggcctcaaggctgggtctccatccttgtgagcgcattcccagggcgcggttgtgtatgggcttcagcaagtttctgaacgctgtaaacttctcattttcagatgtcactgttggagccttcatgtccgacagcgtggttcttctcaggtgagaggccccactcttgctccttgaattgtgctgttcagggtgagggatggagccattcaccattcatgggctctttcctctgtcctgttccttgtaggctggaggtgcttagtaagtggaaatgctaccttattttctcattctaattattctctatcccagagtttctagctgtggccttgaatggcttgcaggtatgagatgataacatcctgggagcttctaggtaggggttggggtagcctaactcttaagcctaaggtaggggttggggtagcctaactcttaagcctaactcttaagctatttgcttttggccaagaaccttccataatgtgccataaaaatattttataatttcctgcgggtgctgggaagcactgttcattctgtctcttcatctgtacaccctgcatttgtacctccagtcagtccacaacaccctggggaccgggagcctcctgcccgttagacagcacgtcattccctgttggctgcagaggtgagggacatgagctgaggcccagagcttgctgaggcccgtgcagtctgcatctctcctgcaaaggccagtgggccgccgccaccacccgtgaaccctctccaagtatttctagctgtatgagtcagaggaggcagaattacactttggagtgggagccaattcttaggttttgttaataacctgatggcagaactttctaaaatagactaataggatctcagagctggaagggatcccagaggccatgtagttccacaccccagatccttcttattcagcggtaccttctgctggtctccactgcagggctacacagcctcctgtttgagtgagatgccccatgagtgggagcccagttacttctaagggaaccagcttgccccgggtaacattaaatcttgaattattaaagaggcagaagagccttgaggttgaatgtgaactcaggggccaggtggccgggttccagccctgactctgcccttactaggtgagtttcctgggcaagtcccctgacctttctgtttcaggattctcctctgttggccaggacagcaatacagatgctccttgacttaggatggggttatttccagataaatccattctaagtcaaaacatggtagtttcaacttaggatgggtttatccagatgtagcctcatggtaagtcaaggagtgtgctgcattcctatggcttttgcaccgttgtgaagttgaaaaatcataagttaaaccattataagtcggggactatctgcagtacatgtaaaatgttcagaacagtgcctggtttaactgcttaataaatcttagcaagtttgatgtaaattgggttaaatttgcctccctaaaattctgcttctcagtcttgtgtcttttatgtagcaaccctttagtatctgaagggggcaattgtgtcccccaagtggtgacttcactaagataaggcctccctggttcctgtaattatttcccatgtgactggattttcactttctttatcagcgcttcctctggataaaacagcttttgtggctccaaatgattgaggttagatttgtgaatctggttgctctagttggtgctttcatgatgtcatctttgctctcttcattatcctgagcatcttactttggtttgtcaggattcttctcaaataaaacacactcctcaacttttacagttgaaaacaggctttttttttttcttcttttctttttttgagatggagtcttgctctgtcacccgggctggagtgcaatggtgtgatctcagctcaccacaacctccgcctcctgggttcaagtgattctcctgcctcagcctcctgagcagctgggatcacaggtgcacaccaccacacctggctaattttttaatatttttagtagagacaggtttcaccatgttgatcaggctggtctcgaactcctgacctcgtgatccgcccacctcagcctcccaaagtgctgggattacaggcgtgagccattgcgcctgacccaacaggccctcttaaaaccggggccatctggctgaaggtccatcatatagactctgctttctcatcattcttgtgttttttaatcttcctgctgtgagcttaatccaaagggtattttctttttctcttcttcatggtgagggacagccttctccaggagtttgctcacatatggatgtaaagtaaagcgaggcagttacacaatgggtgggagaccccagactccagcctaggatggagggttgaatctggtgagttggagctcaacagggacaaatgtaaagttcttcaagaagaactccagggagagcacatatcaagagaagagacctaggagaggagcctggggagccctgccctgaataagagcatggaaggcccaagaagagtggtcgggccatgacagctgtagagtagcatgcaaggatgttgtggtcacaataatccattatcttattcattcagctaaggtgcattgacctgttgagatgcagccatgcatcagatcctggggatttgatgggaaacctgacctagcctgtgaccttagattatagccagagagccatatgcaagtgaataataatgcaaccaatgtttggtaagctcctaccgcatgcctggcacagtgtgagcacttcatttgtgttcattctttgttattgttttctttctgtattaaggtagaatttgcatgcaataaaatgcaccaatttgagagtatgactccatgagttttgaccactgcatacgctgtgtgactaccaccccaccacaataaagaatacttctgtcaccccagatagtttccttgtgcctctgtctggtcatacccctctcctgatagacaaccactgttctgacttctatcaccatagatccatcttgcccattctagaatttcacattggtgggaatatacagtatggactcttgtttctggcctcttttaatcagtgtgatgcatttgagattcgttcatgttggtgtgttgcttgtttttccccttactgagtagcactccattgactgaatatccttgagtttgttcatccatcctcttgttgacagaacacatgacaactcttagtcttcttaacaatccatgacataagtggggctgttatccccattttatgggtgaggagaccaaggacatgcagatcttattaatataaaagggaaggtgattccagatggtggtaggtgctgtgaggattctaaggcagggttacttggtcaggcagtggtgtcaaagtcagcaggaagggccaagcagagtgaggcctgagacttgttggaggtggcagggggaggtcaggggtgcccttggctgtggtggctctagagaagtgatggggcaaaagccagatggcagtgggtgggtgagagaagaaacaagaaggacagtgactcttgactgcttctccagaagcttggctgcaaaggagcaaatgggaccagcaggtagttcagggaggtgttttaaggacgggaagctctagatcagtgattaggccaagaacgtctttgagccattttctggtctcccaagtcccttaccctcttggaagagatcagaggtggtcaccctcagcttcgccctcatctatgtgaaccctgatgccctaaccctgtgcctacacccaagggtcctggagaggttgaagagacaagagggaggatgggaggctgctccagggatgagggatggggggatgaggttggtgagagtgatggaatctggtacatgggctgggggcgaggggccctcatcttctgagccaggccccaagataggaataaggtcagagcaaggttcagttccggtacatgggctgggggcgaggggctctcatcttctgagccaggccccaagataggaataaggtcagggcgaggttcagtttgggatgtggatgaggatgaagcagagggtgaccaccctggtctattccaggaggacaagggaatcagggagagcagggaaggcttcaaagacaggctggagcccctaagagaggaagcaaggtggggcaggcaaaggggttgctgagcatgtctgaggggccagcaggctggatgtctgcaggggcagccgttgataaagtcccaggattcagctgagcagcagtgaaggcctggaggcatcagctggctatgttaagtaggggcttggctcagcctggcctaactgatgttagattttgagttactttaggttttgggtgggactagaaaagcagggagagctaggagaccacgcatgtgcaagcacacatagatatatattgcccatcgttcctaaccctcctaagggcaggaggccagaggtatgtgggttaggaatgctatgggctgcagctaagagaaaacctggctgaggctttcaactatatgacctcaaattagctccctggaggtaggtggccccagggctggcttagtaacctaacaatggcaccagtggcaccaggggtgaaggctctttatctgtccttgccttgcagaaggccaaggcaccttgagcaacatgtcaaagggcatcccaactggttgtattatttaccttgaagtgaagtgtcaggatttgaactgtcagccctcagggagaagtgttccagctaccaggttttttttttttttttttttttttttttttttttttttttttttttttttttgagacggagtctcccgctgtcaccaaggctggagtgcagtggcgcgatcttggctcactgcaagctctgcctcccgggttcacgtcattcttctgcctcagcctcccaagtagctgggactacaggtgcccgccaccacacccagctaattttttgtatttttagtagagacagggtttcaccgtgttagccagtatggtctcgatctcctgaccttgtgatccacccgcctcagcctcccaaagtgctgggattacaggcgtgagccaccgcgcccggccgctaccagcttcttaagaaaaaaaaagcactgaaagcgcttgtggtgctgtccttgggtgctcctttgcttttatctcagaggctggcacatttgtaggcaggactgtgagacacagtctcccctgcccccaggagtgtggctggcccactctgccctcaggaagtttgcttccctcagattagctccggggcaggtcctgtgtcagggtgataggcacacggtgctctcccattgaaggtcacaggaagcgatcagagaggcctctgaaagatttctgggcttttcttcatccaaaaacaatacttggagttgaaacaaaaaggttgaagggaactgatccgacagctgtgggaaggagatgtacctgtgaaggtccctgtggtccatttcaaaggatactgtttttccaacttccactgaggtcactgtgtctgggctgcccacgtctgtttcctgcctgccgcactgtcttctgcagagctcttttgtgagaggaggattcggcctcctccctgacgaggtggcccctggggatgatggggcgggctaggcttttcttctgtaccatgaccaggcgcgtcagggaccaggcaaggtggagaccagctcttcatggtacttctgtccatctgtgaggctttggacactcgtggttttcagtctcctaggctggagtaaaatttgtatttatttaacaagggtgtttgcacatttattatgggaacgagaggatgaattcaccggatcccagcccttgcagggtgctgcaggatggtggggcaggtttggaaatagacaatgactgttcaccttagtaagtgggggccagaggtgtgtgtacagagctggaagcacagagagggaggatgcctgtcaggggtactagagaaggcttcctcagggtgggaacatttgagctggctgttgaaaggtcgacggggttttatagggtgtccattggcatctgcacaatcacactggccaggggtaagagatccactttccgatttatttctagtatcctataaggatgaacccagaagaaaatggaaagactaaggtgttggccttctttcaggcactgctattgtctgacttccgtttgtcctgtggccagatttgctctggaagtcccgcagttccactgcatctgttatcactactctctgttgaccccatctcccagcatggtggcagcagtggagtcccctcaccctatctgtgcctcgtgtctcttcacttcctttgttcacccagattttccttaacgctttcttccattggagttggtgtgggtcatcattcccatccgccctatcaccctgggctctctttgagggatcattgtacacaggggcatcattgttctcaagctactaatgccccttaatcttgttatgtcaccccagtggtgtgaaggccagggctccttagaggtaaaagggtctctttgtgaggcctggaggggagaaggttgagcagtagcttaggtgaatgctgcctgagcagatgtctgcagtgggagcagaatggtgtgatttactctttgtttttgtgggatgtccttggggagcccaaggactgtccattcatcaagcactgggagatggtccatggcagggaggagagtatggctttttattgagtttcatttggtcataagactgggcaggttgatttcttctgccctgaagcactttgctattaccagctgggactccacttatcaagttcttttaggaaattacccaatgaattggtggaggtaaatgatgcaggaggtttgaccaactggatggggctacaacattgcagttcatgctcataatggcagcaaatgcttgagggaatccctgagtatgcatctatttcttgaatcatggcatctgctataggaaatcctcttaaatgtattcttatctccctaataaaatggaaattggtacttaattggtaaaattttaaataattacccagcatctggtggttcatttatggcttcaaccagatgcgttttattaacaacaaacttgcttttattattgggacgctaactattaatttactaggcaatatgccccttctaaaaccagaaaaaaatgctcacagaacatactagcccttctctcttgggatatttcatgctttaattaaatgctgggttgaaggcctaggatttatcctgttggtctagttcttgtttggttctgagagctgctccttaccacgactaagtcaccttcctctcttgccctgcagagcaaggcctgtcattacggtggatgtctccatcttcctcccgggctccatcaacatcacagcgcctcagtgtcacgacggacagcagcctgtgaactgcctgaacgtcaccacctgcttcagcttccatggcaaacacgttccaggagagattggtaatgagccaccaagtcagggctcaggatacccgtttagctggagtgggctagtgggatatttccgatgttccctgtcgctgttcctcccagctggttttgcaggcagcaggcacacaggctggacatcctttccctctgaggttcctccccttctatttcctgcttatcaacatgtttctaatgtcacacaacctccagctctaggacaaataatgttggaccccaagcattctttttgcaaatatgagggctagactgaagcctcattggaccacaggtcctatgggactggtggagatatagtgcccggagcctggcccttagggaacattcgagcagttagaaagcagaagtgacaggactttggaggctccttattgagcttgtagcatcagccagatgtcaggggacttataccatttactatggaattggagaccaaagatggatggtgggattcggatgctggtgttacagaggcttaggtttctaaaagaggggtgctgctttggcagctcagaattgaaaagaggcaggcattgtcctgacagctggtaactgtccctgccatttgtctggctggggaaaatcaacttgctagcccagctctagagactggattaaaccccagaacaagatagaaccagtgttgattggaattcagagcacgtgatcacctgaaggaaatgaatctggagctttatgcatattactaggtgcttcatttttatttaaaaggctgatttaataatagaaagaaaaactccaggcaaacaaaaacactaacggacctgaacctactgacgttcttagatatttttaatgtcatgagtgactccttttgctactcacagtgtagcccctggcctagcattgtcagcatcactgggaacttgttagaaatgcaggactttgggctccgctttggacttctgaatcagaatctgcattttcacaagagccccacaagattcctgtgcacatttaagtttgagaagcactgctctggagcacacatgtgtgcacacacgcccactcatgcagaaatatttacgtgagctagttcattcctcagccacacctcaaatgttctaccttatttaatatgttcatccttcttggctgtctcattggcaatttctcttgatcttcaggtatattgaataagctcaacgattaaacatatttattttatcattttttaaaaagagcttagaaatttcaacattgaatgaaaccataccataaaacttgggaactggttagtgagggaggattaacaacattttcttgtgcagctcaatgagaaagagcagctcactcaagatcacacagatattgttgaagccaggagttgaatttggatcttatgatacttagttttgctttctaacaactatttctcaccacctccataattgtttaagatactacagtcttaaggaaaaaagctttctgatagttctgggactcgtgtgtcctccacataattaagcagtctgtcttctgtccagtgccagctcatcacgtagttggactctgttaaaaaacatttttaaagaatgaagattaattttgatacacataagaatgagaactattctagaactctcaaaaagggcaaacgagtaatagtgtctgtgtatgttcatttgacacatgcttattatgtatccacatgtgccaggcactggagatatagtcctgccctcatggagcttctaaagggagttacaaagagtttctactattttggccttgaagcagtgttagacaacgttcacttatcgctgttgtgaaagtgaaggtaaattggcatagctgaagcagagaagaagaaaccaagatgcaagttagagcaagagtgattcagagcatgagacaagtggtagagcaaactctgatttgaaggttcatgagctgagcgcagaggagatgtgggtgcctcctcatgctgttcccgaccagtggctctttctggggccccatctagcatgagcctttcacagactgctaagcacaattagaatgaaggtctaggcttagccatagccccagaagtgttggggtaaagtggaagaggccggcagttggatggcatcttgtactgtaccttgtgggcaatgcgaagcaacctggcttatatctgacattaggtggggcccattcagcaccagtgtaccctcccattaatttctcttccctatcctccatctgccacatgggttcatagataaagtcaaacatccctttatactctaagggtgtgtttccccgataatcaggcttaaaggggatggtaactggagaattttgatatctcagtataataaggcaatgcagaaaattattcatccccagcatgtttctgtcactttctctggcattcatatctcaatctttgcagtagaaagagaaatgtagaaatctgccagaaaatgtgctggcagtgaaatggagagtttggggagggaaaaatgggcaggccttatggaaatgtgataggaaatgaggtggaggtgaaaggtcaggtaactgtgggggcccagctctgggtgaggtgtcctagaattcagcaaggaaggcagcctcttggctctgcacagttgggaaggtcagtcttcagatggaggaaagatgggcacttccaggacacagataccctccactcccatccaagctcagcagagggtgctggccaactctgtcatttccaggcctccgcctcaggaacccacagctgagacactgggttaccagccttcctactctttgtgctggcagctgcagaggaaccatgtggatgatgactttgtccatggaatgcctggtgaatgagtgccagccctgggcaggccttccaggcacctctcaatgtctgcatatcttgggctgagtttgttattaagacggctgcatttgggcagagcaatacacagatacctgtggtgggctaggtactgctgtcagaagtggtatcttctgtggtatttatctgctgctgtcttcagctacatgacctgctctctgaggatggttttgagagccataagcagctgatgttagtcttgtgcctttggtttcttcttctctacctggcagggttcaagcctatgtacagagaagggacaccaactgcctctttatttcctgctttagaaatgggagaccacagtgcctacttggtcatgggagtgttcaggaccagctcattagcgggacacaagctgctgtagcctctgtaaatactgtaggaaatacagactttctctgtaggaggtgaatctgccttggcctctgaaacaggcagagtccagtcaggaaaacaaaaaccataccagttattttaacagaggaaatttagcactgggaatgggttaaacaggtcatggacgacctgggagtaactgcaggaagcagctgccgcctccaggtctgcaccagtggatctcaaagtgtggtcccagaccagctgcattagcatcacctgggatctcattagatatgcaaattctgactagaaactctgaaggtgggacccacatctgtgtttttacaagcctccagatgggttcaatttgagaaccactgttcaaggttatacttcgggttaaccacttccttggggttatcagaacctatgagcttggagaaggggccctgcggagctaggacctgaacctctgaggaggaggctggtgctgctgatctctctgagggagtgcaatgaggctggctctgggagaatggggggaaaattgaaaactacaattaactgctgttggggccagctgccgtgagaaactgttgctgggataagctgctaggaataggaagcagggaggaaggagcgagttcctttgccctctccagccttgcaggctccctccgatgctccatattagcagagcctcacagcaagcctctggcaaaacaagtgaggtttgcagggtcccagctccagtgtcacagtgcagggtagagaagggtgggttggagctgaggacaacagcttcataaaccagcacagcaagcatccagttacattgagttgctgaatccctgttgggtcattcaatcaaacaataataattaaggtcctacagagtgccagacaccctgcttatcctggggcacggagcagtgagcaggacaggcaaagtccttgccctcatggagctggcattctagtgggaggggggcaggcagacgggacaaaaacaaccagctgctctcttgctggcttttctagatgagctccgggccccttgtgtggcatgcactgtgcttagcactgggacacagacagacacagacttctcactccgactgtgggctcctccaggagcaggtttacaacgtatttcataaagcactttaaaataggagttcttcctgtccctaatagtattattcatcacttcattcttggcctgggaacagcctgtggccccttggagcctcctggctagcataggtgaaggtggtgaatgctttgcccaaggggaccctgcccctcacccatggacggtgcttgtacctactcactggccaggctgaagcctaaacttgcttgtcaatctctggaggctgggaatcaagctggcagttctgggctttcaccagagtgtgaaacgaaaaccaggaaggggcgctctctgagtgattgcattttgcactcagacccagtgctcctgtgtttccatggttagcctgaaactcgggaaggagaatttgttagaatttcacagctgaaatcttgttctgacagagagcaggaattaatcaaaacttgctgggagagaccagagctagagttgatgagagacagctggctccctcctggcccaggcccgtgcaggggggctcctcgggaagcagccgggggcagggcagggaggtggctgaaagtattactcggggctgatcagcttttccatcaccatgacatcattcgacatggcagggacacaagctgccagaaggaaaaacctaaagatgtgaaatgtgctgttggagcaggccctaatcagaactagcagcctcccagggacagacaggggctggccaggctggcttacctcatggccggctgtgggcaacttggacagcctgatccacccaccttcccagggccctgaccgcggagcccgggcagctgatcggctgcttcccagacatgtcctctgcttccctttccaccagaccctttaccagtgggtgctggtaaaactgccagttccgctcagggctttggaatgagtggtcagcatttcttcttgcctcctcaggcagggtctctcgttgtgactcttgctttcttctagaggagacagtctgatgtagaagtaatttcctttggggtaatttaaaatgtcaaaatttaaatcaaggaaaagtactaattaggcagttctagagatgaaatgcttccagaatgattgcacttggtgaattggataatgcggtatgtctgtgattgtatgttttaacattttagagaaatctgaaagtttaatgtgctggcatgcacacaccccgctggagaggagcagcagttgccttgtcctcagctcagtttctgtgaactgtgggttgtttctctcttccttgagttgcaagagatcagtacttccggatcagtacttctgcagtgagatgaaactttggaggagtaaagttggtgtttgtaaattatctagcacagtgcttggcacacgttgcaggttgaatttatttgcttttccttacttaccctgtgttaatatgggttctccccaaaacagagcctgggtcaaggatctgagtgcatgtggttgatacacaaatgatcccaagaggtaccagtaaggaaatgggacagtgagacaggaaaggaaggcagttgcaggcctcaggcttctccagagaaacagaatggagagagaaagaaatggattagttggttgattttcaggaattgggttgtgagattatgaggtctgggaagtctgaattcttgggggcaggccagtaggctggagactcagggaagagttgatgttgcagctcaagtctgaaagcagtctaaaagcagtttatttttttgggaaccttagtctttttctcttaaaaccttcaacagatgaggcttgcccacattttggagggtaatctgctttattcaaagtctactgatttaaatgttaatctaatataaaaaaataccttctcagtgacatctagattggtgcttgaccagattctgggtactgtggcccagccaagttgacacataaaattagccatcagagcagccaaatagagggtgtcttattgagcaggttaccactgtgggcagctggagctcagtcctgctggggaaccctggcagtcagtgtagaccgtgccccagaattaccccacatcaaggggcaagggagctggggccctgcattatggagggctgctctggggacttgagttccctggcactcctggcttgccaggcacatggacagagccactagagaaagccctcaggagaagagatgcaggtactggcagttgcaatttgggccggacagcagagaaatggtaaaagccaagaggatatgggtgggggagcaataccatcagttccatcttcctgtgttcctttccacccaggttttctctgagctcagctagttcatctctggtaagatagtccagtctcgctgttctctccattgtctcccttcctgagggaaggcagccattcacctgggaaggaggctggtcaggggaccccgaggagagtctgctcagcagctgcctccaccacattggttcacccaactgtggcctctggcttgtcttccagcaatgtgtatctgtagccatgactttgcttaagcaaacttggaaattcacttcatttaaatgtaatctttcttacttcagggcagttgttcagggaagttgtgatcagtagaaagtaaattggctagagttcagttgtagatctctgcacttgtttggacctgctatccatgcattcaaaaaaatgggaggttttggtcaagtaatgtacaacatgcagcaagaacaagtgtggtgggaatagcctggcaccagagattaagggagtcctagattcagctgtttgatgggtggccctctggcctggagcaagtcttgttcccttttggggcctcagttccctcatcttaaaaaatgaaggtttttgagcttagtggtctccaggattgcctcaaagctttgccagtctgaatctacccttttcttgctattgtccccattggaattggtgtgtgacacttgcacaggtgccagtgttttctgtgtgggagcactttcctgtatgcattattttcttcttaataatggcacctcctgagagtatccaggtctcagatcccttctggtgacacagccttgccttgtaagtcaactgtttgctggcgttaaacaagttggggcagatggctctgctgactaggaatttgccagctcggcatggcaagatccctgagatggcagaggcccagggaggccattagaagcatcaaaaatacgccctgtggcaggtgcagaatgcccattcaggtcaccttcctctctgcctgttcatacctcccctggtggctgatcccattgatgtcattaaaagccggagccttccctaatgcctgacttcacttacttaaatgccagtgggctcggggctacttgttactgatgcaaagcccccagattctaagaggcaggtgtgtggagacagggcagggctgggtcatctgccttctgttgcttagccatcttgccttgtcattccagggacagagattcctgttctctcactttaaaaataacatatttccttgaatccccaaaacagttaaaaaataaaaagggttacggaggggatgacctctggcacagaaaagcagtaaaataggtgtattgacactgaagtcatatttctataatgaaatacatacctatctatttacttattgactctgaaataacagaggtagatccttccaggtttatctagcctgcatttgatactgtgatcatcttttttttccttctttctttcttcttttttttaaattcaagactgtgttacaaaagttctgccatctggcatacacattcaggtatgggggtgagttattctttgcaggagaggacctcagtacaggccctaccgtggtcatagttttgttgaaaggataggcactacaaaatgtttgatcaccacactcggctacctgggaataaaggcaactccagccttcatctgggttcctgtgcatgtaaactacctgaaggcaggagtttatgcctgcgttgttcattgatacatcccctctacctttagcggtgcctggcctatagttagtgctcagtaaacgatggcgggcacatggtctggtccatgtactgattatagagcacgactcaactttgttgagatgagttaaaattatcagacgagatggttcccttgtgttgggcataaaccatgtgctttatagaagtcagtattacacaaagccttgataatttcagcagcttctggtaatgttctgtaggtttgtcatgatgttttgcttgtcaggacactaacctgtgttgggtacaccttgttaatgggcatattgctggctcagttgatacctcatgatggcatgaggtttaaatcagggagagccgtgaagtatgacacaaggagagtcattagaaaggcagaggacatcatgcttctctctcgattctttgagcaccctggctgtgtgctgctttctgagcaagtctctgcttggggctgcagtctcctgccatggaagggtaggtatcatatgagatgtgcatgtgatcctgtgacaaggaaaagaggtggcctcatcacagtgtgtcggtcctttctgacattttgacctctcatttattggcaggcctgaattatgttctgatggctgacgtggccaaaaaggagaagggccagatgcccagggtctactttgtgctgctgggagagaccatgggtcaggtcacagagaagctgcagctgacttacatggaggagacgtgtcgtcactatgtggcccatgtgaaggtcagtcctctcctcctttttatcctcaaactttgatctctgcagatgttcacttggagctggtggaaactatttttattatgtattatgtgtgctcttccaaaattttatttcacagggaggagcatatccatttcttcttttcttttaaagttggcctctgacagcccttttatttatcttactgtgttgatttcagcctttaaggggggtcgtggtggtctaggagaccagtgatggtccctggctttgacttgttcttttgagaggtttctcatcctctcccctctatgaggcttggtagccttttcagaggagagccttggaagcatgtgcctctgggtctgcagtgatgctggatcacactgcacctgatgcctttctcagtggtctactacaaattagctcatggtcacagttaaggcattttaaaactggttggactagattcttcccccttgactactttctatttattttaggatgcattttttggcaacctttcccctcgcactctaaataaacttgcaaatgtttttctcctcttgaaattgtttgttaaatacactttgctgctaattcaggaggccaggctttgattagctacagagtggcccttgcagcaggcgctggcagggtggaagacctggcagtgcctgatgctgcaggaatggccagacactgacccatgggcagggtcagagagcggaggaggtggaagaatgcacttaatccaggccacatggtgggtggaatgagcatgggttttggagacacatagatccagtgtgtatccagctggacacataattgtgacctctccctgtctcagtctctgcatctctaaaatggacacagtagtccttaccttgaaaggtggtcatcaggattaaacattacacaatgaatttacttaaaggaccttgaatggtgtctgataaatagaaagcaaccaaattattattatttggttgggctgtatataattgccaatattctttttgacttacaaaaatggaaatttcatatagctcaacccaatattgtttattagccactggatttctgactgatagtttgaaaagtctgcagattagagatgaagtgtcctcctgttagtgccagagcagaagaataacagctgcttctagatgcttcagggctgtgtatagagagatgccccacacacccatggcccagagcccatgagtccatgcccctcagatgcttctcagtggggctgggctgtgtcttctgccaggactcctgcaggggcctgcccagaccagctgcctgagggcttgggatgctggccatttataaagctgctcctgtgcctgttaagccatacagccccgccccgtcagtcttagattacattggcttgttggtgcctttggtggggtgtgaggctgcgcagtacaggctcgtatgcaaacactgtcaggcctttgaatgcctgtgattggtgtttttatacctgctggggacagggcatcttctctcgggcctcttcttgctaggtctgttcacaaaacctttcctttaggtttctttgcagcttcttgctttggctgagaagttatcctttgttcctagttaccaagggtactggctatgagatgccacgtagagtggcaatagtgaagtgcaggccagaggcagggctgtttctatggtggccctgagggttactgggaaggatcagggttgcgcaaggggttggtcctgctactttctgatatctagggttgccagacttagcaaataaaactatagaactcctaattaaatctgaatttcagatcaccaatgaataattttttagtatgagtgtgtcccaaatattgcatgggatatacttatactaaaaacattttgctgtttatctgaaatttaaatttaacttggcatcctgttggcagattcaactctgctgatcttcctctacccaacaagtggcatttcttcactcaagcaaaacctggctgccaagaagagagattgagatgatggttagaagagtttggaggctgagctcagggctctcgagtgcagatccagcacagaccttgacgtgattattttggtcattctagggagagcaaaagagcaggcctgcttcagtgaattgggacctagagtcatttggatacagtggttgcttggccattttctcatgcaaggaggtgggagcggagaaatacaccagatagacacatgtctctgagacctttatggttcaagaggcaacattgttgccaaggtacactcaaggtggctgatactttatagccatactttataaccatgagaatgtttatttctggcagttactgtctgggctgtagcagaggactgggcaaatggcagagtgcacccgtaggatgagtgctaatggcctagctagctgtccacagaggaggcagcaggcaccgccccggcttactggctgtgggaacacagctatggaagctgaggcaggaagcaaggatgaggggaaggggagtggcagccgggccacctcctggagcaggaactggggcctggggggtgttggtcaggggtcaagagcaggatgcagtctctactgcaagtggagctttctcagtggagctggctctcggctttatggacaaatcaaagaagataaataaaagcattctggcttatcacacaccatatggctagcagacagtggggccagcatgaggggctgggcctgctttgtttaggctatctttaggtatttttttctttttttctttaagcctattccaatctttttttttctccctctccttttccctggaagttttcttgccatatatggtgataagtgactttatcatggaagaccgcacaggctaacacctgttttccaggctaactgtcttgtaccagactttgttccattcaccgtattggagggcacctccggagggtataggattttgtgataaggcacatcctcctgaggggagggcaggtactttctcacggcctcactgtggtcagcagagctgaggcagctccagccacttccttggcttctctgcctcagagttcacacaccccggcttatcttccctcttccccgagaccagcccagttttggggatggggcccctcccactagccagtcaggctggaggcctctggtggatctcacagtcacaggcgaaagcccaacacctcccctcagcatcgggctctccatgccctgcctgaccttacctttctagacccatcttctgccaccacatcccctgggccccagctcttgtcatgacctgcccctttcctcctggaacctgctccttacacttctttgccttggttcttatgctcacagaagtcagaggcctggtttgtgtcatattcatgtagaaccatctaccacctgcatgatttttacatttttttggtcttaaactcatactgcctgtgatattttctttcatatttttctctttaaatcagccaacttttggtctcaaataaaataatttaaaacagaaactttgtacctttctataagcagaaaaccatctaacatgtccccaaaacagaaagtaactgtaaaaataaatatattgaagacacaacagtgtcctagaattctagctggatttcattgtttgtcaaagttgctgataaagcgcccactccattcatgtgttagaaagggaaatgatcaagttctagggaaggcttaaagacatactagcaccgcgctggaactttcttcctgatgcaaccagaaggactgcaggggaattgactgggaacaacttttcaaatatgagagttgttttacagagtcatgcctatgtgccatggaaatccaccttgtgggcccagtctgggaagccctggccatgctctgctttgatcagatgtgccttgccccatcctgcctgctgaaggcttgctgttgttcaaggctcagtccacaggttttggacatcctcagtggcagctactgtcctaggccctggggatgccactgtcatcttcctgacttcttggagcttgttccatgctgcctgactcctgctttggggatacttgtcaggcagaaccttgttggagtgactaattgggttagctggagtgtggggtcacaaaggcttctgatatggagtggggcctgcttgcctctgtctggactgactgctgggaagtgatggcttgagatgatggagaagagaatttgggatgcatggtgtgtgccaaagaataaatgcaggtgtcctgttgttactccatctgtttctggtttatgtgttcttacctggatgacagctgtgctcatcctctaatcctgtacaataccttgagagcacaggccttttgtgagatcaaatgcctatgcatgacaggcaaataagcaggctcttcaggaccagggaaacgatggcaacagttctgagtctgatgcagggatggcagagaagcccaggcagagtgcaggggcagtgatgtcattccctattgtgaggatcagtgacaccctctagaggcatttagggaactttttttgaacagaaccatgtgtcagacactgtcaagaaggccaataacggtattattgttaaaaacaaaacaaaacaatctacactagacgagggaatatgcacatcagcttttctgagaagctgcagatgttcataagattgttcttctatgttcctgaaggatttttcaaggaactttgaaacctaagtggctgcagctccttccttgcttttgtgggcagatgctcatcctggcctggcgaagggtgggacatcaccctggccaccaggtctcctgagagatcataccctgggatctgcccaggtgttttggcctgtttccattttcatatccaacaaaatgcgttgggaccatggcttcaatcacattacatgctgtgagtttagagtgttggatgctggttttcagaggtgatcaaacctttttttttttcttgtttaagaaacagatagttaagaaagggagattaagttggagttaataagaactctgagaaagaggagaaagaaaaacagcaaaagtttcttctttatctggaaaataacatgctaaatctccgggtcatcttgagaaatcaaagaaatagctaagaaaaaaacagttgcagggtttggcaaaaggggacaccaaccttagatatgaggtcttctgaaaacttttaaaatttgtttattttttgaatcagtagtgtgtatagttaaaatttttaaatggttataaaagttgtcaaagaaaggatgtctttcagctatcctatttttctcccaaaggcaaccacagttccattttcttaacgtgtctttcaaaagcttgtcaataaatatagaaatctgtgtgtgtacctccttttattttatgcaaatagtagtatactgtgtgcacactgtagtaaacttactttttcttttaaaacatccaacagcagaatggaggaacagattttggcaaatcgcacaaaatctagctgtaccagatgaaatacaactcagcaataacaatattatgttattatgatacacacaataacatgaatgacttttgaaagcattaaactgagtaaatgaagccagacacaaaaggctacctactggatgattcatttatatgacgttctggaaaaggccaactaaggagaaagcagattggtggttttcagcggccagggtttgggggaagggctgatgatgattgacttcaaagagggatgagacaactttctggggcgatgaacatattctaagatcgtggttgtagcggttgtatggttgcatttattaaaacttaacagagtgcacacctaaaattagtgaatgttatgtatgtaaattatatctcaatcaaacttattttgttaaaaaaagtttcgtggagattgttccatattggtgcatatagagctttcctgttctttttcagtagttctttttcactattccttgatttatttaacctgtccaggtggtcttctatatgtcagttccagactaacctgatctgatgcttgtagactagttatcttagtttgcttctccagaagaggctcctcttctctcccctagatccatagtatcctggctgaggacccctgagagggcagcatggaggggccctggtgctctctaaggtgaccttggacatatgtcctacagaggacaagcctctcagctatagggtgcccaaggaaaatgggagatttttcttgattcctgcagttggctttgtgcccttggcaggctctcctggtctgtaggtagcatagatggcctgaatgtttggtaaggggtgctggaaactagggcaagaaaagaggggaaggttgggatgcatagaactgatgtgtgggaaactaccttcatcatccagctcaggtgtgaagccgctgctcatgcgatatgctctgctcacacagatggcactaaggaaccgggaagctgggctttggagaccacgctggaagtcagctcactgagtgtgggttgccttgaccatctcctctgggaggccatgttgtgcatagctggagaacaaactggggatgaatcaagaagggaaagggtgtggtgaatgttcagcatgggagctgatatctccgatgagcactgtttggccattgatttatttcttgggtgcaatgaagggctcttaatcttctgcatttggacacttgccacagaggacattgtgattagcaaaggaaggcacaaaaattctaatccaaaggctttgcccgccttaagtccttttttgaaatggagctgatttaaatatgtaagtatggtcacagcattgacacttcagtggttatcgtaagcttatttgtacagtatgtgagatgcagtttgtagcaattgctatgggtaaaatttttattttaagaggtgactttctatttacagttattcatttacactgggttcatctattaatatatactgttgatgcccttttaacactggtattctttgaagtcacacatgataatgtgttctgttttattggttttgtctttatatttgagatgtgattataaagatcccttctgcctcaaaccttgaacttagatattcattataagcatgattcccttcaaagtaatcaccttctagtcattcctgttttgaaatttcttccatggtttgtttattcacttttatcatggtccatttttactctaggagttaattcaaattttggaagcagcaagatttctctgcaatcctctctagtagataatagtgtgtttggggaaaagtgaggtataataatacaggaattagtattaaggaatgtagtaattaaactccttttgaaaatgattttaaaagaattcccatgatattcaggtaatagcgataaaagcagctaacactaatcgagcatttagtatgtgctggttactgtgagtcactacatgtgagatagttactgtttttatcctcatcttactgtttcaaagacaaggcatagaggagtgaagggacttgctcacaaccttacagttgacaagtagcagaggtaggatttaaacccgcaagtctggctcctaagacttgggtttaaaccactacattgtaacacccctcataaatacaagctagaactattagtaactagtacttattatatgccagatactcttctacaggctttacatgaagaaagagaggttaagtaacctgactcaggctatgaactagtgagagacttcactgcctcttcataatagagtcctgggaccttctctgtgttaagcatatggcccccagaggtgacagcttttgggggtttatgttctagagcagtgatgtgctgctaatgtttaacaactagctcttggaaagaggggacatgacttttgtagcattttgcaaatttccctggtgtaaatattcttatcatgtctgatttcaagctaccaatgagacatcactgaatgtggagttaggaagagatgcacaatagcacacagttgtttagtatttccaatagctctaaatatctttaagagcatagatgatagtaaagtatggtaaaataattaggaagttatgagtgttgagtatttattacatttatcttaatataatttacttatttttaagtttattcaatttaacttttaataatggctgtgtttaacaaccctggctcataaactttctgaaaatttaacagttggcttttggaaacccactgcagcaagctccagcacacaactgaatatgttgagggtttttttgttgttattgttgtttttaattttagattcacaaggtacaggtgcttgtttgttccatgggtatatcgcatactggtgagtattgggcttctagcatgtttgttaataagttggtcatatcactcaagtcatgcctgatacacagatgtttgattatcagagtcttttttctttcttgtttcctgtggctttttaagttgatgaataataggaaagtaaatttgtggggtcagttaaaccaccagacgacagcttttatgtttgtacattggttcagaggtactctgtattttgactggatttattggatagtgtaattgtttccatttaaaacaatggaaaagatttcatttaaatttattgagatcttatttttcaccctcattccgtgcacatttgggattctgttcgccagcccctctgcactctgaagatgcacagcagcctctctgtactctgaagacgcatgaattgctgactgttgggcttgcttggaggggactgggggttattacctcccacaggactgtttaagctctggaagttttcctacctcctgcaactgaatttagtcttaattagtacagagtgaactagctgtgaacaatctggttttcttgctttgtgccttgatcatgtgagacctaagggctggtcctgcccttttcttatccattgctttaatcagaaataacatatcaaggtggcccaaattgtgtcactattctttcctttgtcttctccacccattcccacggcatccattcctaaggtcatttggagaattctctgttccaataagtgggatccacatggctcaaggagcaacaggccttggaatcactctttgagtagtagctggtccctcagtctaccccaaagagctgcctcgccagacctccccacctcccggacatacagactccagatgtggaaaaagcccttgccatctctatcctccaacacagagctttggtgtccgagacacatccaagtgacaggcccaagagggcctctgaatgaagacggatgagccgtgtggacacagccacactatgttttcgtgaaggcataagaccatgggccaactttctgggcatccagggctggctgcagaggctggagtgagtggctttcaaggcaagactgataatgaaagtcgtgtttgggtgggaatcacaagcaggggaagtgggggagccagcttcccttcgtgctgtgtgtcacaataagataggacacagatgcaaaagcagatcgctacagctggatctgggtaaaggtggcagtgacgcgtcggtgcagagaattcctgttttgaggaaagattcggagccagctaaggttttctgagggcccgtcatgtctcagactgtcacacttattcctctgtcatgtatgcttaagtctgttttagatgaccccttgtaaagaaaggaagcctggcccctgaagcctcattgcgtgggataaggggactaacatattctgtggttgtaccagcaaattattatttatttcttattttataaaagtatagattttattcatgcctatattgttagagaaaatcattatttttagtcaacgtattagtattaatatcatggcctcttttcttctcattttggaaggggaatatttttagactctttaatgagagagtcattttctcagtaaatatttgattggcctgaagttaagtgggtaggcgtaaaaaattatggaagtattggacttgagcaaacttttgacaaatagcgctctctttctctcttgggcgtatgcgtgtgtgcatgcatgtactccagctctctgtgtatgttacacacacacacgtttttcgcataaaacatttttattttgggccaggtgtggtggctcacgcctgtaatcccagcactttgggatgctgaggcaggcagaccatctgaggtcgggagttcaagaccagcctggccaacatggtgaaaccccgtttctactaaaattacaaaaattagctgggcatggtggtgggtgcctgtaatcccagctactctggaggctgagacaggagaattgtttgaatctggtaggcggaggttgcagtgagccaagattgtgccactgcactccagcctaggagaccgagcaagactccatctaaaaaaaaaaaaaaaaaatctttattttgaaataatagcagtcttacaaaaaagtcattaggatagcacaaagaaataccgtaaattcttcacccagattccctaaatgtcatttgctttgtaattttctatctattcgtacttcttacctgtttgagagtaagtcggagacgcgatgcccccttatccctaacatcagggatatttcctgagaacaaggacattcttttacgtaaccatagcacaattattgaaataaggaaattaagtgatacattactgttagcttatctgcagaactcactcaaatatcaccagttatcttcatgtccttggtagcaaaagaaaatcccgcactattgcatttggctgtcacatctctttagtctggaaaagtcactcagccttgctccttcatgtccttgacatttttgaagagtacaggtcagtttgtctgtttcatcatgattagattcaggatgtatattttctgcaggaataccacagaatacttgtgtcctatatatttaaaaacatatacatccaacatcactgaaggtatgtatttttaactcctcctttaaagtggttttccaaagttagttgccatccccaaaagggagcttttagacattgagagaggtgattatgaaagtacgatagcttgctcaccacctctctcctctgctcctgggagcacaggggagtttcaactctggggaaggtgatcatttgggtcattagtagcgctttgagtaccatggtgtctgcagggagttcccagttcttactgctgtctgagaataaaacataatatctttggtcttcacagaggtatcagacaggaattccactcagcttgcaggaattgagaccccaggacaggggcttaagcacatcaagataatttctctctcttctagaggaagagaagttgctgatgttggttcagtgactcgaggatgttctctgacctttcacttattcaggaaatgtgcattgcatacctattatgccgtaggctggggggccctcagctctgctgtgaagagacaaggatccttgtccccctgggagtttatatcccagtagggggagacagacaatagatataataagaagaaaattaaggtgcattagaaggcgatgaggctatggaaaaaaagaaagaaaatagagcccagtgaagcgggtttgggagtgcaggcatggggttatgggggtcagggtgacctcactgacgaggtgtgatttgagcaaagcatggaaggaggctggggagttagcacagcgggttcctggaggagggctcagaccagtgtctgagtgtctggtgtgtctgaggaggagcagggagaccagtgtgggcaaagaggtcagagtggcagtgatggttgtgagcgggtcatcttgggcttcctaggccttgggaaggatttgcctttactcagagggggatgggagtgtgtgagggatctgggcagggtggtgacctggcctgccttccatttttacaggcccctgctggcggctatgttgggaaggcctgtaggaggcggtagagcagcaggaacggggttaggagactgagcgttacccagggaagagggtggctccactggggccatagtggtaacattgtgagaagtggtcaaattctgcgtgcattttgaagggggatcctacagcatttcctgagggtttgattgtcagttgtgagggaataagatatcaagggtcactccaagcttttcagcctgagtacctaaaaggatggagttgtcactggtggtgttttcaacggaaggtgcaggtgagcaggttgaaagggggaagatctggagtttgtttttagacacactggtagatgtttaagtgtgtatgcgtatgtatgagtcttcagtttgagtagtagtctgagtaagaagtatcaatttgggagtcgccagcagacagatggtatttaatgccaggagatttgatgagatcacccagggtgtgaggggagatagagaagagagggggaccaagggctgagctgtggacactccaacactaagagcatcttttcctcctacccctaaaatggctctggggctccagccattgtatgtgtttttcatgcaggaagaagtgggacatgcaaaggggctctttataatctggtctgaggcccctgtaaagagcctccagtgacttctgcttataacgcattgaccatccatattttaaaagaggttggaagatgtctaagtaccagctagacatcttataaatcctatcactatagagttttgctctccagcagaactttctgtgatgaaggaaatgttccgtatcagcactgtccaatattggtggccagtgaccacatatgactgtgagcacttaaaatgtggctagtgccaataaggcattgactttttacttttctatacttttaattaatataaattcaaactgaaataacacatgtggctagtggctaccatgttggacagtgcagatattgaagtttgatttttaagaaggagagggacagacactggacagacaactcacagctcctgccacagtacagcatggagcctcccaaggcactagtcacacagatcaagccacacagccaaatggaaatacaaataatagattgaggtcacattgactgtttcacgttgtacttagacatgctgattaaaacctgagttgcaagtgtgccatggaacataatctctccctctagtgttttggaacaatcacacacaaatgtttatatccacatacaggccccatatacaatgggggaaacagaacagaagaaggttggatggttcaccaagttgagtgggtccttcaaaggatgtcaccatcttggatgtgatgttttctgttttcagtggcatagaactagataaaaggtggcagtgcagaggatggaagtggtattgctcagtgggaaagggaaggcattttaggtttgagacatattacaatattgccttttagcgtagaaaagccctccttcctgatgctcttgctagtgctgggtggaaagattccctttcaactcaacatgtgtgaagcacatgaactgaagcactcttcctgcttagcatggcaggggctgggccaggccagggtggaccaggtcttgctctgatcaaccacatggtctcaggcaagttgcttcacctttactgctgagcttcagtgtcctcagctgaaatggggagcagaatactgacttcttagtaggggtctggtaaacactgggccccttttcccttctgctctaccctgcaaatcttttcctctttctaactgcctctgcatttggaaggggtcaagactcgtttcatagttttttgggggattaaaaaatgattagaagcagatggtgagaagaaaatagaaagtatggagcaaataagaaatgtgggaagagaagagggcaaatggtaaggcagctctcggagctggcacgttctttctctctggaccagagcaagccagagcctctcagtcatcttcacgggctggttgacaaggactcctcacgttagcgtgcacacgaagaacctgggaccttgttcaatgcagatcctgatacagcagatctgaggtgaatttctagcaagctccctggtgacgctggtgctgctggtccatagaccacaaagcaaggagctcgaagacatagataccaaaagttacaggggaaaacggacaaagccaccagctggcagttgatgcaggtatcagaagcaagtgggcctcggaggggccagatgcctctctcctcacactgaccgtgagagcgagtgctcctcatcaacaacgtggggccaggcttgagtcagcagcactgactttatgtgacctagtgcagctcgccagcccacgctgatgtgtgttaatggagggggtgccccttataggagggtggtgtgggctataatttcttctgcattctctgcctattgcttgaaggacagtgttgtcagcagtcaactgactgagcttgacttttcagcagtttttttaaacttcactgcagtgtttttggacacagctatgtcagaaatctatttccccttctcagagaccaggaagctcttgaggtacaagctcttattaagcagaaaattttaaagtggttttccttctccttttcttgggtctgctttcttggggcaaacagaatacgagaagccagcttagaaattgcatgggtccttcctgcattttgtgagaaaatggtggcctcctatatttcttccctgacaggttactgtgggccaccagcctccttggtgacttctgttttgcagatggggaatttgttgattgtagtgagtacgctgtgtgcggcagaaaggattctgtcacctacagagagctagggaagcgcccaggctgaggaaacccaccccttcgaagcagccatccataggtagcctgggggtcttttcacaagacagccctagccccagttcatgggagttggaacaatggtgggtccaatggtggatgaatagtttattcacatgcatcccaggagatttgtgtgaagagggtgacagagagttgcttcttttaaaaaaaatgtattaagggctatgtaaataaaaagaagaaattaagttgtaacagtaacaataatagctatcttttattgagcatttactatatgctacatgttttacatgtacatgaagtccttataaagaatacaattacatatgttaatatgtgattatatacagaaaattgtatcagaattatatctacatatataaaaataaaataaaatctcattttaccattgagggatctgagatttagagcatttaatttatttaagatctcacagctggtaagcagccaagtcttgggtttgaatcccatccagcaaccaactagttctatgactttgaatgcaaaagatgatggcttttctcattattattacctagttagtctgagaaagagaaaactccattctggatggcccatttctgggtggattggtgctaggtttctcctggtcttggacgaggttgcacttttcagccgctcctgtgcacgtgtgtccgtgctctgaggtgggaggaaagctcaatgtgggtctgtgagtccagggcaggcaggagtcctggggactggaggttctctgcacttctgtttgatcttccctgcctgtctgtggcctctgcagtttaaacaatgactgtcacttaaacctcttctgaagagcttgaagtctggtccatgccttcagcccaccagcatgtgttgagtacctgttgggtacacagctctgtgtctggtggaggggaaacaaagattaaaaagactgggccctgtcctccaacagctcaggttatttcatgcctgcattcggggcactgtcttacttggcctagtcccacacttgtccctcccaccccttgcttctctattttcaattcacttctgtttctacacacatcagtgatgcagtgtcctatgtacaggtgtgcctgggacagtcctggtttatgcctgttgtcccagcataatcattaatagttctctatttcactctcaagtgttccgatttggatggcaccctatttattgagtgctcattgtgtgccagacactgtgctgggcccggggcagatggagactcgtaagccataaccgctgcctcccaggagctagtctgctggggcatccgttctgaataccatgacttggcaagtgaagcattcccatgccttccagactcctggctctgcctgtgtgaaacgtactccatttccagagccagctgccgagctttttcccctgggctgactttccaccaccctgacctgcgattcctctctgctaaccctcctctcaccgttctccccagggtgggctgtgggccttctggtgctgagctccctcacatctgagctgtcttagcaccttctttccgcctgtatttgtgttacttggatatttgtgttttatcttctgtaccagagcataggttattttaaagcagggagcttatggcattcaacactgtcaccctgggaataggacccccaaaacactttatttctcaaataaatgatggagtaggttccagcgttgtttcttccttgctgtccatttctaaggatgagtaaagagttaacgtattgaacttgaaaggagagatttttttccctcttgtaataaatcaaacttttctgaatctggaaaagtgatggatgaaactatgtgagcacacacacacacacacatatacaccccataaccattttgaggtcatttaataagggattgctttctggataatctcgctccttgggtataaatctaatgtgaaagggcaggggtcagatatttaccccaaagggttggtgtgaggataaaatgaggcattgcttttaaagtgctaagctcagcccactgaaaaatacgcaaatgcatcagaagagtcctctgtaaatccactgagctggaatttccaagcaggtgtccttgctgcctcttgttagccttttgtgagttaattctttgtttaataacaaagagctgccagatggtaattttggaggctcagatacactctgttgcacgtgcctgtccagcttacttaaaatatgtcagaaagaatgagggaatgactcaaacaatttcaggaaatggttcaaggctgtgtaacctttaaggaaaaccacacggagccattaccttgtgttgaaaggcagctccctggctccctgggaggcctggtggcaagcagtgagacacttgatttaggtgaaggggggccccaaggcagtggtgcctcccttccttctgcccagaattgaggtgttgtccctacagtggaaactcaagagcagcactgtctgatagaaatataatgtggtcacatctgtaattgtaaatttccttttttttaaaattatgctttaacttctagggtacatgtgcacaacgtgcaggtttgttacataggtatacatgtgccatgttggcttgctgcagccatcaactcatcatttacattaggtatttctcctaatgctatccctcccccagcccgccaccccccgacaggccccggtgtgtgatgttccctgccctgtgtccaagtgatgtcattgttcaagtcccacctatgagtgagaacatgtagtgtttggttttctgtccttctgatggtttgctgagaatgatggtttccagcttcatccgtgtccctgcaaaggacatgaactcatccttttttatggctgcatagtattccatggtgtatatgtcccgcattttcttaatccagtctatcattgatggacatttggattggttccaagtctttgctattgtgaagagtgctccaataaacatatgtgtgcatgtgtctttatagtagcatgatttataatcctttgggtatatacccagtaatgggattgctggatcaaatggtgattctagttctaggtccttgaggaattgccacactgtcttccacaatggttgaacgaatttacactcccgccaacagtgtaaaagtgttcctatttctccacatcctctccagcatctgttgtttcctgactttttaatgatcaccattctaactggcatgagatggtatctcattgtggttttgatttgcatttctctgatgaccggtgatgatgagcatttttttttctagtagccacattgaaaaagttaaacaggtaaaactaatttcaataacatatatcagtttgctagagctgccataatgaagaccacagacttgtggtttatatgaacagaaatgtatttgcccacagttctggaggttggaagtccaggatcaggtgtccacaggtttggtttctcctgaggcctctcttcttggcttgtagatgactgccttttccctgtgtccccgcatggtctttcctctgtactcatatctctggggtttctgtgtgtccacatttcctcctattctaaggactccggtcagattggattagggcacaccctgagggcctcgttttaatttaatcaacccctttaaaggcccagtctccaaatacagccccattctgaggtactgggagttaggactttaacacaggaattttgggggaacacagttcagcgcataaaaatgtatattatttagtccaatatagccaaaatgttattatttcaacataaaatcaataaaatgttaatgaaatatttgccttctttcctgtactagggctttgaagtctggtgtgaatattagccccattttatgatctcattaggcacacgtgggtagtggtgaccgtatcagacagtgcaggtctagtgtcgaacctcctaatctcttgggagaccttgggattgtcgtaaggaggcctgagtgaattcataaaacatatgcagttcctgaatcaactaataagtaaaagtataccttttatcacctgaggttctggtaaatattttggtattataaaggttgctttcacacttacaaaagttaagaagcatggttctgactttcctaaactggggtttctagagcccaagctccattagcatggtgatgacggcctgcaaaatctttccagcatttcagaaagcctggtgggatcacaggggttgccattcagctactgacaaggtcagcatcattgctttcagctggcgttttagtacagtttttctggtgaccttgtgctgatcaaactttccgcgtggctttttatgacactgtaacaattactggggtcatgcctggagaggtggcccacagttcatgcacaggctcgagtacaagccttccggggactcatctctcagccctgttattattctcagggatttggagggtgcagaggtagatgaagtaagcaagcactattgtgcttcctgtgttgaagtcagggaataagaatttcctctgtgccacaaataatgctccccacctgtatagaatgcctgggaaatgcaacactggccatccttcagctcttctgcttacagctgttgtgctggtgggtctcctcctattctcagagcagagagccacgaatggggcactcggggccgtgacaggcatcccttagctctggccttctggttgtgggcagactctgctgtgtccggcagcccatccagcgttggatggcatcagcaacctgaaagccctttcttaggctgaaccagagtctacctccatgtaatcacacactcccctcctatttctgccccggagcacctacagatatctgtctgtctgtccccatccccactgcctacttcctccagactcagcatcctgagttcctttgggttactagttcattttggaacttattccactattgaattatccgtattctttggttttatacctttattcctctttagttgaccttttagatacttttctaaccatgccccctccccgctgccccgaaagatcagggaaaataagaagaaattcaaacccttgttttgctcctcatcagcgacagtggtagggaagatgcccacggcacggaggttcagtggttgttttcattctttcctgttagccagtttcctcaaattggtcagtataatcctacctcttggagcgatagctggctggattcttctgccattttggcagttatatattggtctggatttaaaagtgatgtttattccatagctctcctgaatctgacatttgttcctctttcatcctatacttccctgggcatgatacccttctttccatcagctgtgttggagaaatgtggcatgtggcagatgtatccttgcttgtttaattaatgagccaaacagtccagaaacttaggttacaaccaaggtagtctggcaagaaatatacatgaattcaaagaggtttgggataattttattaatgataaaaccataaagaactcagaaaatattttaagatgcttggcatcaggaactatttcatttgtctccatatccccagcaccacgcagagtaattgacattgactaattgcccaataaatgttcactgaatgttaggagaagctggagtatttccaaaatgaacatatgctcaagatattctactagaagtttacaatgttatcttttacatttagattagtgatccattttgagttaatttttgtgtgttgtccaggatagtttcaaacagttgtgcaaaacaattctgtttgttggttatcatgggtagactaatacctgtcagatcatataacccgacagtcagctggaaacacttggtcacatgagattgcctatctacattttaaatttggcttcagagggagcagccagcaactcccttcaaccccctaaattttggattgtcctaatgaaatcttggactgaagcagtacatttttaaccaggctttctcaggagatttggttcggctggcactcagcccacactttgcttaactctgagcaaaggtgtccgtgggtggataatcccacctccccattctggatgtgccagcacttttcctactcatccccagttatggaatgtctaattctttctcattttctcctgtcactaccatgctgcagtgagcatcttgggtcacctaactattaattctggaggacagattccagccgtggctttgctgggtcaatgttacagccatttatgtcccctcagatgttgggttggtcctggatgctgccctgtaactccatcacacccatctgaagtcctgcctggtaggcagcagacactgggtgtggcttggtttctcatacctttttatttcagtccctggtgtttttgtcatcttgtgtggcagtggcagtgctccagctgatcatttttatgggacagtccttccttgatgagacccagatccctgtcacttgacaacataaagaatattattcttcataccagcatttcccaaagcattttttcaaaggatagtaacgacttttatgtcaaaaaacaaaacaaaattttgaattcaaattaattttggaacataattgaatttaacgcaggctttttattgcaggacttcatggagctttagaagcccaggcacgcaaggaggatgcactgtttggcatttcctaaatgtacttgaccacggaacaccatttttctcctgaggtttaggaaatggtgctatgatatagattagttttctatgaataacttggctttatgccttcatataccttttctctctactcatgtagaaactcttcttcagcttcatgttttaataatggaagaacttagtgatgtttcatatgtagagatttttctctaggtccttctcatcgataagacctgtttcaagatatggcaagccctagttctgatctctggggtcctcaccatttatagacttccattagtcctgttgtgacttaattgttttgttatatttttggtggcctcctacactatggaagactttctgaaagcccatatctcatgctaaatttagctggatttttaacagccttgattgattgctggtcttaatggaagaaaatgtgatcctttctcttcctcccttgtcattaaattattactaatctatgaccagaggaagcagccactgcatacgtgggtgtatttttaaaaattgtgacacatcatcaagatggatatacttgcccctttaattcaacaggcacctgttgaatgcctgtgcatgcaaacatgatgctgggctgagccctggggcttaccctgaagagctttggagcccacagcagaactcccagccaggctcatccaccactacagccacaaccatccctacctggagaaaggggctaaaagaagcccatgggattaacagacattctgaaacaccaacccttaggaaaggagtagaaatgggagttgggattaaaagcagaggtgaggttaaagggtttgaacaaaatgggcctgatcttgggcttctgaagtcctgtatagtgtaagtgctgacctgagggcctgtggctctcctgtagtgagggaggatccaactggagtatgacttccacctctgcatggccagcctggtgacgtgaagcacatttcttatgtcaggttcccagtttcctcttctgtaaaatggaggcagcatgggattgtaatgaggattaatggagctcatttacctgaacgccccagagggtgcttagcaaatactttatgcttcttgtgggtccattactttcccttgcctgtttttttagggaccctggagtgttaccttggcttctgattaaaagctaggttggcagatgcaagcacacatgcctcctatagtgttgtcctagactggggtggtgttagtggtcaggcaaataattgatcactctgtgttctcaagacaagcaatgggtaagaagacaaggccacggaggtcaaagatacagaaagataattgccatatatgctatgcagccagtgcccctacctcatgtgattgtagagtggttcttacactagggtggcatagaatcacctgaagggcttgtttaaacagatcatgggtggtgggtacagcatttcaggtgcggaagatgaaaggttctggaggtggatggtggtgatggttgcagaataatgaaaatgtacttaatgccatagaactggacacttgaaaatggtgaaagtgatacatcttatattgctctccctgccccatcacaaatagattgctaggctcactccttatagattctgattctgtacctctgaggtggaccttaagagtctgcatttgtaacattcccacgtgatgctgctggtctagggaccccagtgtggaacccttgctgactgggttgggagtgacgttgggaactgtttcgccagaaatactggggacccttgagtggtaatggaattggttgtatattttagtatgatagttcttatagatgataaagacctcagaaaaatctcactatgtccatgcccaagagttccaccatgagcacatgccttgagggcagtgaccctggctcctattgtctctgtctctctatatctataacttttaatcttgaaatagtttaagattcataagaagttataactcataagaagttttaactcataaaaagtcaaaatagtacaatagtccccccttatccattgggaatacattctaagacccctagtagatgcctgaaactgtgggtagtcctgaaccctttatctgctgttttttcaatctgataactgagacagctagtaagggattaatgggtagtagtgtaatagcatggatgtgccggacaaaggtgtgattcccatcctgggcagtatggcatgagatttcatcacactactcagaatagcatgcagtttaaaacttgtgaggatgaggggaactactctatggaaagattcaggtaccctttacccggcttttcccaatgataacatcttacatatacatagtacattatcaaaagtaggaaactgttattggtttaatactatacattcttttaaaagagtgctcaactcaagattaggaatctatttttcaactaccattagccccactttggcaaggccaggtgggataagtgctggggctcctatggtgggtgtgctgcagtcttcagcagagcttggctacagaggagaaagatctaaactggaccaatttcatatggtcattgcctctggcttgtggctgatcatcttgttctttggaattgactgtctcatgaaatagtgagtttcttgtcaccagagagatttaagcaagagccatggaatccctgtccccagcactgagaaggaacatgaaccatgtattccctgaatgtcttattccttaaaaatcctgtgattctatcaattgttttgttagagtttgtggctgacattgattacactatgagtcatgtgacattccatgttgatgtagttgccaaaatgctcgccttcctgggttctgctttcattagtttgagagaggagctgagccacagaaaaggggctggagtctgctagattaatgaagatttgggatgtgtagtctgttttcacactgctgataaagacatacccgagattgggtaaattataaagaacaagaggtttaatgaacgcacagttccacatgactggggaagccttgcaatcatagcagaaagcgaaaggcacgtcttacatggatggtggcaggcaaagagagagaacttgtgcaggggaactcctctttataaaaccatcagatctcatgagacttactcactatcatgagaactgcatgggaaagacccatccccatgattcaactacctcccactgggtccctcccatgacagtgagaattgtggtagctacaattcaagatgagatttgggtggggacacagccaagccatatcattccgccccggccccttccaaatatcatctcatcacattccaaaaccaatcatgccttcccaacagtcccccaaagtcttaactcatttcagcattaactcaaaagtccacagtccaaagtctcatatgagacaaggcaagtcccttccacctatgagcttttaaaattaaaagcaagttagttacttcctagatacaatgggggtataggcataaggtaaatacactcattccaaatgggaaaaattggtcaaaactaaaggctaaatgcccccatgcaagtccaaaacccagcggggaagtcaaatcttaaagctccaaaatgatctccttttacttcatgtctcacatctgggtcatgctgatgcaaaagataggctcccatggacttgggcagctctgcgtctgtggctttgcagggtatagcaccccacctggctgctttcactggctggcattgagtatctgtggcttttccaggttcatggcacaagcagttggtggatctaccattctagggtctggaggatgggggccgtcttctcacagctccactaggcagtgccccagcaggagttctgtgtggaggctctgaccccacatttcccttccacactgtcctagcagaggttctttatgagggcccccgtgagggccccactcctgcagcagatttctgcctgggcatccaggcatttccatgcatcctctgaaatctaggcagaggttcccaaaccttaattcttgactttgtgcaagctgccaaggcttggggcttgtgccctctgaagcaacagctcaagctgtaccttggccccttttagccatggctggagtggctgggacacagggcaccaagtccctaggctgcacagagcagggggaccccaggcctggcccatgaaaccattttttcctcctaggcctccaggcctgtgataggaggggctgccatgaagacttctgacatcccctggagacattttccccattgtcatggcgattaacatttggctcctcagtacttatgcaaatttttgcagccagcttgaatttctcctcagaaaatggatttttcttttctatcgcattgtcaggccacaaattttccaaactttaatattctgttttctttttaaaactgaatgaatttaacagcacccaagtcacatcttgaatgctttgctgcttagaaatttcttccaccagataccctaagtcatctccctcaagttcaaagttccacaaacctctagagcaggggcaaaatgccaccagtctctttgctaaaacagcaagaatcacctttactccagttcccaacaaattcctcatctccctctgagaccacctcagcctagatttcgttgtccctattattatcagcattttggtcaaagccattcaacaagtctctaggaagttccaaactttctcacatttcctgtcttcttctgaaccctccaaactgttccaacctctgcctgttacccaatttcaaagtcgcttccacattttcagatatcttcacagcaatagccccctcctggtaccaatttactgtattagtccgttttcacactgctgataaagacaacaataccccactcctggtaccaatttactgtattagtccatttttacactgctgatagacactgagactgggtaaattacacagaaaaagaggtttaatggactcacagttccatgtggctggggaggcctcacaatcatggtagaaagcaaagacatgtcttacatgggtggcagcaggcaagagagagaacttgtgctggggaactcctcattataaaaccattagatcacatgagacttattcactttcatgaagacagcacaggaaatacctgtccccatgattcagttacctcccactgggtccttcccatgatagtgagaattgtggaagctacaattcaagatgagatttggatggggacacagccaaaccatatcatgggggtagagttgagggaaggagagaacattccagggataggaaatagcacatgcaaaggtcctgtggcatggcctttatgtgtaaaggagatattgataaaccttggtatgaaagactgtaggtctctgggtgcaaagtaatggctgagcatgaagctgaattagacttggccactagcttactttgctgttgacagaatgttggtacagattgagcatccttaatctgaaaatctgaaatctgaaatgtcccaaaatctgaaactttttgagtgctgacatgacaccacaagtggaaattctacaccttacctcatgtgatgagtcacagttaaaacttttatttcatgccccaaattatttcaaatattgtataaagttacctttataggtcatgtgtagaaggtgtatataaacataaatgaatatgaagtttagcctttagtcccatcctcaaagtatctctttattatatggagatatttcaaaatctgaaaaaatccaaaatctgaaagacttctggtcccttatatttcaattaagggatatgcaacgtgtacttctgcagctgccttgagaatgcatatcattgaataatgttagtgggaggttttaaactatctgaagatcacacaactgtgagagcccagctcccctgaaatgcgtagggttggtcagtgattttgctatgcgccaaagcagctgccttgatccctcagagccccggcatttctgcccggggtttggccacccctggccttggctgacttctcatggatgcagcaaaaacccagtaggatgcacctctcaagtggttggcagcttttactggacagctttagagtcctgtgggttattctggttgttgctattcttaaatattgagtgtccaaaagattcgtgaactgcatctcagctgggtgggaccctttgggacaggagtaggggaataatgccgtcgttaactgcaaagaggagttttgggaccaggttgtcttataggtttattttgaacaactgataggcttggtattgctggaagtggatagatttgggttgcctgtgtctagcaggtggcttccttttccagtatgttgcccactggtctcatctatcagactcacttgagagtatttcattattcatctaataaaggagtatgtgagattcccagaggaggaggatctacttctgtacttgacctgggtgaggaccactgggaacatttgcacctttcaccattgcaaactttgacatgtgagagtttccagaaatacagagattcttattttaatcctttttctttttaactgcagaagggaaataataatgggatagaataactgcagggagtagagagatgagaaaacattagaaaaaatagtacagaagtagagctggatgagaatccaagttatgagaacctattgatgagaggcatgcagaaataaaaagcccaaattcagtgatctaaatcagggctcagatgaggctgtttgtattgcacggtaggaatatatccagaaacagtgggccttttataaattaagcctgccattctccaattgcttaagacactgaggcccatcaggccagaaacatatgacccactttttctgagaaggaactttccctttaggagtggtaatttagaagaaaagaacaagcccaatgaatagtcccttatgggaggcatctcagcagaggccctttttgggggcaggagggattgcatagcaatactgcctacccagagttgttgttcccaggctagggtccaactcagggcagggagatctactggaggcagcgtatcacacactagttgtccaagagatggagagagagtgcaaaatctgagctgtgcttatgggaagctcggagtctcacaaaactacacccatgctgcccatggtttatgtttaatgaatgaaatgatgattaagataggacaattggacaaaaaggctgggccttcttaggtgggtattgagtgggaagtgattcaagaggccagacattctgtctggacattagctggaagtggggctggacaagatgaactagagccctcttgtggtcccatcattcaggcctgtagctttcatttgagaccagtggttcttaaacttttgcagggatcagaatcacctggaggacttgctaaagcacaaattgctgggccccaccccagcgtttctgattcagtgggtctggggttgggactaggagtgcatttcaaagcactttctggagatattgatgctgctggtcctgggaccacactctgagatacagtaatctagaccatgaaggaggtctggatcctggggagggaatccgctttctgctttcttaggcactaggaaggcaaggagatacttggggctggaaggtggcaggggagcatggaagggaggagtccttgtccatcgtgtctcaccatctgaggagctgtcatcctttattcatcctgcccttctgcttgccctcagtctcagaaattccaaaagacagcttatgaccctgcatttttggttaaagaaaggagggaactgaactgtctgctctatgaattctgggctagtggggatcatggggattttgtaaattattttggtagcccgttgagttttgtctcaggatttcagcggaatccaaaccatgtgacatggaccattatcattcagctgccacctcctggatcctgccctgtaaacatgcccaggggtctctgaggatggacgcgtgtcattcacacaccaagtgtgttagagacaacagaaaaccttgtttttttcctgtgttctggtgaaagtcttttctgtctttccctttgtttcttcgagggagcttgagtggcaggattattattaagagtactttttaagttcccaacaattagataggaaatgaactgaatgggagttcacattttatcttcaggaaaatgaccgcaagaaggccttactgtggggtggttaagagcatggcctggctttggaatgcctggattgggaatccttgttttgtcacatcatcgctgtgtgatcctaagccagtgatgtgacctccctgcacttcaatttcctcacctctaaagttgggataatactacaacttatttagtaggattgctgtaaggaccaaataagataatatagctcatgcagttagaattggacctgtcacttacagatagaaggcaatacattttagttcttactgtaagactgagacatccaaagacgtctcatactgtaatgtgtgatatttatgtatatgctttttaaggactacaatccttagtttcctacctactcaaggttatgttttgtagatgctaacagtgtacattctagagaaaatcagctggagggaggaaaatggtacagttctaaaattctttaagcctcgtttaattttttacctgttactgctttcatcatcacctctcactctcattttctaataagcctgaaaagcatgatggagtcataaatcatgtctgtaaaatgaagatgtgtagactttggtaagatctcacatgtgatgttaataacaataccttacatatctggcctcacacttcacttaaactgtcccatttaatccctgaagtggtctcattagcttctgttagtcccattttacagtttgtacagtggagacttcagagaagaacctggcccaggctccacaggcagttaatgacagagctgggatttttttttgtggaggaataggggagacttttctggtaaagaccagaaaacctgctagacaaattctaaaagagccataacactcagagcggggattttaacttcatcttctgcttcagggaccacattgttcccagtgtgtttaaacacctggctggtttttcacttggggttctcattcagattcgtgattctgtttactgagagatgatgtcccagttactctagctctgtaacaaatgactccaaaacttggggctgtgaaataatcattttattttgctcatggattctgtgggttattcagactcagtgttccatgatatttggggcctcagcaggggtgattcaaccacaggagctagagtcccctggggtgtctttgcccacgtgtcccacaggtgcatggttaggacagggacctcagatgggctgtcatccagaacacctacgtgtggcctctcaatgtggtctttctgcctgggctgacttgggtttcctcagagcatggcaacctgattcctagtgagatttccgagagagtgcggttgtctggcacttctgtgatctggcaatagcttcaaggaaggaaatatatttttacattgaaagaagagaatatgagccatgtgtgccaggtacggggagccacctgtgaagatcctgagtagaggcttaggtcactgtggacacagtggcagcagtggacaaggacaagggatgccgggtcatgcattcaccccacaaatattccatctatctctgaactaggcagaatgagcagggcaccaatctaatggctcttctggataatcacttcacatgggaatcctaggactccatattatattcttatcctgttgaaaatttgaccttttaaagatttatttatatttagctcaggccttaaaaattccatgtactatctaaaaagggaaaagttcatcccagtcaatgtcctgtcttgcttatgtttaagttggataggaagaaaaaaatccacaccaggagaagattggttgtaaaagtttattttacatttatgtgaagtttatttttggttctgatattcttcatagggtagatatttcttttaagactgttaatagtgtatttcctttttatttgccactccccaccaaaataaaccctcttttatttttgaatcagcttcatatcttcagaacgtccaactttaaataatggttggagaagctccaggttaagtagagagtaaaatcctattgctttctgacctttgggttaggatcaagtgtggtgtaataaaatatcagtcccaagagtcacctttgctgatttttttcctattattctttcctgttattccatattcatgcaggtcttgcagccaaggattgttacattaagatccaatctgaaattaaaacttatggttttaaccaataagctataaagctgttgaactcccactgggatgtagttaccttttcctaaacttcctgcattgtctccttttagccccacagttgatttcttattgagcctttggaaagttccttgccgtttcacagccatttcccgtcagagtggggaatattgactgtgcaaaccacttaaggtcacaggcaccacagctgtgtttcttctttgcagaaggggggtttctttgggtggggctgtgctcagcccttccgggtggtgaaggtctgaggtcacactgggagagcaggtccatatcgggattggggctccagcaggatcagaatgacttcacccagacttctggacctggaactcattctcagaaccttccagaagaccctgccctggaattgctttcaagggtctttttcatctgtgtacagagtatatttccttggaggcagctttgctgaaggccccttgagtcaagggtaatagggtgggagcagctatacacagttgcatttcagtgtttgatgataaaatggtgtccgttggtgagcatcttggtggtgaggaagtttatacgaccacagatgcttctcaccccaaggtacccgtgccctgtgctgctggtgccactcatcctagggcattcctgcttggcagtagcagattctagattgtcctgtttgctggtttgggggctgcaggggtctgcagagtgccgcaaggaggaggagtcccagatcactggttgaccttcagcgggcatttaacagcatattccatcaggcctcacctactagtgttttgttgaggctgctgtgtaactttgactttctctgctgtctcctatttaagagtaaataaaggtagtgacagtcacaaaaatagcatcaatgatgacaactagcgtttactgagtgctgactatacccaggcaccattctaacctctttacccaagttgtctctgctagtcctcaccacagccctgggaagtgtgtgctgtcatatacccatgaagaaactgaggccaagaaaggaaagcagctctgcccaaggtgttataagcagagagcaccgagacaggacccaagcccaatttgtgttgactggggaatcagtactcagttctcttagtctttggctgttttgttgagtgcccaggtcatcctggtagaagggagacagtgacccacgtgaaaaaggatggctacagatgcatggctgcatggctgtgcgtcatccaccctggagtatctgcttgccaaaaatagggctacctgcaaaatgctttgagcactgtggaaaccagccgttacaactccaaacgtttatttttctgataataggtcaaggttttcataattgagttttaggggggctaattttagactttctgaaaatcagtctcaagaaacaaaacccagagtcaagtaaaaggatgcttttggaactgatgattctcagaagaagccatgaagggctcggccataaccccgggaaagctcactggccagcagcctggagccagtggagcttcaggtggctttaattcttccctggatgctggtggtctccagagacacaggggtaaacaggtcagcgtccttgtcctcaagggcgtcatcctccagggaggacatagctggtaatgacaaaatgtgggccagcgccttcttgcagctgggcacacagggctaggggaactgagaggagaaaaggatgaatttggccttggcttggagcagccttttaacagaaacacgcgtaactttcctgcagatgcacttcctgtgaatgaagagtcttgatatatatttttctttaacaagagaaagccaggcttttgattaataatttatatgtcaatgttgggatcttcattttgttatgagagatttcagttacaacagtgtgaggtgggtggtcaggaaacattccccctgggctcactttttgcttagaaaagtcctgatggagaggttgaggtgggaagagagtgagggggaagactccatggagcatgacaggcatgctgtgcctgccacagccaagcatggaggtcccaaccataatgtgtttttgagacaggatctggctctatcgcccaggctggaatgcagtggtgcaatcttggctcactgcaacctccgcctcccaggctcaagccatcctccctcagcctcccgagtacctgggactacaggcgcaccaccaccatgcctgcctaattttttgcattttttgcagaggcaggggtttcgccatgttgctcaggctggtgtcgaactcaagtgatccacctacctcggcctcccaaagtgctgggattacaggcatgagccaccacactccacctccaaccacaattcttgttttaaaaaatgaaaatagagtgaaacagaaatggtagaatcaagtcaccttgctcattcacagtcatgtgtggctaggacaccatgtggtccagtctgacacaggctgatcctttcccctcaggacccatccttggggtcgtccagtccttgggctctgttcctctgatgtggcacaggtggtcagtggggcagggaagacagaaagatgagggccacatccacagaagtcatttccttcctgtggtacagacatgacaccaccctgtgggatgaatggggattcccatgtttgctagttacatatggccaagcccttcagcctttctgccccacttccagtttctttcttgggtgggaatgccttgagcctcagttaattgtttgagttttcttgagtataaaaggaatcctggctgggcattgagtgaatacaatcataaaacccaaatgatgctgttggcctcatctgagctgagagtggtgttggcaccttcatagctgacatcaaatggatctccaagcccaaacactaacagtggaaccagctattgctgcttctggtgtatcatccaaatgggttttcccagccatcttctggtgcatttctaacatacccttaaaaggcataaaaaagtggcatagatgatggctggaaagattaagttctttctggtggcttctttaattttggaataaccagccttccttcaacccccttacatgcattagaaacttctgaactgtttttgttctgtttttaattaggttgtggtacaagaggagcaattaataaaaccttccatttccacatctactgtgaaactctgtgacttcttcccgtgtgatgatggctaagtgcgcagaacatgtgaaatttaagtagatttgtggaaacagaaacacatttttatttagtcgtgagcgtcacttggagtataaatagagccctttatgattcgtgtgctggtctttcttcctggagggcttcagtattatctcatgctgtcatctttatgttgtattggaaaaatctgggattctttttcccttggtcattatttgctttttaaaaaataatgtagttttaaagaattcttgctatttaatctcaagcccaaacatggtttttagtgaggaactgatacttaataaagtttgatatttttagttctagaaagaattgttttggggggtgggaggctgcagttgagaggtacaagaaatgttcaatgaggggaagacactctactgtggttccatttgctctttgaaaacttgtgtttctgttggaaagaaaggtttgattttggaagttttaaatgtactgcatgatgttgctaaattttagttcgttgctgggaagttttggatgagctcatttcataaggatttatgtgccttataggccagtgtggggtaaggggtggagaagcttgcctccttcagaagggtcttcattcctagagggatatggaatgacccactgctttttggtgggaaacgtaaaggccagtcagcttttggatgaattttcaaggaagacagcagctgtccatcttcagtcttgacttgccattcccttagggagttccttcctttcacccatctttttctccccatggcttggccatgccacagtggtccctcggcttcaacagtcttgcttgcttacatctactaactgggcaagagagaccattctcccattggccctggaccaccactctgatttggatttagatgggctcaggaattttgtttggaatccttttggccttaaacaaaataatgatgagagaaatctgcctcccataagtcataatctcagcaggctcctgtgtctgagctatttctgtatccaggtccccaagagggctacagggaaaacttcatcatgatgggagggaagaaagaaggtaaagtcctaagatgtttgcttcctattccttgtaaggtttagccatgtatagtcatgtgccagtcacctagggctgagaaaggggagcaagcagagagggagaagaggaagaagccaaatgagatggttcgtaattgattagtggaagttaaatcatgttaaggataggaggcttgtcccctccatcatgatttagtatatcatccttcccaagagaagttttgagaacttgtcctctggtatccaggaaatggcctccccagcagtgtgcatagtcccagggaagccgtctcatgagcccctccttctcttgactcctctcctaatggtcacatggtgccaccactctttcaagccaagtcaaattgcatgcagcagaaaacccaaataagtttatgcagtagaggtttattctcacaccgaagtaattcagcattggtatggtggctccatggacttcaaggatcaaggatcctttcctctttctgttccaccatcctcagaacatggcttccagtttcaaagttaccttatggcccaatgtggctgttggagctccagccatcacatccaaattccagataggaaaaagaaggaagagagaagattacaaaagaaaattatctcccagctaatttgtctttatttatggagttttcctggaagcctcacattatggtttctgcttgtatcttcttgaccacctcttctccaggggagactagaaaatgtcttttaggtaggcatattgtagattggaataaagttgagtttggttaaaagggaaaagtagagaatggatattggttaggcatatagtctctgccatggtctagaatatatgaagaacctcatgtgtgaaccttaatatattctgccaaatattctgtttataatatctaaccctcctatcagatcctaggccatttggaagccaggagcttatcctctcctctttgtatcaagccaggggcccacatgttggagttatagcccatctttgttcaattgattcagattcagcccttgcctcccatatccctcaccatggatatgcagttataaatgatttcttgttaagcatttttaaaaggttaacttcttcccagagagcttttacataattatccatttaatgtgtttttaatgataaagaatctaatagttatcaataatgttggaaaagtaattctaggcatgaaaattagcagtatggtacatatgaagtacataccaagtactacctgattccagatattaggaaaacaagacagaagggtttcaccactagtcagtatcagtagattgttggggagaaatctttatgaaaaatgccacttttcactctttttttcaagtttgaactgactgtggaaagatgggagatgtctgagaaaacttgtgtcagtacttcatgtttgtaaaaggacagggaatccttctgaaaatctagttacataaatttatgttccaccacaagaaaaatcagtggatggctggaaggcggggctttcccttttgctctggaagggaaggaaactctgacagccagacttctcagtcggaaagtgtctttggtgagccttactatgtgactggctgattcactttgtccgctaagtcttgggagaggtgatgtaaccagggactgcaacttctagggaaaggggaaaaatcactgttggccccaccctctagcattggaagcttaacagggctttggcccacagcacatggaagtttgagctgtgttttgtaattcttttttaaatgttcgccagagcatccattattcttcctcattttctcttctcctcttccctccttttcttctttcttaccttttctcttttttatcctggatgtgctcctgtatggccattctaaatcaactcaggtctgacctttggaaatacgtacagtaataaggaatcctaggggcttcctgctgtatttctgtttttgaatttgattaacatgagctaagaggttgagtagaaagaacttggactttggtgtccaaaagacacgggtatgaattctgactctaccattactggctctgtgactctggacgagttgctttacttctctgactctctagaatctcacctggaacttgaggttaattcctgcttcaaagcgttgttaggaagattgaacaaaataatgtgtgaaggaaaacccagcgagagggatgaagagcagagtgtgctgggctacataggctaaactaagaagtttggattttatttacagtgctctgggaagcagggaagtgacctgatattgtagatattttcaaaaaatcactctgggcctgtggagtgaatggaggacaggagctggagtggaagcagatagcccagctaggaggcaagaacagtggacaagacggctggactagtgtggtcacagagggaacagacggaagcagtgattcttgagaacttttggaggtaaagacactaggagtagctgaagtcttagatgtgaaaaagggagggaaagagaacactcaaacatggatcttaggttgggtcttgagcgcgtgattggtgaggactgtttgacagtgtagcccaggactgtgcatggggatgacacccacaagatgttggctggctggctggattcatgactatctggaggaaagagagaatgcgtgttcttaggccatgttggatgctgaatgcagtgggacagacccggttctatttcttgctttgaagagattgtgttccaattatctgccctgtttagatggcagcttccagaatcaagttggtcagttttgagcaagatctggaaagcaagacaatgtctcaaaagcatcaggacccctgatatccaccttgttaacaccgtagatgacttcggtgccctccctgcagccgtctgctttaattgtcagaacaaagtgaaagcgaactcagagtgggacttgggatgggctttggaactgagcagcattctcaaagctgggtgctgtagtggcatgactattacaggtggggccaggaccccacttccacaaaattcaattggatacatctggtaggaggtgttcacctggaaatctgggtcttaaaccactttgagaaacactgtcctggaggtaagcagcccctgttctggttctttttcttccactttttaaaaaggaaatcagtttggtggcaaaatctccccttcctgtccataattcagactacgacagcaattagaggcaggcagcctcccctccaaggagaaagaaaccctccacgtgttttatgagtatattcctaataatgacaatagcagcaaacaaacaccatagtggtgatttcatactcatgaaattattgtcatggagttagagcctagataaaagtgtttggcaagtctctaaagcatatttcaagagaaaaaggaggccagaatttatagaatctaaaaatagcagttgaagtgcagctgtgtttagcttgtcagagaacctgttgagtcaagatgggcaggggattttatttctctggccctgaggtcatttgtcttgtttaagaaggggcagcaaacatttccaaatagggattgacttttaaggggaggaagatggctaaatgtatatggtatttcttgttttctgctcttactcttcctacctccaaccccattccaaatttcctcttaagaaaaggaaggagagtttgtttttctcagtagagtaagtagtgactgcctaggtggcaggattttggatggtagtggtgatgttacttattgatggcacatttgatgactgttagtccatggagtggtgggggtagactaactatctggtcttagtgggttctgtacaatcccattaagttgaaggaataaacctgtagttggagaaataacagtgtgacttctccaagactgattggctgacttttggaccctctttgtcccatttctagtcaggaattatgtcttctactgttccacaacccacaaaagaagatgtctgttccacttctggcctaagcaatcctcaagcctctatacttaacaacattggaatgtcaccatcttaaaacttgtcaaccagtaggccttcaaacctcctgccctttaatatttattgaaaccttggtggaaatgaattctgtttttggtggagtgcgtgaagttatttccctccattagtttgtaggccagaggttgaaaactagtggcccgcaggctgagtcttcctcaccgtcccactttgcttgcctggcaaagtgttaacctatacaattgccaatattggaaaactgggatactttgtttacaaatctttatttctggattctcctgggttgctctaatatatattcttggtttagatttcttttctggagaggtgtccccagactgctgtgcataggtccttgtcctcccagagtagctcacctgtgggtcatgatgagaaatagccactgtattttatttgaggataataagaaaggggttaaataaattgtatgttgagcacctagaaaacatatgcatgtgcatgatgagcaccctgtaagcattagctattattgctatcatcatcagcatgtttaatgtattttctgttgagggttccattgaggacattgttcatgacataacccaatgtcttatgaggcctcatgaaagacatgtctgtcagatctcagttccagaaaatagctgtccttcttctgaattactggttcatctgtaccttactcatgcccccaatcttatttctatctttgcactagctttgcagaagctcagaggcaactatgtagttcatgtctagcaggaggacttggattcgatttgttgatcccttggtttcacatgccataatttccttgcttctctacttttctcacttattttgttgtgagcattattgtaagcagccttaaatcctgttggaacaaggctgggtgtaaattaaaaaacaaatcaagcatccattcctctgagaggttatataatcactgagaataggcttccacatcaggacaggtttcatgtcttagccttgggactacatgttttctctttcccttctggacactactgacctctcattgtcatgttggacttgattctatcagttgtgctcatgctttcccttgaatctagataacctgtaacttctgttacagaatgagatggcttatttccctgggtagactgactgtattagtcagctattgccacataacaaactgccccacaactccatggcacacatcaagaagcatttatgttctcatggatctgtgggatggttggacagttctgctgcaggtctgcacgttggctggggaagctgttctccatgtctcttatctttctagaaccagttggctactggggcaggttcttctcatggtgatggcaaaaatgcaagaggggcatgcagaaacatgtgagacctcttaaggggtaggctcagaactggcactatcacttctgccctcattccattggccagagcaagtcatgaggcccaatccatcagtagagtggggaaatagagtagaaatagatcagcctctagtgagaggaaccttagagtcaatgacaaagggtaggagtaccaggtggtgggtagggggcagctgataagtaatgcagtctagcctgtaatcccagcactttgggaggccaaggcaggtggatcatgaggtcaagagattgagaccatcctggccaatgcgatgaaaccccatctctactaaaaatacaaaatttatctgggcatggtggcatgtatctgtagtcccagctactcgggaggctgagtcaggagaattgcttgaactcgggagacggaggttgcagtgagccaagactgcgccactgcactccagcctgggcaacagagtgagactccatctcaaataataataatattattattaataataatacagtcgatcacaggcagtgtaattatttgaagaccataaggttgggcatacagcatagagtatctagcccttagtggctatgttggctattctctacttcccctctccagatccattctccaccattatccctcctgctttgtgcccttgggaggctgaccttcccctctgccttttagttgggttcagtcagaggggagcactggaaaaagagggtggaagagtggccagccatagtgaccatggctctctacggaaggccatagcttctgtcaggtggttagttctaataacttaggggttccagtgaccactccccaccttgctccttccgacctagggcattaatggctccctgctttgccacaggggtctcttttaaactgaccccccttactgttgtaaatagtcccttcagtgaattctttttgtctccctggttgaaggaaacatctgcttctggccaggaccatcatggatacagtaggtgctcaataagtgcatggttgattagcaggcctccttgtttttcctctcctctggcctctacatcactaaatggtcacttctcttctagcctgaagagcccatggaatgtcagcttgggaatccctccctctttccccataacttgtccaaccaccatccctctcccaagaacctggcacagtaaattcattagagcgaattcaaataaataaggttttacttttcttctttgggatttcttagcatgcccgttgggacaattagggagggattctttcaagtacaacattttctctagcaattatgggggttttatctcccagatgtgatttatgccatattacactccaagaagggaacatgaagaatgtttgtggctaaaaaagtctcaacacaaggaaactacaggtgaaacgtaacaatagtaattgccttactttatttgcgaaggggtggtgaacactaatatgcctgactccatagagcagtgtatttggttttcttaagcaggaagaagggggccccccccaattttaatttactgaatgagtttaagaaccatggtgtatttcccaagcttcgctagtgaagatggtattttgttaaaaattgagattcccattgatccagatccagttgggcctgggaatctgttttcaacgtgtatcctgagtcatatttgggaagcactgggctctgcttatgattctcacgttctggtctgtgactgaggagatgtgccatgatgagagtgatgatggtgatggtggcagacaagagcatgtcacatttagaaatactgtaactggttgctgaggttttacatatattccttctgagcttgttttgtctaatattgcctgtgccaacagtattttaccagaattgaatgaaaagaaaggtaccagcagatttttttagatgttctaattgataccagaagcaaagacgtagaaaccgtcatgttataaacatgaaagccccaagcaaacagcctttagcccaccctttgagaaccactacatgacttcttgataagattctttcaactttaccctatgcctggatcatgaaagaggtgtttctagaaagctctgcaaaggactttctctgacagacggctctaggcagggggaagctctgactaactgatctctggagaggaacacagatgttccctcctaaaaaaggacatgctggccttgctttcttacaggtcacgaagtctcttttaggaatgccatttggcatttcaagtttctgcagcagttctgcagaaagccatgcctagaaaatttataattactctgataccagatggctttgcggccttcagtatcaaatgcattgtgattgtgctatgagaattttggggggaaaattccaaactttattaattattgtattggggaaaacatcatgttattgaattttaattagagttgctgggcagcctgggctgccttttaacttacgggtcacctggttattgcctgtgaggctcactgaggaaatgtcttgctggcaaagctgagttcgctcagaatgtggactgttccatttttctgttgtccaacacttgctttgtttgtgacatttagctccttttcttcctttccatcccaaatccacaccctttcttctgtcttttgcaaaatctatgacactgttgaatgaataatataagcccaaggacttggagggatgagagctgtgatgcccacatgttttagtgttggcatgtttccctcatttttggggatgccttgggttgaagctgatttttcagcatccctggtttagcatatgttgcattatgtatctgggaaagtagcatatctattttctcattttgcattacaatagcatctagtaacattcaagcctcaattaattgaaccaataattattatattaaaaatggtatgtatgccccagggcagaggttaggctatggtgggcatttgagaccttagggccatagaccccgaaacatgcattctccagaactgagtatgcaactgtttgctttcgaccttacagcacaggctttgggagaaaacagttacgttcaggtcctaactccagtaatgaatttcaagcttcttgttattgtttttcttcctgaaagacaaagggagttttatgccatggtattttgaggacaatgttgaatcaattgttatcaaatgggaagatttctgaatgctgaatagtttgtaatatccttcaaaaaaccaaaccaagaacccacccacccattcaccatttatctctccatttgtccacccacccattacccacccatccatccattcacccatccatttcaacattcaccagttcctacaaggtactgagtactgcatttatttgctaggggtgcaaaaataaagtctaataataataataaccatcatttattgagaacctactatgtgttgagcagtttccaatcttcaaagcagttttgtgatgtaggaattatgttctccgttttatgagagaacagaagctaatttacttgcctgggtcaccaggcagtcaaggcggagcaggcctgaggcatccttgcaacattagaaccagaacaacatttcattcttttatgttaaacggactctcctgcctggacccaggcccacgttagcatccagagtggcatgcagtggcagaattggagctggaacagccctcatttgttgtcttctctccttgggaaatcttcctgctatcagtgaaaaagggagagggatcagctcttgtttcttggctttgctctttacagcctcttagaaacttgagttctatctggattcatcgtgtcatttgatggtacaggagtacaaatggaggtccacttagcgaatatctaaatatttaaagattacaaatcaaggtaactgttcagtaaactgtgttccatcctaccttgacaaatatacctttataacaacttggaagccctaggttgaattttgatttctcaggcctctcagagtttagtgtagaaatggatggcttggggagagccagcccccagcccacccccccacttccctttccatctgactccatcccgcatggcaatgggccttctgtgcatgcgtgtgtggacacccatccaagcttcgtccaccccctccccacagaggctgcccttggacctcaggtagggtacactcactcatggtgcactttacagtgcaggggacaaaccctggagtagagcccaacatggaccctgaaggaggacttagggctgttggggcagggatttctgttgtcctgggcacacagagcatatctgcaagagggagatgtggagactgaccttggtctcacaaactcattgccccttgcaaagaaataaccaggagggtctcctgagaatggggttcagagtaagggcccctcttgcctgggtcttacccagggtgataccatttctgccaagtcagaggatgaaagggacttcggcggaagccatatgacccacctctgtcattttagggagactgagcatggctggtaaatctcagtgatggctggagccctgggggtccttagtttcccagcaagtgccctgtcctgctcttgcctttctgagcatcatcctcgtggcattctggagcatgaggacccaaggctgggtctgagtggatgactgtagttacgtacacaggctctgctgcagggacaggattacagaagatgtttacacaaagctgtagctttggaaacaggctgtggtgcatatcttagcagccccactgaccagcttggtgatttttgttcaactggagccttggcttcctcgtctagaaattggagataaaatggtatctgtaggtagagttgtgtaggtggaagatgagatgtttgtagaaatcttcatacagcacttggctttcccaaagggaacatcagcgaattgtagccactgtgactggagctgctactattgttcaccaggtgtcctggaccccactgagaagacgctgccattcgttcattcactgattcacccactcaaatattcatagagcacctatcatgtgcaagtactattctggtagcatgggacttaccagtgaacaagagaagcaaaattccatgccatagtggagctaacatcctagcaggtagaggcagagataaaccataaacataattaacatggagatatagaacatatggaatatagagtatggaaacacgaaagctgataagtgctatggaaaaaggtggataagggaaaggggtttggttgacccaaggtgggctgtaattttaaatagggtggttagggtaggcctcatgaaagaggtttttaatcaagaacttgaaggaggtaaggggagagaaccatgtggagggatctgggagaagagcattccaggcagcggaaacagccggtgcaaaggccctgaggcaggagtgcctgttgttccagggacagtcaggaggccagtgtgtctagagcagaatgagggtgtaggtattaagagacgaggtcagagacatgacagaggcctgaccgtgtagggcctagtagaccattgaaaggacttggcttttactcattgcaaagtacggaggggacaaatgacatgaccttctgcatctcctcccacgccttgggcccgcaggctgcctctgcactgttagtcctccctgacttcctgccccaggctcactgcccccatccatgttgcacacccctctctacctgcagccgccatcccctaacaggtagaggtgtgccctgggtccactccctcaagtcccagctgcattaccagccaaggatgtgatgcatagtattctggagctcctttttaaaaaggagttacattgctttgggagttcaggacacaggcagcctgggggtgcttgcttcatttctgaaaaagcaggttgtggccaccctttcatgagccttgactctactgggctctccctgctccccatggagcctcatgctgtcctcaggccaccctagccccctgttctcctggctggctttatcccgctgagcagtgggacagaggacaggaagatgagaggaagatattccagagctgggtggagagtcagggtggagtagagctgtgtgagggtgtgcatgagggagccaacaggaaggagggctgggttcttgttctctgaccaattcccagtcatggctctcccatggggtttcacagctcagtccgaagacacattgttcctgtgcatggtgtagccaagcccaaatatttagctacggccacaccagcccttgttctgcttataactgtggtgtagacctcagtccagacaccctccaagagatacccaccctgccccttggcactggcttgggcggccttgtctggtgctggaaggctctcttgggttctttgccaaagttcagatgtccccctttcccactctgtgggtgggccctagtgggggatggatgagggctaaggcatgctttacccctggctcccaggcacagagatgagggtggcctctgggtcagagggcttcctgttgagtcagagcctccagccgatatgcctactgtcccacccctactccacatagatgcagggcaccctgcagctttgtttcaggaggaactctgccagtggaaaccccatgtccttagcgcagccctgggggttatcagggtggctcagatgcaggaagtcctcgcctctgctgtcctgctctgccccaccctgtcctgcagaggggaggccctgcccatgggagagtctgcctccactgggcagtgctggcctggaggaaacttccatgccacccctcctgcccctgggctccagggctctcgatttttggggtaaacagaggtgctgggctctgctgaggataagctttgtgatctgggaaggatccctttctcctcattttttccccacctccttttcatcatgtctgtgtgaaaacgaaagctattgtttatgtaaaaggaccatttgcctaatgtccctggaatttatttgctggagcattttccattttcatattcagtttagaccttggctgaagtagggaggttatgtaactgggatggaacaaatctcattggcatctggggaccctagtgtaccccacccttagccattcctgcagtggactgagtgcccccctggctgtatattcaagtcgcctctgtggctgccagagttggggagctggggagctggagtgatagagaaggagttggcagcatttagaatggagtcaggaggaagatttctctggggggttggattcatagatctgctttggggctgtctcctcctcctcagctgtagacctcgggggtccagactttccttgcacacaaagcctaggcctttcctatcagcctgtctgtggaccttagccaacagcctgagcctcactgcttgagccttggctggattagggaaatgtctctggcactttccttcttggctgtctgtggaacctgtctctacattctaacccatccccagcagcactggccttgagggccatgtttctacccctgattcccagcctgagcgccttgggtttctcctcagaagccttgtctgggtctgcatggaattactttgacaaaggatgggatgtttttctaggttatgagggcctggacatttgcctgcctggggttttaaaagaaggcaaatatatagagtgggttttggagccctgaacttagtcatgggtggataggggtgggctgaggagggggtgcaacctctgccttccctccccacgcccccatattctgagatggtagagaaccctttcattcctccagcctgtctctttcatccctctatggactgagacatctccctttacaccagttttttacttaaacatgcttattagcctccattaagaaaaaggtaaccctgtgtatacctgtattaacacaatgctaactgctgcaacaaaccctcagttttcaattacttgacctactagatgtttgttcattgctcatgtgtcagtcaaataaggctattcctcgttgaaggtagcttcctccacgtggtgattctgggactgcagttgctttccattgctgctgctgcaattccttaggacctccaggatttctgcctcctgggggcaggaggagaaagaagcagtggagaaggcacacccaccccttaaacactccagcctagaaatgacccacatcccttctaccgactttccattggtgggaactagtcacatggccacagccggcctcagaggaggctgggaaatgtgggtccaggctgggcaccaccttgggaatgactccacatatcagtggtaggagatggagaggagggggtgtacttgggaaacggcgaggtcaagtcagcagggtggattgagaatatgtagggggacgaagccaggagtccaaggaccccttgggtttctggtttggagaacagggtggatggtgcctctgaaggcaatggagttaacaggaagatggacgatgctgagagggaaggctcatctgtcaagtgcccagcaggggtgggtgctgtaagaatgttttgtgaatgcaggaatgaggagaaacagtagtgaatgaacttgagtcccttctgccaaccccttgcagctatagtggagaaaaactgtttggtagctgtactccatagcctgaaaccatagcacctgatgaaattggaccaatctgttttcaaatacaaagctagtagttagaataaccagggggaaaaaagcataatcagtagccccatgtctttgcacaggctgccataaaaaaaggtacagttgtttctcagtatgcatgggagattggttccaggattcccaatggataccaaaattcatagatgctcaagtccctgatataaggtggcatcgtatttgtatataacctacatatatcctcctgtatactttaaattatctctagattacttataatacctacaacaatgtcaatgctatgtaaatagttgttatactgtattttgggttttttgttgtattgttatttttattgtttttttcctgaatatttttgatctgtggttggttgaatccatggatgtggaacccatagatacagagggctgactatcccataaattgggtgggttacacaacagaaattaatttgctcacagttttggaggctgaaagcccacaatcaaggtgccagcatagttggtgtgtggtgtgggctctcttcctggcttagagacggccaccttcgtgctatgtcctcacatggcagggagagagagggagaaagctctctagtgtctcttcttatataccatcatgaaggctatgacctcctctaaaccgaattatatcctgaaaggcccatcacagtgggagttagggcttaaaaatgtgaatgtggtgttggaggacacaattcagtccacggcatccagtggcgatgtctccccaggcatagagtcctcttctgtgttgggtattgtctctctaagctgcggggaaagggaaggcagcagattggtgtcctggcccatccacttcaggtgagaaggatgcctgctgtcctcgtgtggacacaacttcctctgctctccttggccttgccttggcctctttgctttaggatatgatgcccagaagggctcgaaactggagtctgaccaggggcaagcaggctgcctcttgctcctccccagaaagggagagccagctgagggtgacaccttgggctgcagccacaggccactttgccactgggctcacccacgctgctgctgccacacgtggggccaagggtgacaaggttgccagggagcctgggatcggagttccagggccatctgagctctgggtcagcagcagtcattggagcagggatctggggaggcttttcacgtgggggttgttgagataggggtctggccccattcctgcctgactggcagtcttcattaatgtacgtttataccaggagcaagtggagctggggaggggactcacatctctgtctgtgggaagcagggcagagtgagggagagtatggcctgctttctagctgatatctccccttgctctcagcaagctcctctgcctcttcctttccttctggtaaagcataaggagaggactcaacagtaaggactaatatttgacagtgaggagcagatagagttttttaggcaggggtcactgttaaggaagtttgtattttttttttaacttccaaataaagcttgaagtgtctgagaggctgcataacagaggtgaagggcacagacttgggagccccatggccaggatttgaatctgaactcttaggcaggtccctgaactgctcagccctcagtttcccatctgtaaatggtgataacagtaccttcctaaggtcattatgaggactaaatgagtaaacattgatacagtgctaacaacgcttaatagagtacttacaacacttcacttaataagtgccatatggtgggtgttaaatatatattttggggaacggggtctcgctatgttgcccaggctagagcgcagtaactattcacaggcacagtcagagcccactacagcctccaactcctgggctcaagcagtcctccttcctcagcttcccaagtagctgggactacaggcatgtaccattgcacccagctaaatttttaaaaattaagtcttgttgaagagtgagtagaaaccagagtggtgataatttctggttctccctagtcatctccctcaagaatttcccagttacttctcctggaagatccgcttccttgttttgttgtttttgtttttgtttttgtttttttttgactttgagacaggatctcactctgacacccaggcgggagtgcagtggtacagtctccgctcactgcagcctcaacagcccaggcccaagtgatcctcccacctcagctttccaggtagctgggcagtgtcagcagctctcctatggccagctccaccaccaggtcagacagtacccttggcaacctgtggaccaggctggggaagaagaaaatctaggaagaaaaggccacacaaggaagaagtgcagatggcaggggattccggtggccagggaccagatgggagtccgaaagctacacagagcaaacaaccaaaattgaaagcaaacagactctgagttgagaaacctgttctccctatccagagcatacaattcagaaaatgccggaacagcataaacactgcaaaacaaatccagctatgtaatccctttattttagtaattagaggtggcactgggaatgctggtaacagtggagtttgactcagatccccttgacctcacttggcttttcctccatgttccaacaacttgttaagtctgcttctccattccattcctttcccggcgtggtgtttgggtttgtaggcaggatggccatgtatgcacaaagaaagctttggggcagtttcctgccacccagtttttatgaacattctctttgccccatgtgtggcagcagaaggcaatccagccctcagcctggaccgccgaccttgtgtgtttgtctccctctgtgcctaggcccgagaggccattagaagccccatttgtgtgtctcagcatggcaggaaggtcaaaccgctgcttcctggttggaaatggtttcttcattgattcatcaggtcagtcaagcatttactgagcacccactggagccagcattgtgcaaggtgctaggaatacagtgatgaggaaaagcagacatagaccttacccttctgaaagttccactaaaaatcaaataactgtgaacaaatgtccccttcctgctgtgatacctgccataaagaaacatgttactattaaagtataaccagatactcacatgtgacattctcttgttggttttccctgagtgcaaaagaggtggtgagtctttctaaatcctgagtcaagatgcttgaccacttattaggacttggacccttagttttggacccttagttttggacccttagtcccttatcaacatcgaaggtacagaaggattgacatcagagaggcccaggaagtttgacattggagagaggcgtttttggagaaggctgatgggctggggggtgttttccgacctgagccccttggaggagagaaaagggtgttcttcctccagcccagagaaaggaggagaccagacaggtctagctcctgagagctagcctgactttcttccagagtcttggagagcacaaagatgtgtgttgatgtacagcttaaaggggagttaatggagccctgagaatgtcctgctcccccggaggaggacatatgagtgcatctcagggtgaaagctggctaggagctatttaaaaggggttgtaccttaggtgaccctagggagaggtgatgggaccatacccaaaacacaaggggtctggggccagcggaggagaccttgttccctcttgggagttgcaggggagtgtcccaatgctcaggaagctccagggaaccttcagtgtgcctgaaaaaaagtcaacctggaatacccaccaagctaagggaggtcagcgtgcaatgccacaaagccacagaagtctctagagcgactcagctttaaacagctgccatggccagagaaaagccaacacccaaagacaccagttccaactaggtgtggcttctcctcccctcctctcctcccctcaaaaggtgttctaagcagctgctgggaaagggggtgagaggaagtgactgcagcttttttatctcccacttcccaccctctagcaaccttcaaagcctgaagtagggccaagttggaagaggcgaggaagtttaactttaaatgaaatttggagtttttcactaatacgcaggactggtcattttgatactgaatgggattattctggagattaaagcaatggaaagacttttcatgatctaagagtgatccaagagatagtgggacctgctcaaggtttcatccaggaggccagggagaaagggccaacctcagtatctaagggttaagggtgtgcaagagagtgcaatcagtattgcatttcagcagatcagccaagctgcaggataggtgacagatatgaaacgataaatgtggaggcagggagaccaggtaagaagtctgcggtggtctaatggtggaggtgaagagaagagggcaggctgcagaaaaggcaggatacgaggtagaactcccacagtttcctcatctctattgtacatagtaatcagggtctaacatagcttccctttcccacctacgacctatgaggtgcacctgtccgtagtaagtactcagtaaatgactggtgaatgaatgtgttttaaataaggtatatagtgagaaaagtgagcattggagtctatttcagttatgtgttacaataataatgctgcagaacaaactcaaaacctcagtggcatataatacaaagcatatagtttgtgcagctgggattagcagtggcttggctagctggctctgctgatttgggcagggcttgttcatatagctaggggtcagctagctgttggttatctagactggcattggctggggtgactggggcaactcagcaccgctccatgcatatctcactgtccaacaggccagcctgggcatattcacgtggagactgagaagcacgagaaggcagaattgggcccttgataagatcatcctaacacagaggcagatgtagatttgaaccctatttgcaacagtcactaatcatgtgatcttcggtgatttattttacactttgtggcttaatgtctttatctgtaaaatggggctaggaaaatttatctcactgggtagtcaggattacataagagtaataacatctcattcccactataccatcctgagagggtaaataattctgcctatgacgcaggtatagaaataaaaaagactatgaaaagattaaaaagagctcaaatgaagggaagataattctaggcagaagaaagagcatgttcaaaggctgtgtgagtgaagaggtgggagagtgtgctgaaaggtgggcagaagcctctctgccctgggggaggggatggtgccagggagctctaattgtattttgctggcactggggagccatggaaatttctgtaggaagggagagatttattttattccacaaacatttatttggcacctatgatgtgcaaggtattctttaagatgcttgggagacagtagtgattaatcaatgtccagtgggagagtcaggggggtcaggaagatcttggcacagaatgaggtcagagtgagagaggtcaagattggctggccaggggtattagccctgagatacactgctgctctatgggattttgcccctcattcacaagcagagggcctacccttaggccccaagtgtgtcaagccccctctgcttacaaaactttatttttcacaaccaaaggtggttcataatggtgggctgaggaggaagcaactgaagtaggggaagctcagaagtctctgagggtccttcccaccaggaatctccccacttgaacctaaggctgggacactttggcatgtgtgttttaaaggatccgtgggtttgtggggagggctgcaccagtgaccagttaagcccagtgggtgatgcctttcctttgttacttttcatgcagacatctggaaagaatttgtcaagaattataataaagaataccacggaatgaaagcaaatgtggtgagaagcagagttgccttaagactgagaagccagcaggaatggctgctgctaagaacctcattcttataggaaggattcagttctttccctgagcaacagaagtgcataggtgcacggcatagtgtgtcagttagcatttgctgagtaacaaaccttcctcaaatttaatggcttaacacaacagccatttattattgtgtataagtctctgggttagctggatagttctgctgatctgggtggggcgtggctgattttggctgggctcactcatgtgttagggttcagcttgcaggctggctggaggctggctcagtcagatgttttagagttggctgaggtgacagtgtggctgggccaatgcctatcatcatccagcaggctggcctgggcttgtttacatggttaggaggttctacaagtgagagtggaagtaggcaaggccttttgaggcatgggcttcagaagtggcatgatgtcatttcttacacattctcttggccaaagtaagttcaagggatgggaaaatagcctcttcctgatgatgggaggagctactgtatcatcttttcatgacacatatgtagggacaggtagaacattgtggtcatatgcagtggactgagcccatgggctttggagtcacatggggctctcaagccatgattctttacttaaccttcatctataaaatgaaaacactgatagaatctatctcacaagatcattttgaggtaaatgcacatgtacctaatgcatagtaaattctcagtagaaaataacattttatgtattttgcatgtttctcataaactgattgtgcattctaattatttagtttggaaaatgtagtctctgtaggtttacccttccctgaggcagtaggggagatcatcacctctgtaatggtataatatgaactcaggagttgagattcgtaaagcagtaaggaatgcatagtcagctatactggaaatttgggaaagggaaatggactatgtgggaaagcgggactcttatccttgcagaagtcactatgaaatgaggctttcagtaaacagaagatgggcatttcatcctttctcattactgagccttcctcaagacctccttaacatcctaacattataaatacaataattttagaaattacttagtcaataaaaaataagcacttattgtatacgagactctgttctaggagccagagatacagaggaataaggaattaaggtatttctcccatattcaaggacttcagtttcattacctgtccagaaaactatgagaaccacccatcacctctggttatagattcttaagtgggatgtcaagccccttccctaatgatctcagtttaacctgctgtcctattcctctgtggcctattcctgtgctacactcgagccaaggtggcctcttccctagccccacacatactctttgtttttccattcttccaagcaggcccggagaaggaatgggctccacgatgcagggcccgcggtagagaacagccaggcagagcagggggcctggctggatgtggccagcatctgcaggggttcagcattgagatatgacactgtcacctccatctcaagaagcccttacggatgcctcccttcccttcatgactcactgtgatctacaactcctcagagccagccttaaagtggtctgtggatcagtctcatctccccactggagctccatgggcagaaagcactctttctcttctgcctacaacatcctcctcccatcggtatgcaccccttcctaggagccccacaggcaatgacaggaacccccaaccccatgtgtgcacatatacacattcccacatgtgtggggaatgagaggctacatagcctgctccatcctcttcttttaacctgcaattactgggtgaaaagagtaggatatagtaaaatgcaaatgctagtttagtaaatggcataaagacattgaagtgtccctggacatcagtcacgtggctgtggaagggagacttagggtgtggctttccccatggaccatggtgggtctttgggatccctctcttccccaccccagtcctttaaagacccaccagcgactttgtgagattctagactcctttccctcgtacctcctagccttattggatggaaaagagggaacagtggttcctttctttctgccacgcctccaccttccattggagactcctatttctccctccgtgacatctttgctgaacagaacagctcttaaaccagaccttatctgttccatgggtgcagaagggtgcaatgtgaacagaaacagcaagtctctggaaaagagctccttcagctgcaaagaacacagaggtcaggaggaataaagctaatgagagagcagagagtcctttgtctccccaggtgttattcccagagggcaactagggaaaatggagatggggtataaacatctgaattcactgttaaacactccatgaactgttgataattccctagaagcagcatattcctgaggtagcttcatatgatctccagaagcaacttacatgtagacatttttctgagaattccagaaagaatattgataattttcagacaccatggcttccacgcctcatcaacataagcagtattaggctttatctctgacatcaatcaaacttgaacaccatcagcatgggctttaatgaaattctcacatatgtatcagaacttgtattttttcctttagtcagtgtcttgatccatttgtgttgctgtaaaggagtacctgaggctgggtaatttataaagaaaagatgtgtattcggctcatggttctgcagggtgtacaagaagcatgatgccaggcatccgctttgggtgagggcgtcaggctgattctactcatggtggaaggagaaggggagccatcgtgtggagatcacatggtgagagaggaagcaagcggggagtggaggtgccaggctctttttaacaaccagctgttgtaggagcacagtgagaactgactcactacctagagaatggcaccaagccattcacaatggatccgtccccatgacccaagcacctcccatcagacccacctccaacactggagatcagatttcagagtgagacttggtggggccaaacaaatcatattcaaaccatagcaattagaatcttaaaatcaaaattgatggctttatttttctaaaaatgggaaaatatctccaaaacattgttcaaaaacaaaacaaaacaaaaaaaaaatgtttgttcttatatcccatcagtttattcaactaacattcactgtggactttttataaggcagtaactgttttatgaataggagatataaaactgggtgaaacagtgaggttcctggccactgtattgtaataatagaggcacatataccaaagagctaaaatacaggcagcaaactctagggactgaagtaaatttccttaatttaatgaaatgtatcaagcagaaacccacaataagcatcatacttaaaggattcatttgaatttttttatttatttttattaaatcagatatacttttctagtttttttaatttttattttttgcatttcttgatcatttcaaagtgaggtcagttacagagtgaatgggttcatcctgtcattgtaaataacagtttttcgtttaataatggcattttgtattaccaagaccttgcttcacattaggtgttttgtatacattatctcatttaatcaaaaccagcactctatatcatgggtgccaccattcctctgatttttgctaaggaggaaactgaggttcaaaaagggtaaataagttgtccaagaccacacagccattgtttggcagagctggggcaaaggtctatactgctgcaaagcttgtgatttttggctactaccctctaatgttctgtgagggtggaacacctaacctagaatttccctgtggatcactcacccccaatgatggcatgtcttgctctggacccatgatataatgatctggatacagccaaagtcactaagcacgctacaccctagcctttcaattcctttattacttcatggagaatcatgtatttcagccactcaagtatctttaaggtctaggccttatcgaatggggtttagtcactcagtacagtctgccctttgtactcatgagttcagcattcatggatttgaagaactgtggggtgaaaatattccaaaaaaatggatggttgcatctgtactgaacatatacagacttttttcaatatttcctaaacaataaagtatagcaatgatttacatattatttacattgtattgggtattataagtaatctagagattaaagtatataggaggatgtgtgtatgttatatgcaaattctacaccattttacatcaaggacttgtgtgttcttggggtttggtgtcagggtggtcctggaaccagttccccatggacattgaggaatgactgtgcttcccctacccaacagaagtggttctcccgtcaggttataatagggaagggatgtgtgatctttcctgagaactgaggcatgctattaagctttaaatggagcatctctaagtttccttaccaaaaagtaatcagacaaagggccatgtggcaagagctcttgcttcaccaaacacgtagtgatggacccccctatacccagtgtgccagacatcatcatgagatgtaactcctttcacatatctcttcccttgccagaggaaggaactgaggctcagaaaggttcaattcctcacccaaaggtttccaacccaaggtttctgacctggagccctgctctttcctccacaccctgctgccattattttgtcttgttgggctggggaagggcaaagagggtgcccactgctggatgaaagaagcagctacattcccattcaaggtgtgctgagcccagtcctaactgctcaagtctttcttaggtcttatgatggaactgaaaagcaggctacctattttatccaggaagcagacagaggatacggatgggcaagcacttctatcagatgctggttctgttgtaagacatcatcaaggttcctccaacccctgctcctcatcacactgcacagccctttggcagagacagggagaagcttgttgtttgagacatctggagttagaaagtatctgagctttaaatggagaaggagtggggagaaactgacagtgaagtgtagacatgaggcttagagagatgctaactaagtagtcatgagtcgaatctcccatttagtcagacacatttttctagtttttctagttttctacccttcaaaatactttgtgttaaactcaattacagagatagatccttccattcatcaagtgaattttagaagccacacctttgggtgggtcttaaaagcagttcatgggaatctataggctattgtgtataactggagggtagcagaaaacaagttccttgtgagatcagacacatgagctaaacatttaggaaaaccttacagaagcaaatctttaacggaagggtttccacactgagggccttgtgttgcttttgggaatggtgtagaaatcacgtgcttagtcttgaattatgattcacctttactgaatgtcccttctcttttctttactcactgtcgaacaggaacccaaaggatgtagtttttggcagatgtcctttgtagggttcagtatttctcactcacccctttaagaccctaaagggagagttattaatagtttcagaaagttgagggaaatcatgcagaggttctcagatgttcagagaggcttcctctccccttccatgaaagttctaaggctcatgggtgaggcctaagaaaggcatgtcagttgtctatcaagttcattagtttattcagcttatttctgaagcttttgatgggccggctattcagaggtcaatgaaatagacatgagtactcttcacagaccttaccgtctaataggaatgatagcaagtgaatgtataataaataaataattaggggttgattgttacgagtgctatgaggggaatagccagggtgacatgtttgagaaggggtcagtactgctaagtgttggtcagggaagcattgcaggcagagggaacagcaaatgcccatggtttggaggcaggaatggtgttccaagagtagtagggagcctcgggactagagtttggaggatgagcggggagagtgggaggagatagtgggaaagtctgtggagccagttccctgaggggcctggtgggccatgctcagtgggggtttcatttgacgagccatgggaaggcttccagcaatgggggatgtggttttacttgtaccttaagaagatcacactgggtcttgtttggagaatggacaggaaaggagcaggagagcaagcagagagtctgaggtgcaagaaatgccctgtcctcccagcagactggagcgaattctaattctgcctctgctacttcattcctatgcaactttgggcaggtttcctaatctctctgcctctcaactgttcacccctcataaaatgaggacaagtattttctcatgtggtttctaggacaaataagtattcgtaaagtcctctataaacttgggccatatgcttatctgagctataatatgattcatattgaaaggagggggactcctgcaatgttgggaaaacgactcagctgcccctatataaggaatatgttattacagtccgagactaaaaagatgcttttgtttctttactgccatcagtgtctctctaagggagggcggctggttaaaaatcacatggtgtgggcatttataggggtaataacttgaaatgattaaaccctttttttttaaagcttcatgtctctgttctccatctgtaggtggtgcatgagtatgatatagtgtgcatgtgtgacatgctgcgagtgtgaggaatgccagagggagacccacgaaactgccctgcaggcagaaggccacatgctctcagcaccagtcagtggtgctcgctagtccggcagattgctgtattcttgcaccctgtaccacaacattgttaggataaagtttcataagtcttatatggctttgaacaaagcaagtctatttttcatcatagtatgggttatttagaattcatatgttatgaggaaatacactgtttcaaatgcagttttctttgtggtgtctcagcagatactgagttttgctgccctgtcatccaagagggcctcaaggtgcccagagagaccaactgaaaaatgttcactggaacggagctgcaatggtggaaacgttctgtgtgtgccctgttcagtacagcagccactgcgcggctgctgagcccttgaattgtggctatcagggtagaagaactgatttttaatatattgaattatgagtcatttaaatttaaagagcacagctgtattggacagcacagctgtagaaggatgttttctctcatggaaaaccccaactctgagccccaggggtcctatggatccatgagctcacagactcccctaacgtccatgaagatcatcaccaggatttgagggaatgctgtggtgcatactttgtgttggacagttatgggggattgcttttgccgtctcagcatttcaccgctgtcctcggtatgagattatggtgatgttgaatgggggtcattagaaggctgtccacagaggggatcagcccccctcaatgaccactactccgagcatgggctttcttctgtttgatctcgttgggccctcagctgtgactgtggagaacagcaagtcctcagtgagagtatttgtcacttcctactcttggtgtttaatatcatccctctggcacagatgcttgaaaatcaatggtttcttgacacatcttggcttgtgtgaggggccataacaatagcagggctcatggctcctttttttttttttttttttttttaaagagatagggttttactctgtcacccaggcaggcaggggtgcaatagagtgatcatagttcactgtaacctcgaactccaggtctcaagggatcctcctgcctcagtctcctgagtaactggatctatacacatgtgcccccgtacctggctaatgtggcttcctttatgttcagcaaggaactctcagtgtttgtccatttccttaggaacatgagtgtttttggaaggcctttgatgagtggcagttgggtggatggatgagctaatacatccatcatcctatctcaggaggatgcttggatttgtgtttagaaattgggtaactcagttgttcatggaggaaaaagttgaacattactcaagtgcagatagggaaacagtgtaagaacaaaaaactttttttctatctacaagtgaggaaaaaaatattgacagtgtgcccaagcttcatggtaggatgggtgttaattgggaatggcatgtaattctcttctggaatccagtgtctgggcaagtcctgcctctcagattaaggcaccagcattcagcataagagggtcctgcctctcagattaaggcaccagcattcagcataagagggagtaattgacattctacatggcaaaagacccttgaaagataacagatgaatgtctcatggccagtagcttggtttttttgcatggtgtagatttagaatataacttttacagggaagaaaggggttaaaatgtctggtgccatctgtcacagtaatgagttgtgcaaagcccaatgaaccttgtagaaacaacatcgtgcccagaaatagcctagacctcagagtgacatcagggggcagggacctgatagatgtggtcctgcaaaaggaccgaaggttcttctttaacaattcaaattgaataggaaccatttttaatttgggggtaactccgtcttcaccattaatggccattcttcaaagctactttcattcctgtgagggatggccagacacgagaaagccaagcagggattttcagttacaggtgagcatccgatctgcagccagggctttttctaccgggcacatctttgtgcgcagcctggtttgagctgatctgcacataaacaggcactctgggtgtggatgggggcatctgtgtactctttatggctatatttccagaatatgcttttaaagactgtggtcacatttaccttggttagggaagatagtgacttataaaaacctcaaacatttatgtttccctttccaatataaaaagtgttaataatttacccacttaaaaggttaagatcaaagagatcataaacacacatgaatactatttcaggaacataaaattcagctatttctactaacagaaagtgagtttatgggataccaatgcaaacaaacatagatttagtggaaaatgactcaaccaagtaagatttacaaaacaaacaaaactgttttcatcatctttggttgtagttttataaagaatgctggttcatggactccagacacttcattgaaactgtgtgaatcattttaaacaggtttgtccttgggccccagatagtacattggcatttgtgaatcattttagatgagtttgtcctcagtacaaatcgtgctgtgtttaaagttcttggagacacttctctcttccaataaaaggcttttactagatgtttcagtgacataaagttgaagacataaatactgttttatattgtaagcaggaccaactcttttatggtgtgttttatacgtctagaggatttttgttgttgttgtttctttgaggttttctctgaaacttcagattaaggtagtccttgaagtggaggctattaagacctagtgttatctgtttcagggaggtgggggactaggtggactgatggaccccagaactccagattccttgcactggaagctggtgttttgtgtttggaagagcctctgccctctgtgtcatgctgcagtaaagtatgggtcaacatccccaaaatgtgtgactcgcccaaattaagtggtgtcatactctgatccttcttccactgaacatcacattcttcatgagaatcacaccattgtcctctgtctgccctgcctgtgagacgggccatgctctatgcttgcccgcctcttccatcaggaacactcacacagtcattctcctcacataccccactctcatctgctgcccctcacacctgcccttctatagaatgttctaccctttaatagggaagggtttcttcttcctatgaatttttacctcactttgtgtctttttaggtttgtattggaactatttgcaaacaggtcttggcttatctaaagaaaaattgtaagctccccatgacgcaagacagtatcttatttacctttgaaaacctcatcacactctgccctgctcagagtacaatctaaataaaagtctattgaatgactgaagtagagtttcttttttaacacttatatgcacattcttgtgacaggcacagtgaaagatttatcaaggaatgacatggtccccacccatgacactgttaaatccataatttgtgatgcattgtttttagttatctagtgctgctgaacaaaccactccaaacttaatgatgtaaaacaacagcaattttatcatgctcacagacattgtgggcaaggaattcgggacagggcacattggggatggctggtctctgctccatgatgcctaggacctcagctgggagagacttgaacagttgggggctggtgaatccatgtctaagcttcttcattcacatgcctgtcaccttggcagcatggcctagaagcctgggcttagctgggcctgagacccccagcattctcttcaaggttggggaattggaccctacatttgatgggagaattagccagttcatgttgcagaagagcatgtggagtcggagatactttacaagcatctatggaaaatacagtctgaagtgaatgcccaaatgagtggcaccaacactgattattactgggtgacagaggcacatggagaaaatgtcatgagggaggaaatgctgggatttgccttgacctctggctgggggacggggagggatgagaggtccaaggcaagatggataagtgggaataagcagccttgttttggggaaaaagagggacagacctagaatggctggctgggtgaaatggcttgttgtgtctcctaaattagattttacatttttgagggcagagctacttaatattgtatttaccccagaggaagattatttttttcattctctaaattgtttaattaaaactcatagttcatgttaaatttgttcaaactttccatctaatggtgaggtggtaaaggaaataaaacttaccaaaatagaagagggagaaatgaaaaggaaatatgatcaatgatttctgttctttttacttcctacttgcaaagactctggaaatgtaatgatggttcagagtgttctgctataaatcctaacagcttaaacaatctcctgggatcatattggcaaactctaagatgatacaagtatagacttagtttgtctgagcccgaggttcagtgtttggagaaaaataatacctatgtcgagataatatcagataacctataaaagcaggtagcccagtcatgcacattggtgatcaatcaatgttagctgaatccaaatattacgagtgcagatgctgaaaggaacaaaaggaaatctcactcagtcatccatctgccagtatttccaccctttcccgcaaagaggagctcagtgtctgtctctgttattgcatcaggatctcacattatccagtaaacccaaatgctgtaggtaagagatgtaataggtggtatttattaagtggttttaataaagttttgtggataggtatgacaccatttcttttgagcttaaagatgcttaaaatagctaaggttaaaaatgagggaagatctgaaaagaaaaacagtaaagagatgtgagatgtaaacactgaaaggaagtaagggtagagcaaaaaaaaagtaaagcatcaggtaaatatttaataaaatgtttatacatgtatattgactgtaggtgtagggttagtctattgaataaagctgcctttcttaggaatggtggtctcaaaatgcaccagtgccttcctattggctgaatgtccacttctgttctatgcactgtgctaaagggtggacatgctgagatgagtgtgagtggcctctgcaccaaagagttcagtctaattctgggggttggggataaatatgttagccagtaaatgccatttattgctttagatgtcatctcagaaggataaggagcagtggggacaggaggagcaagccatctcctgggggagtcaagaaagatgaggacagagagagaatgtcccttggatccaatatggtggccattagtgaccttgttaaaaccagtaggaatggggtggcaagaaggagagtagaacagactataagaaagaatgagttttgatgaaagtattggaattttgatgaccttttttattacaggtttgggagcaactactttcttcactctctaaactgcaaatcattcagggtaattgtgctggttcagttagcccccaagctgagaagacaggcccactgtggtttgagtaacttggaaatcttgtggggtcagtgttttgactctcttcattttggtcatggttcaggattttcacacaccactaaggtctaggggaagcttctcagctttctggataccctctcagggctcatgaagtggcaggcctgccctgggaaggtcaggattcttctgtaaaagcagagaacactgcatggagcccagagagcccactctctgcgctcttcccttcctatgggctcacacggggaaacagatgctttcctataactctgagcactgaagcagctttgctctgccttggccgaaacatctatccaggaccaaattcttaaaaccccaggggccctggggtgattttcagcccaggccctgaacctgtcataaaatgtaatggatgatatatttttaactgctgagaccagagagttcacataacctatgaagactgaaacaacataatgtttctgcagttttgaagcatttcaaaaaccagaggatggtctctctcattaggcattactagtaagacaaaagttcttaaccatttctgtgcgtggacgcctttggccgttgggaagcgcacgtggatcctttctcagaatatgcttttacatacatagaataaaatacatagaattacaaagaaattcagttatactgaaatggagttatcaaaatttttaaagaccactttatgatataataatataccagctttttcttgatgcatgaaataagaagatctacagacattttgagtactgttaagcataaacaatatttcaaggtgtctacaactataatatagtgtgtaatatctcagatttctatcgacggtagagtcacaggtctttctaatacttttgtggtttgatgcctacattttataatggaaggaaatgctaaatttcagttagaggttaataaaaataaagaaggaaaattcttttcctctatctaaatccacagatgccctgaattctcttcgaggttaagaacttctggtttaagatatgcttttggttgacagtagtaaaacaagccaaaagaagttgaccatttatgtgatgtgcagtaataaattagcaattcagagttgaggagctcattactaatctgtggatagtcctaatcccagcccttttctttctgagctttgccttttgtaaatctcagtgcttcacacacatcagacaaagatattttgtgagtggctctaaaaatgggggcaaaacatgaccctgaggaggcctggggctgatctgagccttaagacttatttgtggagaccttgtgctgttctttttttttttttttaattatactttaagttttagggtacatgtgcacaacgtgcaggtttgttacatatgtattcatgtgccatgttggtgtgctgcacccattaactcgtcatttatcattaagtatatctcctaatgctatccctcccccagccccccaccccacaacagtccccagtatgtgatgttccccttcctgtgtccatgtgttctcattgttcaattcccacatatgagtgagaacatgcggtgtttggttttttgtccttgcgatagtttgctgagaatgatggttttcagcttcatccatgtccctacaaaggacatgaagtcatcattttttatggctgcatagtattccatggtgtatatgtgtcacattttcttaatccagtctatcattgttggacatttgggttggttccaagtctttgctattgtgaatagtgccacaataaacatacgtgtgcatgtgtctttatagcaacatgatttataatcctttgggtatatacccagtaatgggatggctgggtcaaatggtatttctagttctagatctgtgaggaatcaccacactgacttccacaatggttgaactagtttacaatcccaccaacagtgtaaaagtgttcttatctctccacatcctctccagcacctgttgtttcctgactttttaatgatcaccattctaactggtgtgagatggtatctcattgtggttttgatttgcatttctctgatggccactgatgatgagcattgtttcatgtgtcttttggctgcataaatgtcttcttttgagaagtgtctgttgatatcctttgcccacttgttgatggggttgtttgttttcttcttgtaaatttgtttgagttcattgtagattctggatattagccctttgtcagatgagtagattgcaaaaattttctcccattctgtaggttgcctgttcactctgatggtagtttcttttgctgtgcagaagctctttagttcaattagatcccatttgtcaattttggctgttgttgccattgcttttggtgttttagacatgaagtccttgcccatgcctatgtcctgaatggtgttgcctaggttttcttctagggtttttatggttttaggtctaacatttaagtctttaatccatcttgaattaatttttgtataaggtgtaaggaagggatccagtttcagctttctacatatggctagccagttttcccagcaccatttattaaatagggaatcctttccccattgcttgttttcgtcaggtttgtcaaagatcagatagttgtagatatgcggcattatttctgagggctctgttctgttccattgatctatatctctgttttggtaccagtaccatgctgttttggttactgtagccttgtagtatagtttgaagtcaggtagcgtgatgcctccggttttgttcttttggcttaggattgacttggcgatgcgggctcttttttggttccatatgaacttgaaagtagttttttccaattctgtgaagaaagtcattggtagcttgatggggatggcattgaatctataaattaccttgggcagtatggccattttcacgatattgattcttcctacccatgagcatggaatgttcttccatttgtttgtatcctcttttatttcattgagcagtggtttgtagttctccttgaggaggtccttcacatcccttgtaagttggattcctaggtattttattctctttgaagcaattgtgaatgggagttcactcatgatttggctctctgtttgtctgttattggtgtataagaatgcttgtgatttttgcacattgattttgcatcctgagactttgctgaagttgcttatcagcttaaggagattttgggctgagatgatggagttttctagatatacaatcatgtcatctgcaaacagggacaatttgacttcctcttttcctaattgaataccctttatttccttctcctgcctgattgccctggccagaacttccaacactatgttgaataggagtggtgggagagggcatccctgtgttgtgccagttttcaaagggaatgcttccagtttttgcccattcagtatgatattggctgtgcgtttgtcatagatagctcttgttattttgagataggtcccatcaatacctaatccattgagagtttttagcatgaagcattgttgaattttgtcaaaggccttttctgcatctattgagataatcatgtggtttttgtcgctggttctgtttatatgctggattatgtttattgatttgcgtatgttgaaccagccttgcatcccagggatgaagcccacttgatcatggtggataaggcttttgatgtgctgctggattcggtttgccagtattttattgaggatttttacatcgatgttcatcagggatactggtctaaaattctcttttttggttgtgtctctgccaggctttggtatcaggatgatgctggcctcataaaatgaattggggaggattccctctttttctgttgattggaatagtttcagaaggaatggtcccagctcctccttgtacctctggtagaattcggctgtgaatccatctggtcctggatgttgtttggttggtaagctattaattgttgcctcaatttcagagcctgttattggtctattcagagattcaacttcttcctggtttagtcttgggagggtgtatgtgtcgaggaatgtatccatttcttctagattttctagtttatttgcgtagaggtgtttatagtattctctgatggtagtttgtatttctgtgggatcggtggtgatatcccctttatcattttttattgtgtctatttgattcttctctcttttcttcattagtcttgctagcggtctatcaattttgttgatcttttcaaaaaaacagctcctggattcattgatttttttgaagggttttttgtgtctctgtttccttcagttctgctctgatcttggttatttcttgccttctgctagcttttgaatgtgtttgctcttgcttctctagttcttttaattgtgatgttaggttgtcaattttagatctttcctgctttctcttgtgggcatttagtgctgtaaatttccctctacacactgctttgaatgtgtcccagagattctggtatgttgtgtctttgttctcattggtttcaaagaacatctttatttctgccttcattttgttatgtacccagtagtcattcaggagcaggttgttcagtttccatgtagttgagcggttttgagtgaatttcttaatcctgagttctagtttgattgcactgtggtctgagagacagcttgttataatttctgttcttttacatttgctgaggagagctttacttccaactatgtggtcagttttggaacaggtgtggtgtggtgctgaaaagaatgtatattctgttgatttggggtggagagttctgtagatgtctattaggtccacttggtgcagagctgagttcaattcctggatatctttgttaactttctgtctcgttgatctgtctaatgttgacagtggggtgttaaagtctcccattatattgtgtgggagtctgagtctctttgtaggtcactaagggcttgctttatgaatctgggtgctcctgtattgggtgcatatatatttaggatagttagctcttcttgttgaattgatccctttaccattatgtaatggccttctttgtctcttctgatctttgttggtttaaagtctgttttatcagagactaggattgcaacccctgccattttttgttttccgtttgcttggtagatcttcctccatccctttattttgagcctatgtgtgtctctgcacgtgagatgggtctgctgaatacagcacactgatgggtcttgactctttatccaatttgccagtctgtcttttaattggagcatttagcccatttacatttaaggttaatattgttatgtgtgaatttgatcctgtcattatgatgttagctggttattttgctcattagttgatgcagtttcttcctagccttgatggtctttacaatttggcatgtttttgcagtggctggtaatggttgttcctttccatgtttagtgcttccttcaggagctcttttagggcaggcctggtggtgacaaaatctctcagcatttgcttgtctgtaaaggattttatttctccttcacttatgaagcttagtttggctggatatgaaattctgggttgcaaattcttttctttaagaatgttgaatattggcccccactcccatctggcttgtagggtttctgctgagagatccactgttagtctgatgggcttccctttgtgggtaacccgacctttctctctggctgcccttaacattttttccttcatttcagctttggtgaatctgacaattatgtgtcttagagttgctcttctcgaggagtatctttgtggcattctctgtatttcctgaatttgaatgttggcctgccttgctagactggggaagttctcctggataatatcctgcagagtgttttccaacttggttccattttccccgtcactttcaggtacaccaatcagacgtagatttggtcttttcacatagtcccatatttcttggaggctttgttcgtttctttttattcttttttctctaaacttctcttcttgcttcatttcattcatttgatcttccttcactgatatcctttcttctagttgatcgaattggctactgaggcttgggcattcgtcacgtagttctcgtgccatggttttcagctccatcaggtcttttaaggacttctctgcattggttattctagttagccattcatctaatttttttcaaggtttttaacttctttgccatgggttcaaacttcctcctttagctcagagtagtttgatcgtctgaagccttcttctctgaactcatcaaagtcattctccatccagctttgttccgttgctggtgaggagctgcgttcctttggaggaggagaggcactctcatttttagagtttccagtttttctgctctgttttttccccatctttgtggttttatgtacctttggtctttgatgatggtgatgtacagatggggttttggtgtggatgtgctttctgtttgttaggtttccttctaacagtcaggaccctcagctgcaggtctgttggagtttgccagaggtccactccagaccctgtttgcctgggtatcagcagcggaggctgcagaacagtggatattggtgaacagcaaatgtagctgcctgatcattcctctggaagttttgtctcagaggagtacctggccgtgtgaggtgtcagtctgcccctactcggggatgcctcccagttaggctactcgggggccagggacccacttgaggaggcagtctgtccattctcagatctcaagctgcctgctgggagaaccactactctcttcaaagctgtcagacagggacatttaagtctgcagaggtttctgctgccttttgtttggctatcccctacccccagaggtggagtctacagaggcaggcagacctccttgagctccggtaggctccactcagttcgagcttctcagccactttgttaacctactcaagccttggcgatggtgggcgcccctcccccagccttgctgctgccttgcagtttgatctcagactgctgtgctagcaatgagcaaggctccgtgggcgtaggactctccgagctaggcacgggatataatctcctcgtgtgctgtttgctaagactgttggaaaagcgcagtattagggtaggagtgacccgattttccaggtgccatctgtcacccctttctttgactaggaaagggaatgccctgaccccttgtgcttcccaggtgaggtgatgcctcgccctgcttcggctcacgcttggtgtgctgcacccactgtcctgcacccactgtctgacactccccagtgaggtgaacccagtacctcagttggaaatgcagaaatcgcccgtcttctgtgtcactcatgctgggagcagtagactggagctgttcctatttggccgtcttcgctgttatttttaagaataaattttaaaaggacaaagtaaaactccaagttgaacttaatggcaaggaagtgtcaaaatgagactctgcatgtaactccccatgcctctccactactgatatggatctgcctggtccacatcatcctggagtgctagggtgaccctagcactgtatccagctcttctcacctctttaggaattttaagcccacaaattaagtatggaatttattacatggtatcttgcatttcagaagcagaatctgagatggggatttttgccagagatttattgggggagtgctctcagaagtgaggaaaacagaaagggacagagaaaaaaatgttgagtaaggatgtggtctcaggaaaagtctagcctcagcctgatcccgtgcagaagctctggagcagagcttatcccacccagcagcaagggggatggggtgttatcctgctgcatctgccagctagggaatggggcaggtattagttttctaggccacttcaaaaattacaaatttagcagcttaaaacagcataaagttactatctcacagtttttgtcagttaggagtctgagcatggcctgcttagcgtttcacaaggccgtactcaaggtgccagccagatcttttatgcggcttggggtcttgctccaggctctcatggccgttgctggaattcactcctgcagctgtggagcccagggtgacttgcttcttcaagactagcagaagactctttttgctgcttctagtctcttagctcagccttccagtctcttagctcagccttccagtctcttagctcactgctctccaaggattcttgacacttgcactccaacccactctgggtcagaagctattcctccctgtgaaaggggtcacttgagtaggccaattcacgccatcctttctgattcactcaattgagctgattcagaactttaattacatctgcaaactcccctcacctttgccatttaatgtaacatcacaggagtgagaaccatcatatgtccagtccttcctaccctcaaagggagaagattatacaggggcatgggtcactggcatcattttaggattctgcctgtcacagggcgtcacttgcaggcttcgctggaggagatggctcctgtcacccaagggcagttctcctgagaaagttgtgggcataagcaatgcatgtagcggctagggcactgaggtcccgtgacctggttccagcctgctctccttccctgtccatagtccctccctgcccctcccccgtgatcttgccccacagacctttctcaggtggcggtggtgatggtgttgtaggggcaactggcttttttagagtgtcaggagctctccaaggtgcttgacatccatttctctaatcttcacaacaagcatgcaaggttgattctgtcatcccattttacatctgagaaaacaagctcagagagagtaagtaaagtggccaaggttgcagtttgcaagaaatggagcttggaccccctctgaccttgaactggctgacatcaaagttgtcgctttgcctggtcctgtcacctctcttcctcagatgtctagtgtttattagacctccatagtatcttcaccaactgagaaggtgccccatcagcctgaggaactcccagggtcacccctctacaaggattcttgacacttgcacttctacccactctgggtcagaagctattcttccctcattggattgccaccattcttgtaagggcaccttctctgcaccacagttttttgctcacactcctcctatttttctcttctcagcttccctatgcctcatgatgccaggcataaggcacacagcaaccaagtgttggcagaaggcaaattatatggtttggctgtgtccccacccaaatctcatcttgaattttagctcttataattcccacatgctgtgggagggacctggtgggagataattgaatcatgggggtgattttccccatactgttcttatggtagtgaataagtctcatgaggtctgatgcttttataaggggaaactcctttcacttggctctcattctctcttgtctgctgccatgtaagatgtgccttttgccttccaccatggttgtgaggcctccccagccatatggaactgtgagtccattaaacctcttttactttataaattacccagttttgggtatgtctttatcagcagcatgagaacagactaatacaccaattgaggttcctccagagaattaacaaaatgtccatgcactctttcgttgttcccccatacccacagacctgccatccctggccctgcctggatgccggtacctggccactgctgctatattccatgcttttggacaagagcatgttcagtattgtccaggagacccagggagctcaagacagagctgagatccagttcctacagccacagttaacaccccagcccccgacacacacacagacttttcaatgcaaaatcaaaccattcccaaatatccagctacatattgttttacctttgaagagaaaaaagcatcagtggggttatgtgattttcatagatgaacaatttttgcaaatatgttaattgaagagtaattggtgctttcttgaccctcctgagcactgatgcttgccaaagggttatacatttcagactaatgatgatatccattactatatgtgcaattgcttataaactaatatatagtcatattaaaatctctaatctgattgagaaattttcagaaacaaggtacactgattttctcaccacttatttcctgctctcatgacagaatttctggagttctttgaattcacctggtttttggagctctgtcaagtcaatatttataactgaactagttcaaacagttcaagcattgtctcttcctttctggttgaagttctgtcttagaagactgttgtagtcagctgtgcttgtcataaagttttgtttaaaattattttagaattttcttctttggctttaatttaaatttttgtttgtttacttttttttttttttttccccggctcactgcaagctccacctcccaggttcacaccattctcctgcctcagcctcccaagcagctgggactacaggcgcccgccaccaggcctggctaatttttttgtattttttagtagagacagggtttcaccgtgttagccaggatggtctcgatcttctgacctcatgatccacctgcctcggcctcccaaagtgctgggattagaggtgtgagccaccgtgcccagccttgtttactttttaatttataggattgtaaatgaaactatacttggcctcagtttattctctgggaaataggttcttgctacaggtacagtttataataaggatttatttcataatagggagctttttatagattttaatatcatagttgccatttaaaaaattgtattaaaggccgggcgcagtggcttatatctgcaatcccagcattttgggaggccaaggcgggtagatcacctgagattaggagtttgagatcagcctggccaacatggtgaaaaccccgtctctactaaaaatacaaaaaattagctgggcgtggtggtgtgtgcctgaattcccagctactctggaggctggggcaggagaatcacttgaacctgggaggcagagattgcaatgagctgagattgcgccactgcactgcacagagtgaaactctgtcaaaaaaaaaatgcattaaaaatggtaatgatcaccatttattgcttgcctacagtatgtcagtcattatacaaggtatattttataattataaatattatttattatctgattacaaatatgttataccttgcactgtgtcctgtatgtctgttatgtttatttctgaattttccttcctttttcctctccatgctttgatctggatatttcctattgagagaatacactgaggcccagtgtgatttcattcacaatcctataaattaaaaagcaaacaacttctgggtcactggtcgtcttttctgctgtgttcaatctccagtaaaatatgtcagcaccttaaccactgtcctctgcctggtttcttagtctcacagccccgtgctgctgtagaattggcagatgccttgaggacaattgtggcgtacagtaaacatacctcaatatacttatttctgtttgggattttcgcccctcaagtcctcattgcgttattagccctgagctcttaagttttgtcttcacagagtcataagacttccagaaattcagcttagaaactcaagaacttagctttttagccactgcttcactttcagtttcatagcctctcatcccacactgcttacaaatctggaaacacctcaagggaaaagtgcccataaatgttggggttacctccacattctttccttctctttgggaccctatactctgaagtcctggctgtcttgatagttagttccctgataactttatatatttttaatttttttaaatgaacctggcatttcaaacataagttccatgataattttaaacaggggtgtgtgtgtgtatgtgtgtgtgtgtgtgtctgtgtgtgtgtgtgtgtgtgtgtccagcttttcgagttgtccgtgggaggacggtttcagtaagttactctatcattactggaaatgcaaaatcctgttttcttttaaaagagtcttcaagctgatgaaaattttaaagtagcttataacattttaactgtgatcttatttattatgagtatagagataaaggaaaaggcatcccacttctgaagatttctcgtttctaggagtgtctacaagattatcataggtgaaagtagggttggatgcagagaaatagtaagaaaggatggaggatggaggggataaaaagatcacatgtttggtgaatcctcttttaaaaacacttagaagattttccctaaactaattatctggcttaatgctaactgcttatttgctgaccttctgctttatttacaaatttaaagtggggccaacccttcctgttttcctttaatttaccccggcagctgctggttagctaaggaagaaaaaaaacccttttttttttttttttttttttaatggagacaagcagcaattaggtaggcttctaggtcaggtggccagttaggggtgccagggttcccaggtccagctttcttcgggtcatagagtgagggtgggaatcaagtcactcagatatttctcccgaattgaaatgcgtgtcttcctttggctgggcagatgaggtcccctcttctccatctctgctgctgggtcctggtgcaagcccttactctctttccactaaacccatgtggcagcctcctccttagcctgtttctccccagtcctgcacccatcagtccactgccacacggcagctacagggacctttctagaacacagcctcctgctgcctccatgttggcctccctgcccctgtcagagggatttttatttattttatttatttatttttgagacagagtcttgctctgtcacccaggctggagtgcagtagtgtgattgcagctcactgcacctccgcctcctgggttcaagcaattctcctgcctcagcctcctgagtagctgggattataggcgtgctccaccacgcccggctaatttttgtatttttagtagagatggggtttcaccacgttggccaggctggtctcaaacttctgacctcaggtcatccgccttcctcagcctcttaaggtgctgggattacagacgtgagccaccatgcccagccaagagggacttttctataacagcctctaggatcatgctacccccttcccagctctccctagcttttaagatcacataacctgcaaagtgccctgagatctggttctgcatgaatcttctctaccctattgctgcctatcaacttgacttcccacctttgggagtcagatgcagtccgctggacagcccatgccctctccatgtggctataccacccctgccttgcccctgctctctgcctgatgtcctactgtcttttgactgtgcccaggggcatttcctctgggaagcctgccagccctcagtctgaacctttgggtccccaaagcctcccctgtcctggtatgtgttgcactgcgttgtcatctcttgtctgtttcccctgagactcattattccctgaaggtctttcatctctgtttccctgtggcccagcacattgcctggcataaagtaagcacccaataaatttcagatggagcatatgttaagttccctataaaacctcagctgctgcaaattctgccaccagcctgggtgttctcctctgtggggactccttcagttttcagagacaggagactcccatagatttttagcaggaaaaggtagattcttgccttttagtctgtcagaatgacactttattagatgctttagaactgcagaagcttcaattttagaattttcagtttgtagcgttattttttttaagcagtaaaatttcagcgactatggtctgtgccagagccctaagcctctttctccatcctaaggagtttctctgcttaattgcagtgctgagctcagggaagctgcatatccaaaaatgaaaaggaaaccgctaaattgtgctgctacttttcctttgcagctcagataaaacaggcccagtgtgggaagaaggggctgtccttttgggggtgttggcctgtttctaattgctgcaccctcctctgcctccacccatgcctcagtgtggtttgggtcccttctgcccagagctactgggacatgtaataagaagctgcttttcagacttcttaattaaaataggttccggcagccattgccaggaagcagcattcgcacccctacatgtccaaatgcattactcatccaaaataagatatgccacgactcaggtttccctccttagccaccatggcttgaatggctgcatttagaaacagcccttacttcaagcccctatttcttaattatttgtcacttattcgcattcatccttgtgtgtgaaacatttttcccctcaccctatatgctgttatgtaaacaagtaattttttaggatgatgtcagaacctgatgtagttggggtggttttaaaatagtattttatggacagcaagaaaagtagttttgcttctggtttcacttgctagctttgggatggagggacatttatttgagcttctgcacctctgtgatcttgtctataaaacggggggcaatggctggtgctgtggctcacacttttaatcccagcactttgggaagatgaggcagaagaatcacttgaggccaggagttcaagaccaccttgggcaacatagtgagaccccatctctacaaaataaaaaataaataaaagaaataaaagaatgaaagttagctaggcatggtagtatccaactgtagtcccagctactcaggaggctgaggcaggaagattgcttgagcttaagagttcaaggctgcagtgagctatgattgtcccacttctgggaaacagagcaagactctgtctcaaaaaaaaagtggaaggtgggggtcaataatctgccagctcaggtattgtaaggattaagaaagacagtgtctgtgaagagcttggcccagtctctggaacacatttggtagccaggaaatagtaaatgacttctgtttccctacccccatcttcacctcctcccctagaataacaacatcataactgacttatttcatcattaaggatttaaatgcaaaaccttaagatagtcagccttagggaaacactgaagaatttatttttaaacacataaagattgcattcattcatccttctccacaccgcgggcagtcttcaaattctggttagcagagtcagcgggcagggaggatctggatcctggggttgtgtgctttgctcccagaggacatgagtatcaaaggtctgccccgatatctggagttcaagaggcgttttctggaaacaatttgtccaaaggctcccctatcactctcttggagaagtcctgtgttttatttatgctgaatgattgaatctattcccagccgaatgttttcctgaacaccagtaaaaatcatctgccagtcactcgggctcccaccccgggagtcatctgtcccctttgcctggtctcccatgcctcacagctcagcagccacaggcatggccatatctgcctctcttgcccttgccactccacttcatcatggccgtctcctctctggggctgctgcgggagatttccagtctgccctccagtgtctctgcatgcattctactcacctcctctccccccgcagccccgaggaactctgaagaaacacaagcttctgtggccccgtacacgtaggactaccaccgcttacttggaggcagtggcagtaaaaacggaaacaacaaacaaaacagaataaaatcctctttaactttgtttaacttggtgtcccatgcagtctatttaatttcagactcttatttaccccagtcctagggaactgaggttcataggaccaatctgggtgaatgctgctacagtttgtggatgggctgctccccatttgcttgttcaggtagctttgagcccaaacattggtcagcaagggcatccatatagtgacatgctgtatgtcatcaaaaagaaggtgttcctgacatagacaatttccagaatatatgctaagtgactaaagcaaagtgcagcatgagatgccaccatgtgctgcagatgcttggactggatggatacctaagtacccccaaactggcaggcacatctgcctctggggaagggggctgggtgtcggggaggggtgggagcaaattcctccccgtgtgcctcctggggcctttagaacctctacttctttgaacacagtgctactctgctccaaacgcccccaaacttcacacagagagtagtatgaagtcctcatctctgcacttgtggccctgaggttggcctcagcctgcccgcccagcttctcttctcattcttccctgctgccactctcctgtctccccagggactcggctgtttgagccactttcctttgacacgtctcagacttgccctgctccacttggaagtccttggagcagcccacacgcacccccgccgagctcactgtctcagaatgtgggaccacctaccagctttactcctgcgtctaactctaacttgtgagattgtgggggccagagtccccaggaggcagtgacgctgtgtgcagaaaagccaagagctccagggctgaacagatgtgactgaaaatctttaccagccatgtgccctggggaactgagcctttcatttcccctttccttttctgtatattggaggataacaagccttcactcacagggcgtgggtgtgtttctcatctccttgcagcacctagcacagtacctggcatctcatatgttcagggcatgtttgctctcctcccttcctttcccatcgtgactgtcaatcgactgttcccttggggcttgagattcttggattccaaaggaaagaacacagggccaggagtcagaatttcatccttgcctccgctgatgtctaattctgggataacgctgggccactcagtctttggattccctgccctaacacaaaatccatatttatctcaatgcaaaagagatgtggtcatcgaaacactgaatgcaaagggttagcagagtgagcacagatgttctcccatttgccaactggtttctaagaatatttggaggatgagtaaagtaatgtcttccatatgctcaagagaagatgatttagcaccatgcaaggtagagaaggagagcccccacccatcaacagaatgaccttggacaagacactagctgccctaggcctcaattacctcatttaaaatatgaaagtcataaaaccctacctcacgagggtgattgtgaggattatatgaggcaattcatgtagaaggtctttgtaaactgtgaaatgctctacgactgtcagccaggattagtagttaatgcacgtatttgtttattgtttcagcggagggtgcaggacgtcatcagcccgatcgtgtttgaagcagcctacagcctcagtgagcatgtgactggagaggaggagagggaactgccgcctctgacaccagttctccgctggaaaaagggacaaaagattgcccaaaagaatcaggtcagaaccttaaagctcatactcagcacccaaggtggcagctgcacagagcagaaataatggcccaaaagttgagagagccgtgggcctggctgctcaggagaccgcagccaggacacacctcctctctgggtctcccttttctgatctgcaaaatgataaaataaacagtcttaggggttacttgtgactactgtgggacttaaacactttcagacaattctcaggctgttagaagttacaatcccctcgagttcgtgaactggctggccacttggtccctgaacttgcctctgttcctagactgttttcagagcttagattggtggatagtaggtgcttaatgaatgttttattggtgggagaatgagtgaggtgaagaagcaagaatggtagcttgctgaattggcagttgagttacagaatgctcaacccaagagtccctggaaaccagagcactggggcaagtacaggtggtccacactcatcagattctgggatgtgcggctgtgtagagaagctttagtgcgatgggtgtatcactcgtatgaagtaggagtgagcctgtgcctgattttgtgcagcagcgctggccagctctgaggcgtgcagcactgagtgcggtgcaggaatatgcaaggaatctgcaatcccaagtctgtttcaaatcttttcttgaaacccaagatcaccacagattcagaaccctgtggaagatcaggaaaaactgtgggctaacccagcctcctaggcagggttggggcaaagctgtggaaccacctttcacagtgcttcagaccactgtaagtgtaggggaaaactagcagattgtgacccatgccttgtagattagagttgtagactgaaccacagagaagggtttgggatttgagatatccatccaggtgttcacgtaagtgctgagatttttaccaaggcatcgcattatctcccaaagcctctttcccatcatcctaagtggggttccctagaagcagagcctgagaaagggaattgggaacacatggtctaatgatgctgtgctcttagggaaaacctgtaaaggaaaggcatgggggctcaaaatggttgtggtctcagataaagtctggctgagggactctggaacaaaaattacaccaaagagttgtcctcaccttgaggcaagaggggcttcccttttgtgccccatatcattcagccattgactggctgtgggggggaagggaagtgtaaccctccttgaaaggagatcccctcagctgaggatggttctctagagaagaatgcagatgtgagccataagcagcctacacacacatcagccaggagatgggccacagttcacagtgcccactacacatcaaaacacaccctctggggaatgctgccaagaggttttgatttaaaacacgaaccttctttcacaacacaagtgccccaggagagtggcctgtaagtcccactggccattgatacttggaacaggccctgggggagtgagggaggacacgtggtgtctaagcaggtgggcagagtagatgggctggccttactctgaggtgtggagaaggctagagaagagtagaagataaggtgaagaggcagggcaggaagctgatggcttctgccttgactgggaagtacagacctaggtcccctcctgacagggaagtggggagaagaggttggcctggggacacagtaaagcatggtattatggtaacttctacataattggtctctagttctagaattattctgctttctaaggtcaaatcttactggactgataaacttacccatacttgggttacggaagttacccagactcggggtcctgggaagaatttcagggtcctctgtgcttatttgtttctgaattgacccagtgaggtagtcatctaccctgtccagcatcttgctagcctggacatactttccacagtgaacctatctctcattcctgcaagtctgtcagtggcacagatgtggactttctttagtgaaaagcatcttggaacctttactgacatttttagatttaagcagcccaatcaaagccagagatggagggacagattagtattgaaatgatgttcttggtcacttctggttccagatggccaaccaagcacaaatgttgatgtctgtgccttggtaccccattgcaatgattataaatgagtagatcggaacagggaggacaacactgtgaaagaaagggcatcagctaataataagagtccagtaattttctggtatgagtgaagtaaatggaagagtgttagtgggtgaacttgaactgtacatggaagagctggcttcctgcctacccagggaacagagaagctgcagccacagccaggccaacagttacagagggggccagagtaagaagtgggactgcaagtggtggtggtattgagggaggtcagtgaaatgtgaaggttggtatgaagaagggttagagttgacttttcaccattgtccccacccctacaggcttcaggcatgcagaatagcaagcagccaggcatcgccttctctaaagtgttaagtaaactgtttaagatagtgtgggcgacctcgttctcagagaaaagaaagccttacttctggcatttgaagtcaccaacgtaagagctagctttctctcccacaatccacccaaacactttcacagattttctactcagtccttttaccttagtttgaaatatgaatggacaaccaaggaaacccaagattgaggaatatttggtgcatgaaaggaaaggctaaaataaaccaggagaataactaacttaaaaggaaacaaatgatttagggaatataagagattattttaaaaaattttaaaaatgcaacaccttaatgtctatgcagtagacccaaggagatttaggaatatattccattcttttcattttctaatggatgggattctgttcctttttaaagggaggaatgaaaggcaagggaagtgttcttaaaaattaaaaatatatttgcagcaccaaaaactcagtggaagtattagaagacaatggtaaataatttcccaatggaagtgctaaaagacaagtagaaaagaaagctaaagaataaatttacggggtcctatatctccaagtaataagaatactagaaagtaagaataccagtaataagaaaagagaaagaagggggagaaaattatgtaataatagaatagcatgtttcagagttaaagagggagactattttttaaaattggtgtaaacaacaatttacaatcacaataaaccaaaattatcatagacacatcattttgaaatgtcagtgcttcaaagacaaagggaaaattctaaatgtttcgagggcaaagaatgcaggaatgttgatcatggaggataagtcagcttacaacagaatgagagtcagactgagtagtccattagactttttataagcaagattagaaactaaactatgatgaaataaaggcttcaatgttctgagggaaaatgattttgaaattagaattttgttttcagccacacaatcaaagtatgtggtaaaaataaagtcacttttcagataagcaagaacccagaaagtttacctccctagtaactcttccaaggaaattatcttgtacttcaacaaaacaaaaatgacaaccagaaggagcaagatgtgggatacaagaaactctggaactaactctcaaaagtctaatgacaagaaatcccaggatgataactgcagcaagtctaaaaagcagccaagtctattgagaagaggagatcaattaacttccagaagaatgaagctaagcaatagaatgatgagcaagtggcaaatattcagtatatagtgcagattgaatatgtttcttttatgggtaagaaaaaaataaaagcattcaagacctctcagaaaaatagaaataagataattacctgtacagattctccttgactcacgatggggttatgtcccaataaacccatcatgaattaaaaatattgtcagttgaaaatgtatttaatacacctaacctgctgaatatcattgcctagcctaccttaaatgtgttcagaacacttacattagcctacagttgggcaaaagtcatctaacacaaagcttattttacaataaagtgttgaatatctcatgtaatgtattgaacactatactgaaaatgaaaaacaaaatggttgtatgggtactcaccattaacacacacagctgaaagcacactggacctaaagaatatttgaactaaaattaactgctggattatggggctactagtgtaacagggtcatccatttctctctcttctgatgagtctcaagaatagctggtagaagccactgcggtattaacactcgttgatggcttagcaggcatggtgttctgtagaaagctatcagttgtttaccctcctaatcctataactgactgggacctgcagctcactcccactgcccagcatcacaggaagtattgtaccacatattgctaccctgggaaaagcttttgaaataaaaaatttgaaatatggtttctactgaatgcatactaccttcacaccattgtgaagtcaaaaaatcgtaggttgaaccattataagttggagaccgtctctatgtcatggttaaaatataaaacaaattaaaatgtgataaaataaccagttataactatcagatgttttttgtaagcctcatggtaaccacaaggcaaaaacctatagtaatacaaaaataaaaataaaaaagcaaagaaccaaaccataccactagagaaaatcacttgaccacaaaggaagatagcaagaaaggaagaaaggaacaaaggatctacaaaacaactagaaaacaacaaaattgcagtagtaagtccttacttatcaataattatcttaaatgtaaatggattaaactctccaatcaaaagacatggagtggttaaatggatttaaaaaaaaaaaaacaaaaaacaagacctaactatatgctgcttataagagactcacttcacctgtaaggacacacataaaatgaaagcaaagggatgaaaaaaattctatgcaaatggaaaccaacacagagcaggagtagactttaagtcaaaaatagactttaagtcaaaaactgtaaaaacagacgaagatcattatacaatgataaagggatcagttcagcaagaggacataacaattgtaaatatatatgcacccaacaccagagaaactaaatatataaagcaaatattaatagatcttatgagagagttagattgcagtacattaatattagggaatttcagtaccccactttctgcaatggacagatcatccagacagaaaatcaataaggaaacatcagacttaaactacactctagaataaatacgtctaacagacatatacacaacagtccatccaacagcgacagaatacacattcttctcaactgcacatggaacactctccaggatggatcacatagtaggccacaaaataaatcttaataaatttagccttgaaatatcaagtatcttttctgaccacaatggtataaaacttgaaataattaacaggaggaacttcagaaaattcacaaatacgtggaaattaaataacatggtcctgaatgaccattgggttaatgaaataattcaaagggaaatttaagaatttcttaagacaaatgaaaatggaaacacagcatacaaaaacttaaaatgtggtaggattttgagtaagtagaagagtataaagaagaatgttgatcctagaaatattctatctgaagtagaagttgaatattcctggactttaactttgcaactgtagaggaggatgtataatcatgacacttgtcttggctcaactgtgagcaataatcatgaaccataataaaattagcactatttattggttttcaatatttataattaagccaaaatcagagctatggtgatagcataaaatgcaaatgtcattaaacttgattatataaaggtaaaagtagaataagataagttttcttaatatcttaatcttttaaattgatgagtcaagagattgcaaaacttgatgaaacaggaaatcactgttggcttaaaattgcagaggtcatcagtagagcaacacttcctaaagtgtgattcctgaaccagcagcatcaacctctcttgggattttgtgagaaatgaaaattgtttttattttattttattttattttatttttttcctaaatttcttatttccttctctttttttaaagttttattattattatactttaagttttagggtacatgtgcacaacgtgcaggtttgttacatatgtatacatgtgccatgttggtgtgctgcacccattaactagtcatttagcattaggtatatctcctaatgctatcccacccccctcccccaaccccacaaccgtccccggtgtgtgatgttccccttcctgtgtccatgtgttctcattgttcaattcccacctatgagtgagaacatgcagtgtttggtttttttgtccttgcgatagtttgctgagaatgatggtttccagtttcatccatgtccctacaaaggacacgaagtcatcattttttatggctgcatagtattccatggtgtatatgtgccacattttcttaatccagtctatcgttgttggacatttaggttggttccaagtctttgctattgtgaatagtgctgctataaacatacatgtgcatgtgtctttatagcagcatgatttataatcctttgggtatatacccagtaatgggatggctgggtcaaatggcatttctggttctagatccctgaggaatcgccatattgacttccacaatggttgaactagttgacagtcccaccaacagtgtaaaagtgttcctatttctccacatcctctccagcacctgttgtttcctgactttttaatgatcaccattctaactggtgtgagatggtatctcattgtggttttgatttgcatttctctgatggccactgatgatgagcatttcttcatgtgttttttggctgcataaatgtcttcttttgagaaatgtctgttcatatccctcacccactttttgatggggttgtttgtttttttcttgtaaatttgtttgagttcattgtagattctggatattagccctttgtcagatgagtaggttgcagaaattttctcccattctgtaggttgcctgttcactctgatggtagtttcttttgctgtgcagaagctctttagtttaattagatcccatttatcaattttggcttatgttgccattgcttttggtgatttagacatgaagtccttgcccatgcctatgtcctgaatggtattgcctaggttttcttctagggtttttatggttttaggtctaacatttaagtctttaatccatcttgaattaatttttgtataaggtgtaaggaagggatccagtttcagctttctacatatggctagccagttttcccagcaccatttattaaatagggaatcctttccccattgcttgtttttgtcaggtttgtcaaagatcagatagttgtagatatgcggcgttatttctgagggctctgttctgttccattggtctatatctctgttttggtaccagtaccatgctgttttggttactgtagccttgtagtataatttaaagtcaggtagcgtgacgcctccagctttgttcttttggcttaggattgacttggcgatgcgggctcttttttggttccatatgaacttgaaagtagttttttccaattctgtgaagaaagtcattggtagcttgatggggatggcattgaatctataaattaccttgggcagtatggccattttcacgatattgattcttcctacctacgagcatggaatgttcttccgtttgtttgtatcctcttttatttcattgagcagtggtttgtagttctccttgaggaggtccttcacatcccttgtaagttggattcctaggtattttattctctttgaagcaattgtgaatgggagttcactcatgatttggctctctgtttgtctgttattggtgtataagaatgcttgtgatttttgtacattgattttgtatcctgagagtttgctgaagttgcttatcagcttgaggagatatggggctgagacgaaggggttttctacatatacaatcatgtcatctgcaaagagggacaatttgagaaaattcttgggcccaccccagacccactgaatcagaagctgatggggtgggccccagcaaactatgtttttgtttttgtttttgtttttgtttttgtgttttgagacaaagaatcctctgtcacacaggctggagtgcagtgacaggaactcggcccactgtaacctccacctcccaggttcaagtgattctcctgcctcagcctcctgagtagctaggattacaggtgcacgccactatgcctggccaatttttgtatgtttagtagagacaagttttcactatgttggccaggctggtcttgaactcctgacctcaggtgatctgtccgccttgacctcccaaagtgttgggattacaggtgtgagccaccgtgcccggccagcaatccgtgttttaacaagatggctgggtgattctcatgcagctaaagtatgagaactgatacagtagaggagttaaactaataatttgcccatcaaaattatggaggtgaaggagtggggatcgttatgtgagataaattcctgtctatcatggaaggaatttagtaaaataatgtctagatctgataaatcaacgagtagtagtatcagcatgttttctagagatatggaaataatcatcaaaagaaacataaacggacgtgggtaataatgagtaataatggttgcccctggagaggaggactcagtatggcgaggtatgtggcagggggttattatttttctaaccatgtgattctttggttgaaattaaaataaaagaaaaaattgttcttagattgggaagattgtccaggagcctgagagaagttctgggagagcagttctttcttattgtccttttcctgattatggggaaaaaaaaaaaaaaaaaaaagataatcttccagatgttggctcagtttgaggaggaggaaagattctgagagtgaggcccactgcaggaagcagagctgatctttaacctgtgtatatatacacaacagtttgacacagagcatctcacctctttcataggaaggaataaattcatcagaactctctaggtcatgttgccagataacattagggttccactactttaaatgccttgatctcttcactgagcccatgttggtacccaggactatacagaagggtggatcaaatcatgatgaccttttagagttggggtctgcccccactgatggcctaattaaagtggaatcgctgcacagactgtgtgtgtaacatggagatagtgaccagtacatgttaagtacaggcttactgattaatctgaggctttttgctatgagttaggaatgtgcaggacaggcaggagaccaagccttccctctatagggtacatagtcctgggagaagacgggttccaggatagggctttggcactaggctctggtgagtgaatagtgggattgctgctaatgctgagattggattgggattctgggcgctctggggacggtggagcttgaatgctacaagcctccgtacatacagcctgatgggcacacattgcaccttcaaaatttaaggaaagcaaagacctgcatctgtctcatcagaaagggaggcatatttgatagcaggaaaaagacaacctttttttcattaaccagaggagtattttaaaagactataaagctggaagcaattcaattgtgtgtctactttatgtaagacctcgatgaaaaaataaatcattgctgccttcattggagtcacagacagtccaggaataatttacaaagtgagatttagattagtgtgtaagaatttcactgcagaggccacttctggctgaggagaagatgttctatggagaaagggagaattggccagagccttaaaggtggagtaggatttgggtcctcagggaatggaggggctgatggatgctaaaggtctctcacgtggctgaatatctagtgagggaaaggggagaggccatctggactggagattcagtcatgcagtctgaagccacttgttcactggctgaggagttggatgtgattctacggtggacagaccatggcatattttgcagtttggggagatcgtagatgtgcctcagggagattggtgtgcctgggtatggggaggccagttaagaaagagcttgttgcaggggcctttgcaggtgagtccctggggagtctgtgtgataccccccagagagttgactcctaattaattgctagttggtctcagctgctgaaacagagggtatggaactaaatgaaacaatcatgggaagtcctggctggtctgtgtgctgggaagggagcaatgctgtccttggactggtcacctgaaggtcctttatccctcctcctcagctgagcataccaatggtgatgacagaggccctgtcttcaatccctgtacacagaatagcgctctgaaaattataactcttctcacgcttcatcagcaggcccccaaagagacctggctacagcagggcttccaggtctttcactgcggtaggcagaatggccccccaaagatgtccatgccctaatttctggagcctgtgatttggatacgttacatggcaaaagggactttgcagttgtaattaaggtgatggacttccaaatggggagaggagcctggattttccaggtgggtccaatctagtcacacgagcccttaatagcagcaaacttcctccagctggaggtgggaggaatgaggcggaataggaggtcagagagacttgaagcatgcctttgctgatgttgaagatggagtatgtgatgtgacgagaatgtggacaaccttaaggggctgggagaggcttccaggtgactgtctgcaaggaaacggggcctcagtcctacaaccacacagaaccaggtgcttccaaaaacccgaacaaagctggaagtggattctcccccagggcctctagataatcgtccagaccagctgacaccttgatttcggcctgtagaacctggagcagacccagacaacccaccgacctctgacttacagaactgtgagataatagatttgtgttattttgagcagctgaactccggtaacttattactgcagcaatagaaaataatagacacacaatacagcccacacctccagaaccccggggcttctttcctccctgggctctctggggaaggagcacaggctgtgcagtgagatcagggccctggcccagagcactcaccctttagagcctgtttcctcacctgtcactgggggtgccatcggctgctctgcctgcctctgggtggtggtgggattacatgagggaaatgtgagaagcccggaaatgatgaggcagcactggatcctgctgttcccttcctgggaagccggcttcctggtgttgtgaggagaggatgaggccgtcatgggagcaggtctgacctgggctctgaggaagcaggtgctctgctgcctttccacatcctttcctctgaggggggtcccgtctctgcaggcccgtgggtgggctccccggtgggacgcaatggcaccatcttaggcaggagtccccaactcctggatcagtaccagtccggccacacagcatgaggtgggcagcgggccagcgagtgttaccgcctgagcgcccctcctgtcagatgagcagaggcattagattctcacaggaacatgaaccctacacatgtgagggatctagattgtgccgaaaccatcccgccccctccaccgtccgttcatggaaaaattatctttcacaaaactggtccctggtgccataaaggttggagaacactggtctaagggttctggcaggctctcagatgaacctctctggatctttagggtgtctggccctcacgtgtcaggcccaaagatgcctgttagtctgtcgcagagggagaagatctggggaggacccatataaccagaactcgggagccagccgcaccaccatgagcccagatagcatgagtcccttctcttttctccatctctgctgccattccctaggccaggccaccatcatttgtcacctagaccaggtcacatccctgcataacctcctcccgctgaggagctcccttccccctcagaagaaaatccggacacatgctaaggcccacgagagcctgtacagtggggctcctgcctcgccagcgccacccgcatactgcattcccaccaccctcaaacttaccaggcctctgcctgcctcaggccctttgcatatgctgatacctcatctagaaagcactttgccatgcttttcccgtggccagctcttcattttttaggtctcagcctaaatgttgcctcctcaaagaaccattctcccactaccctgtatttcctgactcagctgcctttctttgttttgacacagggtctcattctgtcacttaggctggagtgcagtggtgtgatcatggctcactgcagcctcgactttccaggctcaagtgatcctcccacctcagcctcccaagtagctgggaccactggtgtgtgccaccacgcctggctatttaaaaaaaaaaatttttttttctggacacagggtttccccatgttgcccaggctggtcttgaactcctaggctcaaggaatcctcctgcctcagcctccctaagtgctgggattacaggcatgagccaccgtgcatggccttagctgcctatttgattccttcgtgacatctaacagaacgtgttatttcgtctacttgttattgtatttacctctctagaatggaagcccagtgagggaagggatctattttatcttatttgctattgatccgcaacacctggcagagaacctggcctatagtggatgcttagtaaatagtaaatagttgaaagagcccttctggaagaacacaaggctagttcctttggcaaaaattgggcatcatatcagagcttcttcactagcagattcagcagagctataaaattaaaagaaatgtgttctgtaatccctctgggaattccccacgggcaagagagcatgatgtgtgatttgcagtgacatatctataccacggtatgtttgtagtgactacttttcaaaagacaagatggaggatatacagctggtgaaagaaaaggtgtcggctttgttgagaagtcttactttgttgtctttcaagtgaaaagtgagctattttagtctaatggtaatttttaactatgttgaagccatacactttgggtctccattgtgctggaaatcgtcactacagctcctcccaccccacacccctcaatgcatgcatataggaatatagctcatgctatggaaatccactgtttgcacagcctggacattaggtaatagtttcccggctgaggtgcccagctggcttaacatgccattatttacagctctaaggtttattttcattattatatttaaacgtctctgcagaaggaatggaaggctaagagggtgggagagtagaagaggagagggagaagagtcactccagacgtcagaaccagacaggctcctgagaccgtgcaaactgggggatttcagattgcacacttggagtcagggcagcagtttggctcagcaggaggggaaaggggtgttagaggaaaaggctcctgccctccaatgttgtttgacccagatcaaccctactcttatgggtatcagcttctgggtaaatactcttttcaaagagggcaccatggcagaacacatgtgaaaaccatctagtttgaagtatgtgtgagaaaaacaactaattcacccttctcactgaccagtggagaagtctggccttatctgtctgtctcaggcttcttctccaaggttaaccccaacgggaaaggagaggggactcatcaaaggttagaccatgtcctgaagtgacctgttgaatttgcaaaacttctttttcagtgttatgttttatttttgcaatttttgtggggggaaaatgcattctaggcttctgaaaccctttttagaagaaaatcatggtttcctcaaactcttcaagcttattgagttttcttctgtattatcctgtcctattgaaaaccttgtgcaaaagtatgtgtggggtgagaggtgtttaaacacacccggtggacagtgtctggctggggaggaaacgttagcctctcttttcttatcttatgagataatttaggaaatcaagtacaaggcccttgctgtgtgcacttatacctggagccttatttaggggatgttcttgcagatagatggggagaagtcttgctgggatcctctctggttttaaggcattttttttctcactcccagttgcctgcccatgtctggtttagcagcttttagaaacgtggctggcatccttttttcttttctctgacagcaccagcccctttatttgaacttcctagctgttttctgcctcttctgactaattaacagcaactaaaaaagaaaaatgaaacatagaacacaaaaaattccagggtgaaaaaggagaatttctagtcctggggtgcaaaagtccctagaagagagttttgagctgaaatgaaaagttgtgattatagagagacatgaaatgtgtcccataaaaggccacctagtcccaggcagatccaggaagagcactgggctgggagtcccatggggccagggcctcaccaagcagtcagccctgctcagttatcacaggggttgaactggattgcctaaatgatgcctttagatggatggaactggagtccattatcttaagtgaaacaactcagacacagaaagacaaataccacatgttctcgtttataagtgggagctaaataatgtgtccacatagaagcagattgtgggatgatggacaatggaggggtggggaagttggagctgggtggatgatgggaggttgcttgttgggtgcaatgtgcattggcccagtgatggatgcaccaaaggccctgactttgccatgacagaatatatcaatgtggcaaaactgcacttgtatcccatgaatatataccatgtttttaaaaatgttgcctttgggcagaggggataattctgcaaactgcagagccatggagtaaaaaaaacacccaagatagcagaacttgtcatttctagtttttccacaggaccataaagcaaaattggtgccgggtttgtatttaaagggaaaccaagagggtttttttatccttccatggtttcaaaatctggaaggacaatttgtacagaccctgagatagaaggattcctcagctttaatttcatgaacgatttgcctttcattgattcttgaggatatgaatgttttagaaagcaacagtgtatgccttgattttaagaggcaatgagccttttccttccttcgtttaggcatggggctgaatggagctgaaattcctgcactcttataacgtgccacatgaagggcagttttggattctgggaaaacagcccattgaaacagaattgggagggagaaacctcttacactcaggtcatggtatttatatgaatacaaaaaaaaatttaaatactgtgctaggtgctgggggttataaacatgaattacatgattagggcctctggaaacttgtgtggggctatagaaggaacaccagttcagaaatgtcactcctgtcatccagacaggatgcttcaccataggggcagagaccttctgctaagtcataccgcatatcaagaaatatattgctaggccaggcacggtggctcacgcgtgtaatcccagcagtttgggaggctgagacgggcagatcacttgagatcaggaattagagaccagcctggcaacatggggaaaccccatctctactaaaaacacaaaaattagcggggcatggtggtacgtgcctgtaatcctagctactcaggaggctgaggcacgagacttgaacccaggaggtagaggttgcagttagccaagatcgtgccactgcactccagcttgggcgacagaacaagactcatctcaaaaaaaaaatgcattgatcaaatcagcttaaaaatagccttcttgtttgctcttcttggtgtgggattattcagtccaattcttctactttttttaggcctcagcatgggatttggttgtcatatcaaccctataaacagtgttgaatccatgtcaataattgtattttttaaaagcaaatatcaccaagtccaagaaactgatcctcctctgaacatgatagctggactaggctaagaatcctatttcctgttagatcagaagtgaagattttctggtacagatttgggtgggagaaatgagctacccttcccaaggccttagcacctagatgacatcctctctgaagtcaccctcagccaggagcggacactgagctgctatttctgaatcacatgtccccaaagctgccctggccttggtgaccatggcactgtaagagaagcacagccagccccagcgtccttactctgactcagaggaaaatgcaacttgagctggattcattgaaatcttttttttcctggcctgaaggaaatgaagaaacatagccaaatattctaaaacaggattcaacaaacagcccataggccaaatccaccactgcctgtttttgtaaataaagttttattggaacacatctatgcccattcccttatgtattatctatggctgcttttgctctacaacagcagagttgagtagtgtgactgagaccgtatagcctacaagcccaaaacatatactgtctcacccttttcagaaaaagttgccagccttgttctaaaagaagtagagtaaggatttagtgagaagctggagaaaatattttcaaagacaactgtattctccagggaaacctgagatgaagaccaaggtgaggaaggagccagcagagaaatcgagtccatgaggctgaggaggccactggatgtccagtcttcagctctctgaagcctgagacaggaaacagttgtctcccgagagaaaggtttgaacctcctttaactagggaggaataagagatgatggcttcttagatctgtttacatttgctggaaaaacttcttccagggaaataactagacagggctttggccaactagcaggtgaagtctggagggaggtggaagagactgcttccaagctgggttccgatttgtctgattgaagcagccaagcttgtgtttgccagaggacttaggaggatgtggataaaatcaggctgaggcctttttttaaaggcccaagctggagctattgggattgttccctcagaggaaaatcaggagtttgggccattggcttcatggagaacctgtactttgtaccaaggagaagtcatttctacttggtttttgaaactgcattgtcatctagtattccaaggctttagtctgtccaccctcctgctccagagagatgcctttcagttccttaggaaacaaattggccatttgcccaaagagactaatccaggactagaacacaggcactgagtttcaacctcaggctccccagtgcgtgactcaggtctcttgattccatggtgtattgtttttttacctattaaacaattgcattcctagcctatggaaggtcttacctaagccaagactttggcagggattggattgtgcagcccatttttgttaatagcattgcccaagttagggaaggccattaggttggctgagtattctggtattctattgctgcataacaaactctgaaatttagtagcttaaaataacatttattttgttcatgaatttgatttcattgttttttaatgtatgtaaggtatataaaatgatgttttgatgtacatttacatagtgaaatggctactatggtcaagcaaatgaacatatccattgcctaacatagtttttttttttttttgatagtaagagcacttggaatctactttattgtcaaatttccagtatataatacaatattgtcaacatagtcatcacgctatacattcaatctctaaattttttcatgctacctaaccaaaactttgtacctttgaccaacatctccccattccctactccctaccccctccccgacccctggtaactatcagagtttcactttctggttctgtgtatttaacttgtttagattccgcaataagtgagatcatacaatatttttctttctttttgtgacttgtttcacttagcataatgtcctccagtttcatccatgttatcaaaaatggcaggatctcctttttaaaggctgaataatattccattgtatgtttatatatgtgtatatatatatatgtgtgtgtgtgtagtatatatacatatatacacaccacaatttctttatccattcacctgttgacaaacacttaggttgattccatgtcttagctgttgtgaataatgctgcaatgaacatggaaatgcaaatatttctatgaggtactgatttcattctctttgagtatatacccagaagaggaattgcagggtcatatagtagttctatttttattttttttgaggaacctccatacttttttcataatggctgtaccaatttacattcctaccaacaatgtataagggttcccttttctccatgccctcactaacactttttatctcttgtcgtttttatagtagccatcctaactgttgtgaggtgatatttcattgtgacttcgatttgaatttccctgatgattagtgatgtggatatttcagcagaaaccttgcaggtcagaagagagtggggtgatatattcaaagtattgatggaaacagtgcctcatacctgtaatcacaacactttgggaggctgaagcaggaagatcacttgagcctaggagtttgagactagcctgggcaacataatgagaccttgtctttacaaaaaataaacagaaaattatccaggcatggtggcatgtggctgtagttccagctacttgggaggctgaggtaggaggatcgcttgagcccaggaggtagaggctgcagtgagccaagatgatgccactgcactgcagcctgggtgacagagtgagaccctgtctctaataaattaataaaataaaatttaaaaaccctactagccaacaatactatacccagtaaacctgtgcttctcaagttgaaatgaaaggacactaaatagcacaagagagcataataaagaaggaaactcgttggtaaaggtaagtatatggacaaaatcagaacactatattactataaaggtgatgagtaaatagcttttatgtctatgaagaaagttaaaagacaaaagtattttaaaaaccattataagtattaactaaattatgttaatgggtacataatataaatagatataaactgaggcatcaatagcatgtaacttggggggagcagagggaaaatcagagtttttatgcaagtaaagttacattgtgaacttataacagactgttacaaattatttcgtgtaagctcctggtaaccaccaagaaaatacctatggaagttatatatataaaaaaagaaaggaatcaaaacctatcgatacaaaaaaaaaaaagaaacaaaacaaaagaaaaccgcaagggagaaaaagagggacaaaagaacaagacacatagaaaatagtcaccaaaatggcaatagtaaatctgtctctatatttactttaaatgtaaaaagactaaccttcccaataaaaagatacagcatgactgaatagattattaaaaaaaacaacaacaaccaggatcaaactgtatgctgtctacaagaagctcacttttagattcaaggacacacagagagatggaaaaaggtagtccatgcaaataccaaccaaaagagagcaggagtggttaatacttatatcaacaaaatagactttaattcaaaaactgtctctagagacaaaggtcatttcttaatgacaaagggtcaattcaacaggaagacataacaattataaatgcacccagcatcagagcacctaagtatatacaacactgacagatctgcaaggagaaattgatagcactataataataggagatttcagtaccccactctcaataatggataggacatctagacagaaaatcagtaaagaagcagtagacttgaacaactggacctgtgtaacaaatggacctagctggcatatacagaactgttcagccaacagtggaagaacattcatttttctcaagtagccatggaacattctccaggatagatcacatattaggtcacaaaacaaatcttagcaaatttcagatcgaaatcataccaagtatcttttccaaccacaatggaatgaaactagaaatcagtaacagcaagaaaatgggaaaattgtttgtgaattcatttgtgaatttgcaatttggcagagcttgatcaacacagctctctgttccatataatgtctatcagctggggcaactcaatgggattggaggacatctctgaggttttcactgtcatggtgactcacgtagcctgcaagttgatgtggcagtcagtgtctcctgtgagcctctgcatggacagcttgtgtttcttgcagagtggctaaattctaagaacaaatgccccaagaaaattaggaggaagctctattgctttttatgacctagtctcagaagtcacatagtgtcacttccactgtagccaaaagtccacccagattccaggtaagggagcattagaccccacctctctatgggagtagtttcaaagtcacattgtaaggagtgccatcatcgagatattgttgcattgatttttggaaaataatttacctgcacagaggtaaattcacatcaattctttgtctccttatttcaccatccattaatgtttgtttgtttgtttgttttgagatggagttttgttcttattgcccaggctggagtgcaatggttggtctcggctcactgcaccctctctctcctgggttcaagcaattctcctgcctcagcctcccaagtagctgggattacaggcacccaccaccacacccggctaatttttgcatttttagtagagacagggtttcaccaagttggccaggctggtctcaaactcctgacttcaggtgatcacccgcctcagcctcccaaagtgctgggattacaggtgtgagccaccatgcctggccccaccatccacacccagccccaccatccattaattaagcttcatggtgttcactcagtcacactgttgtcgctctcatttgccaatgttaaatagtgatgcacagtgcctaagacaaaatcgctatcactgcaagctcctacccctggctaaatgctaatctggatttatgggacagtgacgagtgctattattttcattttataaatgaggaaactgagtcctggagggaagaaaagtcaattttcttaatgtaatacaattaaaataggattacactttgaatttccttatttcttaactagtattttatctttccatgattgtgcttaattttatcttatcagtacaagcactcatataacctgtagggatatttgtgtacatgtgcatgtgtgcatatacacacacgcactgtgtgtgtgtatatgtcaaactcagtgcttgcctttgttggatggaaattcagcagcactggaggactagacagctagaaaagccagtttcagggacaggaaatagtagagttcaaggaaaagttaggacaaggaaaatgagtctttacaaagcaaccaattcctcgtgagaagtctttgcatctcacatggctaagagacagtactttggttaggggcctggagctttggttttgatgaacagtgtgctggtattggctctaagctggggcatccaccatttggctccccatttgagtggtcactctgtctctcagagcaatgtgtggtctttcggtgttgataaagcagcaactacatgccaggccctaagggcaggcacagaggcaagcaagaccagtacagtgccccctgcaatcctcttgggacatcattttagcaggggagactaccattgaacatgtaatgataaaattgattagttatgattgagatgagcagtaggaggaaaaagtgtgtggaactgtgagagctcacgatgggcctgaacttgcccagggactcagagaagtggtctggatttgcttgttgaagggtgagaggacatgtactaggtgaaccagctggaggaatctggggatccacttgtggggaggccctgggtgggaagttgtaaggacaaccagagtgatagctggcatgagaaagccagggtgacagaggtgaggagggcacatgccagatctggcagcctgcatgtcaccagatggatttaggtcacatcctgttcttccgttctcacctctttcacctccatctccacctccacctctaccccttcacctctccatgcctcacaaagttggactgtcttgcctgtgagacaggaaaggcatgtgtgatgaggggactgtacactaggggccagtccaggttttgtgagacctgaggcttatatagtagagggtggggtcttgaaggaaaaaaaaaaaaggtgaaattatgaagacaaagtttgtgcaaggcttccctaggggccatgtcagctggggacctctaagctgaagtttcactagtgtggtggggaagctccctttggcaccttccctctgtcctcaaagctcataaagcccacctttcatcttgcctgagacgttcatgccatccttacacccacttcctcctgttttcttcttagttaagatggcaaagaaagagcaaatatattgaaatctcctggaaatttggctctctccttgaccccagtagtgtccaaaagaacacaggaatttcctctttttgcccaagacttccatgatattttccctgataatcaaggaagggagtgttggctgggacacttttttcttttggaaatgtggcaggggaatatgaattttcataggcgaaattactctgtctggtcgagtctagactgttcgttggccagcacgtttgctggcgcccacactgacactctgaggtgctgcctggacttattctctgggcagggaagaaataacctggaactacattttggggaaaaaactcacgaacatgagcagtgacaaggaagaagtttaataatgagtaaattacaactaaaagttgtcaacaggctcttctctccaaattccactgaaatgagcaaagccatctaacagtagtgaagagtctctgtcatctggaacttggggaagctactgtccatagatctgaaatgtcagagaggttgagacagattgaggggaagactaacaagccctccatggaccgtagaagaaagccctaacccctctccaaatgctgctgctgatctcctggcaagcctccacagataggcccaggcccaggcacagccagcaagctctctggaaatatttgggttttgacatgccaagacttggccccagtaagggctgggtggggctttggctgttgaggcccagtcttggttagagaaaaggcactgtgtccctgttaactgctggctgccccaccaacaaactggaaagaatctcccccagtctgttgtgattccctcagcctgatggcctaattgcctttgccttttcctgttaatactgacaattcaatacagtcccattgctcaggcagaacctatttcatatataaatttcctgcatccccaaggcagagcaaatagggggaaatgaccaaactataatctgagagttctttactcaactggattatcattcatctaagagcatctgaaagacagtctcacacaagcaaagactgaaaggacatccaccaccacgtacctctcttgaaaaaactgcttggagaagcacttcagtagactagggaatgaatcaaataagtaatgcactgacaaaatcaaaaccacagttgacttaggcttccttggagcttggaagaaccccttcccacgctggagagctggctttttggaggtgggagtagaagccctgaggggctcaggggaggaattcccactgatttgcaagaaaggaattggccactgtgtactcgtttgccactcaatcctgccctaaccttcctctcctgtctttctcacagactgtttttgaaaggaattgccgttcagaggactgtgccgcagacctgcagcttcagggtaaactgctgctctccaggtatgtcggtgtttccttcagagcattgttctcaggctcctttttcttgaccccaggtcccaaacctgaatgtgcagatttccccactgaagaggataaacagagttgatgggttacagtaatattctgtggttttaaaaaaatgtatgttacaaaataattataacaaaagctttgttgggaagattgtttaggtttttttgtgtgttgattgcaattccacatatctcacaatgtagcttgtatttctaatttctatgagtatttgaggggtggctattttatgcttgctgattgtattaagttgaatcatatgaaattgccaatatttgaacttttggacaatttcatatgtatgattcatcctattattaaataaaggtttatgccctcctgcctccacacacacacacacacacacacacacacacacacacacacactagtgtatgttttaacaagtaacatttctgtggcaggagagggctgaaggagaggggcaggctgccctgatccaagtgagcagatagtctccttattgtttcagggtttcctcccgcactacatgaatcccccaaggctaaaggtgaaccgtacagcggccttctgtttcctctttgccaaccttttattttagacttcatttaggatgaaggtgctggtcctgatcatttagcctcatttcacagaatggcttccttttgaaacagttccttctgaaagactgttttagccttggggccagaaacccctctattagttttattaccatttctgaaaaacagtcactagttttggtagttatttttcaaaatgcatagtgtatcccttacttaaaactatgagagttaagtttggatgaaatgacatgaatatactattatgaaccagtgcctacactaggacattttttttattgttatactttaagttccaggatacatgtgccgaacgtgcaggtttgttacataggtatacacatgccatggtggtttgctgcacccatcaacctgtcatctacattaggtatttctcctaatgctatccctcccctaaccccccacccctgacaggccccggtgtgtgatattcccctccctgtgtccctgtgttgtcattgttcaactcccacttatgactaagaacatgcagcatttggttttctgttcttgtgttaatttgctgagaataatggtttacaccttcatccatgtccctgcaaaggacatgaactcatccttttttatggctgcatagtgttctatggtgtatctgtgccacattttctttatccagtctatcattgatgggcatttgggttggttctaagtctttgctattgtaaagagtgctgcaataaacatatgtgtgcatgtgtctttatagtagaatgattcataatcctttgggtatgtatacccagtaatgggatggctgggtcaaatggtatttctggttctaaatccttgaggaattgccacactgttttccacaatagttgaactaatttacactcccaccaacagtgtaaaagcattcctatttctccacatcctctccagcacctgttgttttcttgactttttaatgattgccattctaactggcgtgacatggtatctcattgtggttttgatttgcatttctgtaatgaccaatgatgatgagcattttttcttatatttgttggccgcataaatgtcttcttttgagaagtgtctgttcatatctttcgcctactttttgatggggttgttttttttcttgtaaatttgttttagttctttgtagattctggatattagccctttgtcagatggatagattgcaaaaattttctcccattctgtaggttgcctgttcactctgatgatagtttcttttgctgtgcagaagctctttagtttagttagatcccatttatcaattctggcttttgttgccattgcttttggtgttttagtcatgaagtctttgcccatgcctatgtcctgaatggtattgcctaggttttcttctagagtttttatggttttaggtcttacgtttaactctttaatccatcttgagttaatttttgtataaagtgtaaggaaagggtccagtttcagttttctgcatatggctaaccagttttcccaacaccatttattaagtagggaatcctttccccattgcttgtttttgtcaggtttgtcaaagatcagatgattgtagatgtgtggtgttatttctaggcctctgttctgttccattggtctatatctctgttttggtaccagtaccatgctgttttggttactgtggccttgtagtatagtttgaagtcaggtagcatgatgcctccagctttgttcttttggcttaggattgccttggctatagggattcttttttggttccatatgaaatttaaagtagttttttctaattccatgaagaaagtcagttatagcttgatggggattgcattgactctataaattactttgagcagtatggccattttcacgatattgattctttgtttccatgagcacagactgttttttcatttgtttgtgtcctcccttatttccttgagcagtggtttgtagttctcttgaagaggtccttcacatctcttgtaagttggattcctaggtattttattctgtttgtagcaattgtgaatgggagttcactcatgatttggctctctgtttgtctattattggtgtacaggaatgcttgtgatttttgcacattgattttgtatcctgagactgctgaagttgcttatcagcttaaggagattttgggctgagactatggggttttctaaatatacaatcatgttgtctgcaaacagagacaatttgacttcctcttttcctatttgaataccctttttttccttctcttgcctgattgccctggccagaacttccaatactatgttgaataggagtgatgagcgagggcatccttgtcttgtgccagttttcagagggaatgcttccagcttttgcccattcagtatgatattggctgtgggtttgtcataaacagctcttatttttttgagatatgttccatcaatacctggtttattgagagtttttagcatgaaggggtgttgaattttgttgaagcccttttctgcatctattgagataatcatgtgtttttttttcattggttctgtttatgtgatggattatgtttattgatttgcatatgttgaaccagccttgcatcccagggatgaagccgacttgattgtggtggataaactttttgatgtgcggctggattcagtttgccagtattttattgaggattttagcattgatgttcatcagggatattgacatgaaattttcctttttcgttgtgtctctgccaggttttggtatcagatgatgctggcctcataaaatgagttagggaggagtccctcttgttctattgaatggaatagtttcagaaggaatgataccagatcctctttgtacctctggtagaattcagttgtgaatccgcctggtcctgggctttttttggttggtaggctattaattactacctcaattttagaactcgtttttggtctactcagggattcgacttcttcctggtttagttttgggagggtgtatgtgtccaggaatttatccatttcttctagattttctagtttatttgcatagaagtgtttatagtattctctgatggtagtttgtatttctgtaggattggtggtaatatcccctttatcattttttgttgtttctgtttgattctctgttttcttctttattagtgtggctagtggtctcttttgttgatcttttcaaaaaaaaaaaaaccagctcctggatttgtttattttttttttgaagggtttttcatgtctctatctccttcagttctgttctgatcttaattatctcttgtcttctgctagcttttgaatttgtttgctcttacttctctagttcttttaattatgaagttagggtgtcaattttagatctttcctgctttctcctgtgggcatttagtgctataaattttcctctaaacactgctttaggtgtgtcccagcaattctggtatgttgtgtctttgttctcattggtttcaaagaacttatttatttctgccttaatttcattatttacccagtagtcattcaggaggccattgttcagtttccatgtagttgtgcagttttgagtgagtttcttaatcttgagttctaatttgatttcactgtggtctgagagactgttatgatttctgttcttttgcatttgctgaggagtgttttacttccaattacatggtcaattttagaataagtgtgatgaggtactgagaagaatgtatattctgctgatttggggtggaaagttctgtagatgtctgttaggtctgcttggtccagaactgagttcaagttctgaatatccttgttaattttctgtctcatgatctaatatttgacagtggagtgttaaagtctcccactattattgtgtgggagtctaagtctctttgtaggtctctaagaacttgctttatgaatctgtgtgctcctgtattgggtgcatatatattgatgatagttagctcttcttgttgcatgatcccttcaccattatgtaatgccattctttatgtttttttgatctttgttgatttaaagtctgttttatcagagactaggattgcaacccctactctcttttgctttccatttgcttggtaaatattctaccatccctttattttgagcctatatgtgtctttgcacatgaaatgggtctcctgaatacagcacactgatgggtcttgactcttcatccaatttgccagtctgtgtcttttaattgggtcatttagcccatttacatttaaggttaatattgttatgtgtgaatttgaccctttcattatgatgctagccaattattttgcccattaattgatgcagcttcttcatagtgttgatggtctttacaatttggcgtgtttttgcagtggctggtactggtttttcctttccatgtttagtgcttccttcgggagctcttgtaaggcaggcctggtggtgacaaaatctcagagcatttgcttctctgtaaaaaagtttcttcttcgcttatgaagcttagtttggctggatatgaaattctggtttgaaaattcttaaagaatgttgaatattggcccccactctctgctggcttgtagggtttctgcggaaagattcactgttagtctgatgggcttccctttgtgggtaacccaacctttctctctggctgcccttaacattttttccttcatttcaaccttggtgaatctgatgattatgtgtcttgaggttggtcttcctgaggagtatctctgtagtgttctctgtatttcctgaatttgaatgttagcctgtctttctaggttggggaagttctcctggataatatcctgaagagtgttttccaacttggttccattctcctcatcactttcagatacaccaatcaaatgtaggtttggtcttttcacttagtcccattatttcttggaggctttgttcatttcttttcattcttttttctctaatcttgtcctcatgctttatttcattaagttgattttcagtctctgatatcctttcttctgcttgatcgatttggctgttgatacttgtgtatgcttcatgaagttctcgtgctgtgtttgtcagctccattgggtcatttatgttcttctctaaactggttattttagtttgcaatttctgtagcctgttttcaaggttcttagcatccttgaattgggttagaacatgctcctttagctcagaggagtttgttattacccactttctgaagcttacttctgtcaattcatcagactcattctccatccagttttgttcccttgctggtgaggagttgtgatcctttggaggagaagaggcattctgatttttggaattttcaacctttttgtgctagtttttcctcatcttcatggatttatctacctttggtctttatgttggtgactttcagatggggtttctgtatggacgtacactagtacattttaacttatgatggcacatgatctttcattcatcaaaggaaagtaatactaagattccttttcttcagtttgagtttactggaggaagatgatgtaacacacacacacacacacacacacgcacacacacacacacaaatagtcctccaaaccacttaaatattaattagcattacttttacttagggcaatagtggtagattaaaatagcacacgttttgccaagcttacaaaattacttaaaactcatggcatggatattagaattgtttcacattagtacgaaggacctcctgggattattagaggaactgactttaaagaagtttcataaatttgcagctcattaattttaattttaaataggccttccacaaagtgttttagggaaaaaataacaagaaacaaaaatatatggatttgttttgtcttgaggcagactggaaatgctggaaatttattttggatcgtagaaaaacttcatgtggtgggaaaatgttcacttgctccaaggtcaggtattaagttagcaaagtcctaatgcttttgctacccattagtggatgatcaaatccatctctattgaattgtgcttttcttatattaagatgtaaaattcaaggctcagtatagcacctggtggctaaagctgcctccactgccccagtctggcctttcaagtgtggtcagagctagttatcctctgtgggcccagtaatcaataatgcttgaacaactagtgtggtggccaggacccagtccccccatatgtatcagctaccaattgccacaaaaaaggctgaataaaaaagtcaccccaaaactcgatgatatgaacagcaatcactgattcccatggattttcaggtcagctggcccaggctggactcagctggaccttggctgatttgtccatgcatctgggttcagcagagggtaggttctaggcttgggtgacaccattcagctctactccctgtgtctttcattttttctttggaaccagtggacaagcctgggcatattctcacagcataacagaggtacaagaaggcatgcagaaatgtgcaatgactcttaaggcctgggctcagaactggtgcacttttcctccagccttattctattggccacagcaagtcacatggccaaacccaaagtcaagggacaggaagttagtgagaggaattacaaagccacacagcaaagggcctgagtataaggaggaggtgaagacttgggacccataatgcaattgactatactatataaacagcaaggtagccctgtctcttatcctgatgccttgttgttatcagggctatttcagtctttattgcaatgccgtctctctggaattcagacatgagatctggagactgggtgagaagattttctgaacctcagaaacaatgcctttggaccgaagctctcagcctcttaggttgggttatttctcagaggacccctggcctctcaaaatagccttttggccgaatcctccattaaagaaaccttcgttgtacttttgggcccatagctgttctcacaggaaccatcagagaaatgttcattgatacttagataacaaacctgtggttcagttatatgggatttatccagacctttggatgttcactcttcagagccagggacaatgtgagggaagatacaatcagttaagtgctagtggaaaccagggtctgaatttggttggcaaaggcatagtggctccaagcagaggtaaactgctttggttatcattgagctctcttgattcattcttctctgggatggaatgtgccctcctttcttgttcaagccaggcaagtgctaggcactgggctgcagaagtgagcagtatgtgagccctgctctcctgctgtgagcagagcaagaggctgggagatagtggtaccacacagtgagtgctaggtgggttactccagggctctggagcagcttccaagaggtggtgttgagaggaatgaggactcacgcattccgagcagagggaaaatgtgagcagaagtatggagaacaggactcccatgaagatctgcaggtgtctggaatgaaggaggcagtcaggagaacacagtgagagacagggaaggagaaagggagagaaaccagattgtggaacacttatgagtctggacttcatcttgaagccagtgggagtacagccaagttgtagtgtaagtgcttttaacctaacaagaatacagccagggggccaggcgcagtggctgtgcctgtaatcccagcactttgggcggctgaggcagatggattgcttgagctcaggagtttgagactagcctgggcaacatgtcaaaactccgtctctaaaaaaacatacaaaaattagccaggcgtggcagcaagcgcctctagtcccagctactcgggaggctgaggtgggaggatcacttgagcctgggaagcagaggttgcaatgagctgagatggcaccactgcactccagcctgggtgaccgggggcaaaaaaataataataataatgcagctgggcacactccaggagccagggtggggaagggagaggagaacattgagatggtataggtcattttaccctctattcctctcagtgaaagtacgttccagcttgagttttgagtttgctcctctctccaaccataacagttcctgcttccctgccttgggtaggtctgtggggcagctgcccttcatctcagtgcaggagcagccttttcagggttggacttatgagagatgttgtgctgatttccaccatggtgcccccctcccagggcttcacaagggcaacttggacacaatttttgctttccgtgatgtctttagaacttagctctcctgttagccgtgaccttactcactgtacgaaaagtcgaagcaaaggggtcacagagaaagatttctctgatgactgtgtagacagttggtccatggtgttgtggctggaggcctctgaatacccaccagactgaggagcctttgtcttaagacagagggaaggacatctgggagtgattgtgtcacccagagtggccagagatcaagccataggaaatgctgtctgtgaccaggattcatggatgtttttattttcctctctggagagcatgaattctggcaggcctgtgatctcttaaaacaatcaactcttcaattagaagttcatgatctttaatgggcttgagtccagttccaaaacaggccattgtcaaaacgtccaggaacagggatgaaacttgtttaaaagtttctattaagcaggactgaaaattccatttgtaaaaggatgcaactatgttttgtctttttgaatactcacagtacctaagaaagcatcacatatgataaagaaaaagactatggcaagtgagctttaaaaaaattctttttttgatgcattccatcagaaatcagtggaacatttcattgctgtctggctagccaactccgataaaataaggacttttaagggagatggaaagacacagcaggatatctgtaaagccagaatcatctggtggcaacatataattgtcctatggttgtaaccttgatagtgctgttaccatgggggttgggtggtggggcgaagtgcatttcccaaaactgttggctagctgagggatgagagctccatccatgaaaaccagtcttccagaggaggatccccaaacccagagagctatttagagtttgaaacaaattgttctccttctcaaaagtggcagaatggttagaatcatcaactgcacagcctaggtcagaagtgaagtttgtcctgttttatgaagggaaagacacccttgtttagtgagcactgaccaagcactagataccccactgaatactccatatacataaaagcactgaagtatcttaccagctgcataaccttgagcaagttgcttaacatctctgcctgttttctcctctgtgaaatggggaaaataacagcagcaccttataaggttattttgcatattaattaattaatacatatccaagtgcttctaaaagtgcttagcatataaggaaacactcagtagtgaaaactagcattattatttcatttaatcctcaacaacactgagaataaatattcttatactctttttactgaggcggtgcagaggctcaggaaggccaggttacttgctcaaggctcatgttgtatgggaaagttaaagcttggaatgtctgattctacatcgcgctctcctcctgtacattggcttctgttgtctctgggttcagctatcagctggctctagaccagaggtactaaggctagagaccttgggtaaaaagtcttcctctctttgaaagccccaatccagagaggaggtagatgggcaaaaaatccaccagcaaagatagctgccatccctcccctccattctccccatgtgctgtctgacctggaggccttgttcaatagcttttcctcctggagacacaagcaatctgtcctgctgggtcagtggcagtccttgcattgagtcagcacattcttttttttttttttttttttttagacggagtttcgctcttgttgcccaggctggcaatggcacaatctcagctcaccataacctccacctcccgggctcaagcgattctcctgcctcagcctcccgagtagctggtgttacaggcatgcaccaccatgcctggctaattttctatttttagtaaagacagggtttctccatgttggtcaggctggtctcgagcttcccatcttggcctcccaaaatgttgggattacaggcatgaaccaccgcgcctggccgagtcagcacattctttatctatgtaggttgcattttctctccttggagagcctcagattcaatggtgagcttatggctggcatgccagcagtttcctaaaatgtaatatcatcactattattgttattatatgagggaaggtgaataggaactcatcagaaacctggaaaatgttgtcagaacattagccgtgtaatttttttccccttcattgtctgcaccagctctgaagaaaaaatgcagaagtttgttgatttggagtagctggcttttttttttttttttttagatggagttttgctcttgtcacccaggctggagtagagtggtgtgatctcagctcgctgcaaccttctccgcctgggttcaagcgattctcctgcctcagcctcccgagtagctgggattacaggtacccaccatcatgcccagctaatttttgtatttttttagtagagatggggtttcaccatgttgtccaggctagtctcgaactcctgacctcaggtgatccacccaccttggcctcccaaagtgctgggattacaggtgtgagccactgtgcctggcctagctggctttaatggttgctgtttctggaatctctggctataggaatggatttctcaatggtatattcttgaaagaaaggcaaaatgctcaaccaaatggaactttttgaataagagttgacagattgctcatccttgccctcctcagaacaagtgtttgccgtttctctgatgtgggccttctttttttttccgaaaaagtctcactttgttgcccaggctggagtacagtggcgctatcttggctcactacaatttccacctcccaggttccagtgattctcctgcctcactcagcctcctgagtagctgggattataggcgcccaccaccatgcccagctaatttttatattttttagtagagatggggtttcaccatattggccaggcgggtctcgaaatcctgatctcaagcaatccacctgccttggcctcccaaagtgctgggattacaggcgtgagccaccgtgcccagcctgatgtgggctttctaggagggggcagcagatgcctctcctcacatcccagccacgcatcaaggatgaatggacatgtgggtgtcttccgtgggagttacctggcggagggtgggatttaggccccagggaaggtgaggagcagtgtaagggacagtcacactctgggaaagacatcgaagggtgacatgcccttccagagagcccagcttctgttcacctgatgagaggtgacacaatgctacggtgttcattcgtttgacaaatgtggatggagcacttgctatgggtatgccagacctggtggaaatagacacataatgctgcatcacaatgctcccagtctagaaggggagacacacatgaaaacaggtatcactaactatagtcatgatcacgatgggaatatgagggagttccccggaagcacaagggaggcagcactctacatggtctgaggttgagttctcctagaagcagaccatgagacaaggatttgagtgcaaataattgagtgagcagtgcaggaaatgaagaagtaaggaagtacacagggaagcctgcggtgaggatgtgccatagcacttgtatatcagttacttactgctgtaacaaatcaccccagaactccatgacttaaaccagccaccatttgtttagctcctgattctgtggccagctgttgaggctaggctcagctgtttgggtcttctggtctcatttgggccccctcttgcatctgcaggcaacctcgggttggttgggtgcctggctgttggtttgtggttcgctggcgttcctccgcatggtctctcctcctccagcaggctagcccaggattactcttacagtgtggccagggcccaaaatggagagcagcagtgcactagacctcatgaggcctagttccagagcaaatatattctcacttttgctacattctgttgatcaaagcaaatgtcacagggtcgcatggaaataaactctgcttcctgatgggaggagctgcaaagtcacatggcaaagggtgtgatccagagaggctgtcaatcagtgcatcatcccctgctcccacagtggatgattggcactttgtcctgcagggaaacgtacctcttggaatgactatatctgagaagtgaaggagctggagtgtttgtaccccaattcctgagattcactggttgagggctactctgggttaggtgggtggggacagttagctccctggcacttgcatccttgtctagctatgggaaaaggcccttagatacaaaaatgcagacactggcagctgaaagtcagcaaaagcattggggtcagggtggggagtgtgggaggggatggcagggacatggatgatatctcctgtacccgctttcttaaagactctcagttgatgaatttattctgaaattccaacaggagtatcatatcaccttttgacatggaggcttcttcccattagcttcctaggaatactttcatttcatgttttgccaaacacccaacattctccagtactatgataactattctctattgcattcgtctggacccttttttccccttcactagcaagcataacaatatattattgcacacatgcagaagggcatttggctttacagcaaacctatgaaccatgtatagggctccaagttttgttcccattcgctgaggacagcagcaaaggcagataagggatgtgtccacagcacgtccacaggcagagaggataagatccctgagccctgcatcatcctgggagtgacgtgggccaagcctagccatgcagcagaactctgtgtttcttaggagccctggctccagcgcagctcaggcgtaagcacaacccatgactctgggatgcccctcaattgtcttacaaagtaactcaggcattgatgtggggtagagacaagcccagcacacaagttcttccaggttgggggattttatgtgtgtacttggagccagagcatttctggtgcagaataggaagctgacagacagggattagagtcacttatctgaggtcaaaaaaattaaatagcagaggcaggagaaacacctggtgggaggctccaaagcctgatattctagcaatttgacccatgggccctcactttaaataaccattgcagcttggggaacctggcctgtctttaggtggaaacaagttttggaaattcctcctattgcagaaagcatttgatttgcagtttcctgaatgcgaggctccaagtgtagggaccgccacccaaggacgtttttctctgttgggcagactcaaagcactgaggggagcttttcagggcccaccatacatgagcaacagatagctctccctacagataccatatttcagggacagccccttccctcctgagcagacactggctgagattttccagcttcgactttctagatggtgagaggatggggatgctcagagggacagtgaaggcactgaggcagtaactgtggcaaccatagaagaggctggccacgtgctcatagcggccttcctcctgagacacccgggaaggctgagtctacctcacaggtgtgcctgataaaatttttttgggcagtgttttccttggcttccaaacatagccatccattggaggttttatgtggaagcatctttccagcaggcacaatgacatggctatttcccttgtgactggacgcaaggaaaggatctatgaagagaatgtagccccgaatccctcccttctctcaacttggagcagacagggagccatgtgtggtttccttgctaagatttttgcagtttattctgtgtggctgtgtgtgttggtcccttgccaataatcctagactcacccatcccggcacaggcttgttactgtgggccaagccaaattctgaagcagcgcagttgtttgttgtctgaactcagtcttccccaacacatacttttcttgttgtcctgcacacaccctctcatcagcacccctcccaagtttgttctgagccacctgatataacctcaggtgaacaagaaggctgccctgtggctcttcacggatgaaaagccaaaggcagctgtggcttcgctttgtccccagtagtcactggccacggtgagacctgggtttaacatgacctgcccataaatcagtttgctgcaattgcagtgagagggaaggtaccttgtagaaaacctctagattttatgagcttgtttccctgactgcattccagagccacgtgtgagacttgggtttaacgtgacctgtccgtaaatcattttgctgaaattgcagtgagagggaaggtaccaggtagagaacctctagattttatgagcttgcttccctgactccattccaggtgatcttgatccaaaaatgacgaggctgggtggttgccattggtgtcacacccacatcccttgctgtgcaggtgcactgctcccagctgctgtgctggctgctagctgctcacagtggcccgtcctttggtctggaaagtcacccttgccctgcctgggagggtgacttgttagccaatggctggctgatttggggtgtggattaactccctggtgcagtttatgctgcacagctccccttggtgtctggttgaggctagattccccctgtgcccacagccttggtccactcctgccctgtccctgccccagcctggttccctggctcgccaacagatccctggatctctgccacaagctctggcttccagggaagggagcctatcctgagatgcggtagaacctcatgttttatttatctgctcttagatctcctgtccgggcaggctgattgctttttaggattccaagtttcaaaaggaaatcaaatccaatgtatttatcagacattagtgggagagaaaaaaaaacagttgctcattggctttttatttgccctcttggaattgcagaggattttgttatttttatatttaaaaaccagacttgtggagtaatgtgtgggagaccccttcaggctggtccaggggactttgtgtctttagagattgctctggacacctcttccactgaggctttgtttttaaagaggactttccagacccaagggaatggaagggggctcccttgagagaaatggctttcatacaaaatgtccttactggtggggaactgaagacaggtacagtccttactgcataaggggacagatgatgttcagttacagtcataagcctttctcaccaggagcactggactctcctttaagaaagttttctgtgataatgagatttgaactggaagaaatgctgttctttcagttaacagttgtgttttttccaagaaaaaaaagaaatacaaatgttaaaacttttttttttttttctggtgctaaagaacaatttcacctcctaagccaagaaggaaaaaattctcatctaaaccgccaggcttaaaggtggctccttgtcagtcctgaggtggtagaattgaggtgaatgaagtcaaccacagtttctaatgtcttcttatatgccttcagaaacaccatgctcacctttcctcctgctgtcctaggctgagcctgccatccctccttccctctgtccatcacagcctccccttagggtcattaactcagtccctaccactcaccttcccataggacaggtgttcttaacctggagtctatgtcctcttgctgatctgtgaacccggataaggaaatgattgcattttgttttcactaacttcacactgaaatttaacatcatattcaattatgaatgtaggaaacagactacagtaatattaccaggacctgtgactctgtcccaaatagaaatcacaggtattgtcaaatcaagttagagttattgcagatatttcaaactaccatttacattcatccctccttcagagttatagcattagatttacctccagatctttttatttaatatgttttttttaaagcatattgctaaactacacatttgtgctctcccctttcccatagggctacctcacctcccaggagaaaagattcaaaatctaggagattcataatttcaatatattccattgcttgtgactatttatggccgtatttggttcctgagctagaaacagaaaagttatggccatgacagaattacttgtcaagggactatgatggccctgctaacctgggctttcttgagctgtctgccccgctagctttgatgaaatgcacatacactgcttgcattttctgtgcaatggccaagtgtaacaggcagcacacatgtggcagatcgtagcagcgggcccttgccgggtcaagtcatacatcgctgcacaccggggctgtcttaggacattggacctccgagcagcctgcagatcttgggaattcctctgccccctaaagtattctttgtctttaatccagttgttacagtgagtgaacctgatttgttccagatgtcctaagatttagtgattccggaaactactcctaaagtcaaggctgatgaggatttgaattcctctgttagctgggaaccagcagttcttttcacagttaaacagatgaggcaggaggagggagactgagctgccttgagggacagggaggggcccactgactggcttatttgccttgttagaaagaggatggcctttgaagcaaatatcgattctaccactacatggctggggccaaagtcagctgggcagggacatggacgtgctattttttttaaagtaatacatatttaccttaattatctgaatgttgttgctagggaaaccactattttggctcagatcatcttagtaaatgcttttttctctcactttttgagcataaaactggcccaggtgggtacctatgagggaggtggaggtatttctggcttcctataagtgagtttttcaaaccagaaattcagtcccaggaatgatttccctgacccactgtaaattttaattgaggtgcgttacaggggtgcactatgatctctctctggagttaataaccatatggatctgttttgcctgattagaagggatttctaaagcatgatgagatggggaagcacaattcaaactacatggcatagtaactcactcccagaggaagttaaaacatgtatacatacatatagaatgttctgtttaatattattggtttatgcagtatttgaatatataaatatgaatataaagccacgtacagttatggatttaaaacaaaagcagaacttaattaatgttgctgtttggatttttttcaagtgtatttgaatgcagacaagtatccagatagatgctagtggaagtctgggacaagctgtataagggtatcaacccagggttcagctggagctgggccagactactaggttgtgtatttagagaaactagggcaggactgctggagaagaagctgagtggtgccaaggtagggcagtgatatggtttggctgtgtccccacctaaatctcgtcttgaattgtagctcccgtaattcccacatgttgtggcaggaacccggtgggaggtaaataaatcatgggggcgggtctttcctgtgttgttcttgtaatagtgaataagtctcacgagatctgatggttttataaaggggagttcccctgcacacactctcttgcctgccaccatgtaagacgtgactttgcttctcattcaccttccgccatggttgtgaggcctccccagccatgtggaactgtgagtcaattaaacctctttcctttataaattacccagtctcaagtatatctttattagcagtatgagaacaggctaatacaggcgggataggcacacctgagaaggaggacagggtcagataaggtggtaagctttgaacagaagaaagcgtatcataggggatgttgagcttgttgggatgaggagcatccaatgggctagagcaggtggtttagggctgaggctgtaaaccacaggggattacctatgtttatctggggcaagttgcaggataaccacaggacaagactagtagttggacagaaataccaatttttattattctagaatagattaaaatataaaataaaattagattttctctaatatatttagaattgaacctttttgggtacaatattcttttttagtatttcttggtgatttttttttttacaacaaaaaatagagcaatacctttcttggttagtaaaataaatccctaaatatttgccacaatctctagaatcttctaaatcaggaaattttaatgattttcacagcagtgaaaattgatattcatattctaaataattccatgtttcactgaaatctgcaggaatcgaaaacaataggcagtcactaactaaaatgggacagcaagacagaaacagtttcctatccctgtaggaaagagaaatctcggagctttcattgcatgaaaaccgactccattttagtacctcgttgcactttaggctttccttgtccagagttctcacacatgacagtgagctccaactacaacctattccaagctgagagtaatggactgagaatctgaaaacatgacacatcaatccattccccacctttcccctgtgagactcaaaaaaacatttcccaggctcccttgcagataagcttcttgggaagttcagccagtggcatcactggtgtgagattggagaaagggaggaggagaaaagtcagggtgtttctcctcaactccactcactttaagcagcatctctggcagtagctacttctcctccaccgtcttagctccctcttggcagtcccagtcccagtcacaatcacaacacctcctccctcagtccctccaactctaagggtgtcagcagttgcttctgatctcagcttttccttatcttaccttgtttgctcttctggttcttttcacacctttgtacctggttccccattttaatcccttctatgaactacctggcatgggttctgctttcctctctggactctgactaatacatagtgggtttgaatcctggtactgccactagttactaaataagttattaagttgtctaccttatttagtcctcaatgtctttgcaaaatggggaggaggttggtctgtaatgaattctgagatcccttgaagctttgaaaatccgtgagtctctaaattttgatctcataatacatattcatgaaatgagtgtatttttctagctccattacagagatagtttttattatttgctttctaggacatggccttagccttcataatactgtttgtttacagatttcatgaaggcatttaccctggcattgtaccactaaaggctgatgttggcggcattattcttaggagacatagaaatgttgtggttttgagaatgggcttttatattatttggcgtagattattaaagaacagttacctgtgtcatgaaggagaggcccccagactggcactttgaatgcaaattcttctgtgacaaatccaggggactttggaataactctcagatatggcagtagacttaactgtaaaagctcccagcccacagaggtgagcagaggctgaggagtaaacaccataccaacattctgggacaaaatagcctgaatgctgttgtaccttggaaatgcaatagcagctgccttcctaggtggggaagctgagagcagcctcttacaggagtgcatgccctatagacagaggctcatgaacttgtgcttgctgacatgtatatcttcttcagttggtccctagtgagtctacccaaagtgaattgcactggggaaattcagaaatatacacccctcagattcaacaagggtggtatcttgtgtgtttcctttaagttataccagtttatggcaggggcaatgttcaaaatagttaagaacctgcacagcatgagcacacctacctttaagaacagttgccagtcatagagaactggtacagctcccctggtgcaacccactgatggtcagtctggggccaggggtgtctttggtcacccacacccacatttggctggactgtgaggcctgggacttgaaccacatcagtagaaattgaggctatggcacctgggatgtctccttgtgacagttacgcaagaaggaaagtgaacagaatgtggatcccaagggttgggtagggtttgtccagagccttgggtcctttccagaaggagcttgggcccctgtaattcagagatattcagattaactgatctggtctcctgccagtgacaggcctcactcactggaccattctcctattcagaaagctgacataggatcctgtagcaggaatgatcagtgctggctgcatcccttttatatttatgtgctatgctggtatgcagctactagtaactatatctctttgccttttctgcctaccaagtatcttgccagaggtactgggagtagatgtgcagccccccgcctttgcagtagccctcaaccaatgactgactagagtggacacgtaaatattccctcatcccacaaatgggataactctgttctgctcatgtgttgcacagtttcccagagctccccagcaagattaagttccaggtgctcagggagctgactggcttgatgttgctgcctttgctggttgcctgtccttctgtgtctcactctaccccttccctactggtgttttatggaaccacctctggaataaacaacttgctttcaaacctgtctccagctctgcatctgggggcgcctgcactgacattctttattccctagatctgtgtggcttgctacttttttctcccaccacatcacaggtaatgaatgaggctcatttgcacaacatacaactttggacatcagattttggtgaaactcaaaattacttggtgagaaagaaaagcacacatatgttacgctttttttttcagcatttcacaatattcactaaagcattttataagcaagtgagttgtaggagctaaatatgatcaatttttaaaaactactttttttttttttttttttgagatggaatcttgctcttttgccagactggagtgcagtggtgtgatctcggctcactgcaatttctgcctcccgggttccagccattctcctgcctcagcctcctaagtagctgggactacaggtgtgcaccaccacacccagctgatttttgtatttttagtagagacagggtttcaccatgttggccaggatggtctcaatctcttgatctcatgatccacccgccttggcctcccaaagtgctgggattacaggcatgagtcatcacgcccggcccaaaactatttactttcatttttacccaaatttatttcccctggacgtctacttcacaagcagtaacataagcaagtatgtatcattaaagatttatcacaaatcaaccatattatatcgtaagtaaagtaaaactggtgaaacaaatttaatgcagtatatcccaaaagtaattatttgagcatgtaatcaatattaaaacaactgtggagatttttacatctttgagtatctgctgtctttgaaaactcatgtgtatgttaaacttaattcagaccagccacattttaagcgctcaaatgccacatgttatctgtagcaaccatatggggcagctctggtctagcacatgaacttcagagttgtcccactcaataggcaagggagctggggtaattatacagcagttcccatcagtcattgagggttgctgcagagcatgtcagaggcttaattcttaggcactttcctggcctgcagaaaaaagccctctgacaaagagatggggatactgactagatagaactgcagtctgtgcaggttacacagtgataagaccccaggtggaaccacttatagctgactacattttttaatatcttcactttggtgttttattattgtcaaattacttgcaataatgtatcttaagttggtcactcaagaaaacttggttaaattcatgggcctagaagatcaacatcaaatctttgtcttcaagacctaagggaatctggatgtgccctacacatatctacttgcctctcgctaatctttctgctaagagtgtccttctcctgcccctttccatgttatttctgcccaccttcatcctctgatcatgtttatttttctctctggctggaatgtactccctgtttttctgcccatcaataggcagagcattttacaagcaagtgagttttaggatcattctttcagatgtggctcaattgctacctgtctctggaagcttcatgtaataacttcagtcaacagtgatatcttttccctgagtttctcttgccccttgatcttcacctgttcctttggcaggtcttatcaacttcatggtttatttcctgggtaattcatttaccagcatgcattcaggaggtgcctgacagtcctcacttattccctgtagcttaattaacaccgtctcttaattcttcatgttataatcaatttatttggtattttttgctcatatctctcatagaaagacaacagatgagcaattttggttttatggtttactcatgtttgtaattttaaactctgaaaattgaaaagctttgatagttgtcaacaaagtacccagaaagaaggttgcccatgagagtggctaaagacatctagagtcatctcaaatgcctccacaaatttcaaagaaaattgtcaagagaaaagttaagcacctcagtagcatttgtaaagagatgacaccttatgttctaaatattctcccagtattctaaaatattctaaatgctaaggaaataaacacaattttatttataatcttatagccaagtatgtttcatatacattgatactatttagttgcatttttatatgctttaggagcaatgggaaaggcaaaggagcactgactggaccaggggttagagctctgcccttgtctgctgagtggccttggggaagtcatttaactgtctgcctttatctgcaaaatggtgacccaaatgggcccccttccagctgtcaaattccatgtctgattttatgatgtctgccctttttaagaatgggaagcattgtttgtgatttcacattgcaggggctatttacatgtatgatttgcatcattgattttatgatacattgttgagagtatctgtgatttttttggaagctgaatccttactgagggcatgctgcccctagttatgatattgctcctaggaagaataaaatctgcttcacaatgtcctttttggtatgatttccatgattgagaaaactggggattgtatgtgtagtacatctggtttatccacttgtctgtccatggacactttgggttgtgtctacccttggctactgtgaatagtgctgctatgaacatgggggaacaaatgtctctttgagttcctgctttcagttcactgggtaataaacccaaaagtataatttttgggttatatgacaattctatgtttaattattttgagaaatgttcatattgttttccaagcagccactcgattttacgttcctaccaacagtgcacaagggtttcaatttctccacattcttgacaattcttgtcttctgtttttttgatagttgccatcctaatagtcatgaagtgggaaaaaatagtttttaaaaagtaacagatggataaacaactaagagaaagaaggaaggagtgaaggatggacggatggacagacttggctgccctatactattatcctagtcatcattgttaaatatagttgtggttggtagatacaataccgataataataatgatggtgtaatgagaatttttttaatgcaaatatagttggatgcatttgattaacacttgtgctagcctttactcaggctagatttatgatggcagcaaaagaaaaggtcatggtttttatgtctaagacttaaggaaaatctaagtgatccaacagaatattattaagcaccatccaaaaaattatctggatagaagaggaaatttttgctttagttgccttagtgattcagcatatgtggttgatatggaaatgtattgcatttacccaacaaggaactttgaatggtaatcctaatgtacagtgatgaatgaggacagaaaacaagttctacagagattttctggcttgacacagctgccaagatgtcatcagtaacatcttccattgagtatagtgaatgaattggtgctaaacttaagtacaaacccaataacgcagtcaaaaaaaagccagctgctataagatatacttgggtaggatttttaataacaaatgagcaatatattttcagcaggctatatatatgctgtaagataagctttatagaagcagtacactttgtatcttatgttgactactaataatgattttcatttaaaagcacagcaaagagatccatgtacaaagtaatataacccacttaaaagactgcacaagcaaattaaaataaatggggaaatttctcagggaataaaatttcttgaagattagaaacactgttcctcaataaataagcacccctggaatgtttagcacaaaaactctatgcttgatcgttttactatttcagcaggactgtcagagaggttggtctttgtggagtcctgttcctttcaggtgtttgtaaactttcttgccaaagcccttcccgactgagatggagttgatattagagccatggctgggacaaccttcatgccaaaggaggtgtgctgctagttgcaactcagaccctgcatggcccgggtgacctcagttgggtgggttcccctttctggggctcaacttcttcatctgtaaaatgtgaagggggagctgatgatctgttgtggggatgtcatggatgttcattcattcaagtgttcactgaacacctgctaggagagaccaacctctctgacagtcctgctgaaagatgaaaacaatcaggcacggggtttttatgctgaacattccacggtgcttagttatttattgaagaagaatctttctgatattcaaggaattttattccctgagaaattatgtgccaggcactactctgtcactaggagttcaacgataagcaaagccagagaagggtcctacccctgatgtttagattctagtaggggatagacagtcctcaaccaaaaagccccacaaacaaatgcataaccacaacttcgataagtgccatgaagggttgatggggcacatggggggtggggggctcataatgggaggatttatttcacctaggcagggagatcaggaaggatcccctggggacatgatagtcagggggctggagaatgtgggttatgttggagaggaatgagttttgaagggataggagttgctgggttctcataccagcacagcgtcttctctctcttcatctcaatttcctcatctctctaatatgggcctaatatcaagaccctttctcagtgttgtgaggtttcagaaggatgacatatttgacaacacccaatatcatgctggcacatcacattttcatttcatttctaaaaataactttggaagcagagatatgctgttttagtcaaagacttttttagctttggagaaagaatgaaaccccagctttgagactcctctaaaaaaaatctgagttcacattctgccctggaagttgcctggctgcttcccttaatcacagagccttgtttgaatcacttgactttgaaatcccaggaatgactttgctgtgtgattaagtgacagaggcccaaggtttggggattggcagaagtttagatgtccctggcctgatcccttaccctttacatataaggaaaggaagctgatcacatgaacaactaaactggaatgaggaggcagcccctcctccatggtcctgggctcatctatactgtctccctgccaaatattccatggaaaccttggacactgtctgatgtcaggactacttatgaatgcctgtccacttccttctcaagataaagctaggttagcactctctcataactcaagcctgaggtttattcttttaatcttccaaaagcaaacagaagaacagaaataacctatccactgtttaagattaaaatggccaacaataataaataattgccacaatagcttgagatcagggtcttaatttattggaggccgttcaagaatttgcagctcttaagttaatttttcacatcttgtttggatcctcagagcccgtgcttccaaagcaaggccatcatatttctcattgcacatgttattcttgttgatgtgccagacatgcaggagagtgaggtcctctcttcacagatgggtaatgaggattccacccccccagaaattagtatttcaaagtatttttgcctatggagattttgaagagttctcttcttttgcatggtgtattagctgtattaatggttgcaaacaagaaaaacgtatgctggttaatttaagcagaaaaggaatttattaaaaggatgtggggtggttcagagcatagacaagaaggctggggaaccaacacaggcaggaaacagaggaggcaagtcttagtccagggttccacctctgggccctttactcctctgtagctacttcagatgatccctggtgtctctgtgcaaccctcaaaatttgtagccctgggtgggagcatctgttctcacatcgctgccacttgatcacccttagatcacatgatttcacttaggcaagtgcccacaccctagtgatcaagaagaggggaaagagagggtctgccccctttctgctgatgtgccgccccacctatcttgagattcccccaaaacacgaggatgtcaggatgctgagtggccaaaaataacaaccgttcattatacaaacccttatatccttaattacgtcttccattaactggttatccgattaaaactggccactcacatggatttattttgttcaaaggtcgcatcacacaataatcatcagtctctcatgcatcttcatccttgtcatcttcagcctcagccttatcaccgttctcatcctagccccgttcactcacccctgtcctgggcccccatttccctccatctcctcacctctcaaacgttcacctctttctcctccaactcccagtctttcaccctacttctatttcactacaaaatagaagcaatcacagaggaattcccgcatgttcctaccacccatctactaatgcatcttcagctcacctccagccaggcgagaacagtcattcatcagaccccagcaattgttgcctgtcgtgttttcattaattgttgcctctctaatggatcattcccattagcttgcaaatatgctatgataattcccatcttaataaaaaagagcaaaaaaactccctggagcccacttcccccaccagctaccatccaatttctctgttctcctttagagaaaaactcctccaaatagttgtctgtcctcattgcttccatttgttctcctcctacatctctgaaactctctccagttaggctttcctcccatcgtgccacttcagcagttcttatcaaggtcaccagtgacctccagaaggctgattccaatggccagttctaattattcccattgttctggcctgtctgccatattggacaaaattgatccttcctttcttgagactgtcctctgtgaccatgtggatgactcctctctcgattttcctcttccttctctagccatgcttttccagtcttgttggctgacacctcctcatcttcaactcctaaatgtgagtcctcatttctatctatactcatttcctagtgatcgtttctagtctgtcccaaatgtatcctagcccagacccctccttcaactccagactcatgcatccacctgcctcaaaatctcctttaaaacccaataggcatttggattttctctgctgaaccttctcaacccagtctttcccatctcaataaatgacaacttttctcttctagttattgaatccaaaatccttgaagcagtccttgactcctcttttcctaacacccttcatccagtccatgagaaaaatctgttggcatgacctttgaaatgtgtccagaatatgaccccttctcaccccctcagctgccatcaccctggccttcacgttcatcttctcacacctggattgtcacaagagcctcctactcaggccccctgttcctctcctggccactccacagaccgttcacatcatagccaatgcgagcctcctttaaacactaacgtcaagtcacgctgctcctctgctcagagccctgaaggggcttccgagggtcaaaccaaggtccctgtgctggccctcaaggccctgtgggatctgctgccccaactccctcagtccctctgagctcaatccttcctgctctctttatcactcctctccagctgcactgacctccttgctgttacctgcacatgccaggcacacgcccacctcaggacttctcctttgctagtccccacataccgtgtttcttgctccccttctttcttcgggtttgtactgagaagtcacctcatcagtgagacttccctgatcaccttattgtaaattgcaccccacctcccttgtaagtctggcatgttctatcttccttaccctttgtaagttttctccacagttcttaccacaatctgacagacatatttgcttctttctatgtgtgttttctctctccctgaagctaccaggactctgttttctttgctgctacttccctagcacggagtagtggctggcacatggtaggcactcagaaataaccgcatgaattcatgtacaaatgaatcccacgcttaggttgttaagtgccttatagtttttgaagtttgatgtacaagatttcatgtgagcctctaaacagtctagtgagttaggcaaggtagaaccctgtgctttacatgaggaagctgaggccctagagctaactgattgcccaaggacacatggctagttaatggggctcctggaacttgtagttctgatctcggtttctgccccccaccttcaactaccccctgtgcctcatgttatattagtgtaggcctcagggcattcattgctgtctatttttcgttacagtatggatgagaaaaccctgtatctagctttgggggctgtgaagaacatctccctaaacatctctatctccaacctcggagatgatgcctatgatgccaacgtgtccttcaatgtttcccgggagctcttcttcatcaacatgtggcagaaggtaaggagggcatccctgtaaaaagagcagttgttccatctggtgcgcttgctgactttcattattgcctggaataggcaatgattctacaagcactaatcctttctgtggactatcatttagaatgattagaacttttttcttcctgggcttagaaaacatgttggtatagccaaagaagcagccgtaaatgcccacagagtgccagagaagtgtctgtatttatgtagtctcccatcccttctctcttgtggaatcctctccctatggttttacatctggccccttcttggagatgatacagttgctgtctccagcacacacatgttctagagaattccagttttaggtcagtagttgtgaaagtaagggcagatcactgcttgtcgtgttagttattatgtatgatgtacttgatgtttctagtagagggtcactgctttggcctgtgctttggattatttatttatttattttttgagacaagtctcgctctgtcacccaggctggagtgcagtgccacaatctcggctcactgcaacctccacctcctgagttcaagtgatcctcccacctcatcctcccgagtagctgggactacaggtgtgcacctggctaatttttgtattttttggtagagacagggttttgccatgttggccaggctggtctggaaatcctgacctcaagtgatccgcctgcctcagcctcccaaagtgctgggattacaggtgtgacccaccgcccctggccttcctaacatatttgagtgaattgaggtagttaaattatttccacaaattgagtgagtttttttagagtaaattaatttgaatgaagtgaagtttatatagcatgactcaaaggtacagtgctggtattctcccctacccataatcatcccgagtgtaccacctctcagaggaagtgaacaggcttccctgcagacaacaagggggaacaagtggacaaaagtcgactctgctctacccagtgttgctctaactgctgatagctgttcagctgggactgcttgcagctttttaatatttacagcattgaacggggttgccttgttctttatgttaaaatggaaccaaaatcactttctgtggaaaaccttcactctgcccaccgatgagcactgggcatacattgagcaggtcaacggcgtttgttcaggcacatattctgtggcctcaatagtgttgacaggtttgtgccaagcctgcccagcttaggggacagctgaaatgctcagagccaccaacagtagaggcactccaaaactttccaagaagtcatctcagattccctgctgcttcatagcttttaggagctccagggttgagggaggccacaaaagcaatcaaggactgcaggaggggtgtgctttccatccactttctatattctaaaaattaccgctggattaagcccagtcaagagagaaccaagtatctgtatggttcaagtatcgctggccacacacacagtatcttttacagaatcgcatgtgctgtgatgccatctccctgtgcagggtgggttggtaggtgggggaaaggggcttccttggggatttgatctgtggaactcatctctgtggtaactgaaaagatgtaattggcaactggctcattacattacacagatttctctcactcaggacccatgcgagaaatttccttccagcctcatttaagctatttccagacttagaaatagctgtccctttgcctgagaattttggcttgtttttaccttgtgactgactaggcttcattctctttattggctgctagaaagctcagagctgaccccactctgtcagtatataggacttagtcttactattttataaactcactagcctcctgtatcttgctttgctccccctttaccatgcttttctttttagcttggagattgcataatattctaccatatggatatactgtggatttaccttaaaaattcctcttattctgtatttaggttattcccagtttctatattaagtaaaattgtgagaaatgtcttttatggagattagtaccagtaaatgatcatatccttagctctataacttttcagagggtgtgaagtcacatttttgaccacctactatacaccagggactttttgcatctcgtccgcatcccctcttcactgcatgaggcacaatgtgtgtgaattattggaggagcactctcaggagaagaggggcgagggagcagggaggggcaggggatgggctgggagggatgtgctgtcgggtcaaagctagccttggtctgatttatgggctgggaagaggtggggaagccctggagcataaatcactctgcagaattgtccccccttgaagctgctggggacagcatcattttctacccctgtatcgtcattggccactggagggacgcaggcgtggtgagtagcctcccaagcatgctggacaaggaggctctaggaagtcaaagacaatgtgcctgggaaggccacaggtacaagccattggccactgtagctggccatgggaaaaatgggagcacatcattttgatctctttgccattgaattccagcaacctttgaaacctttgtcacaaggaaccctaggtttcagttcgacagaaacttgacaaagcatcaggctcttcgggacgtggtgagtgttagctccagagtggtgatggagcagggaggtatcttgtagctgctgtggaggcagggccagccagaaacgcagatgggcaagacgaccctcagggtggcaggaaaaggaagggaaaagaaacagaaactacccttccaggactccagccacgctgcaaggttgataaacagcggatgtaaatggcatcacccagcaccgggtaggattctgacaggacccagtggctagtgaggggcaccaggagagcccccccaacctgcttaacaacccacaggcctaacaggaccaacatgggcctgtgaaatattctaatgggtaaactaagaaaagcatgactaagatacagagggaaagcataagttttaaaaagattattaatagaaaacaaaagtaaattttacagagcatctactttttgatgaaagtcaaaaaaaatgaacaaagtggaagatcagacagtagaacaatagactgtatgaaaatggaatggactgggaggcaagcaaaaataaatgttatggatgggataaagaaatgttacaatgaaaccaggaaatcagtggcagaattaaaatatgttatagtcaggaaagagcagaatcagcagaacagaaaattgatttaatgatgcggaggtgtttttgagaggctctgagaattcagagaaaaagaacaaagcaataaaaaaggatgacatgaggactatattgtggaaggtagaaactggaaaacagcaaagagaaaatggttccagaataattggaacagaagccattccttagacagcaaaggaggatctccatttcctgaaatgggtgcagcagacaccaggcaaaaatatttaaaacattttaatgtctacaaatagcttcatgaaatttttaattttaaggatatgaaaatgatactattaacacttagcagaaaacaaagaaaccagtttctacagacttttctgtaacattaatgtccaaaattagaacagtatattccattgtgaattttaaattcaacacacagccaacttgccctccattgtgacgtcaaaataaagatatactcagatatatgagaattcataggctattacctcttccagtttggatttccccaaaagcataccctgatacaatgatacaggtacaggtagtttatttgggggtgggcgatctcagtgttgagtttagacaggaaagagaggaaagacaggaaggcgtgcatttataagcaggttactgccgtaggcaccttgggcttgtcttcctcagaccctccaagagactgtgtgtaacaaacctcacatccacttcactccaggatgaggaagctgctggaggaccgatcccccagctcctgtcattcatcatggagaaccattccctgggcatgaactctctggcacttccagccttctctaagtaggtccacactgcctggggccaggaagcaactcaggcagaaagatgtgggaagcctttgacctggaggggcatggcttcaggtgaccagaactgtggctggttctggggaatgtgagcgaggtgctggccacatctgctatagtaaccatgagagcttcctgaaaagtagttatttactgataaactactcaagaatacaaaagtagttgaataaaaagtgtgccacagccaaataagcatagaatgaagcaaaacaatttttataaatatttacaatagtaagcaaatgtaaaaaaaagtattgccatggtaaatgcataatttaaaagattaataaaaataatcccataatctcagttataccaataacaatttgagaagaaagttgacattgtgactcctctgcttcactttcttcaggaaggagttcagactcctcagctcctcatgagaggccgtcctgagcctggtcctgcctgcctgcctttctccccagacccctggctcaccatgcccccacatactcacttgaatcagtcgccacttaataccaaagctgcctttacccaggaatcacccccaccccccatttttgtttaatgaactactatgtccttaaatctcagcttagggagcccgtgtgcaggctcctcacctggctgcacaggatctgtccacagaatagatggatggatggatggatgggtgggtgggtggctgaatggttagataggtaggtaggtagatgactggctgggtgactgggtggatgagtgggtggatagttatgtggataggtgagtggggatggctggctgggtggatgagtgggtatgtgggtggatgggcaggtgagtggatgactggctgggtggatgggtgtgtgagtggatggctggctgggtggatgagtggatgggtgagtggatggctggctgggtggatgggtgggcgggtaggtggatggatgattattcattttgtgcaaagttacagagactcaaggcccaggcctccaaggttacctatcttctctgtcatcacacagtccattagttatgtattagcttctaagactgaatacaaaatatcccctgcaatggatttttctgtcttctaatgcaaaactactttcatagatttattctggattattttttcctttgagggaaggctgcttataaaaacatggggtacacatggatgaccatctgctggcttttttctctcctaaataaagctaacttgaaaacacattataaaagagggcttaatttgttggtggctactctgctggctggcgtgtgctgtccagccagagcacagggtattatggccagcaactgggtttcctcaggggcaggcccagtgcaccgtgttgcctgccgggcaaggaaccagcaaagcctcactacagagtgacaattcctggggtgccctgtgggagcagtgagagggagctcctggggccggggggtgctgcatggttaaaaaggagcataaggaagaatagataaccactgcatcacaccagggtcaccattcacactgggttccatgtaaacgacacctccacagaatataatgtgagtggtgtccctggagatgtacagctctatggccctggagtcaaggtaaagcctcattttaattttttgccctggagccgtttggcacaaaggactttggctcttcttgcctttgtcaaacagccatgaatttgtttggacagcagttgttgaatgcctgctaaatgctagggactgttccagccacaaggagacacaaagatctagtccctgctcccagggagctcatggcctattggggccaaaggcatgtcagtaagcaattaaagcacaaggtgccagctgctctacagaggtgctgaaacgttgtttgaagcacagatatgacaaggtgaagcaagtcattaccacagtggctagtgccatgttggacagaatccttggataagtgcttaaggtacatggatgagcctccaaaggatctgatgtcagctgattcctacattgcagagctagggtgggtggaatgagtcagtttatttggctggtgaaggaggaacctaggttggagcagggatgagagggtagaagagagcaaaggaggaggggcaggagagaacccggtaggatggaaagaggctgcccatgttgaacaaagggccagtaacatttctggtggcagggagatgtcaggacattttagaaatctgatgcctgctgttacaggcctgtcaggactttaccactcataggttctaagaaatctcccctccccacctcattctgttttgtttttagcccattctggatttctgcactcatgcatgcctcatgtgaccagggataggcagggagaaaaactcaaggggctggggttatgtgtacatcttcatggtattgactgttatggcatgcatggaaacagacctggacatgaaaggataagcttcaagccaggtgcatgagggctcccagctgacttttgggtgcaaacaggatgcaacagcttgccacagagtgatagaggaggccatgctaggagagaagggagaacaagcagggcaggcaccctggcccgactcttacacacagtgtgagatgctctcttggtttgggtctcccagatggcgaggaattcagggaaatttctttatttgggagatgcaagaaataatggtagggggttgaagtgatatagtagggaggtgaaacaatggtagggaggtgaagttatataggcaggaggcagtgaatgaaaagtgagctgttaaaccaactactacagtgggcaatggggcttattcctgcagggcaacactaggaagagtaagggagctgggggttttatactcctttccccaagtgtcaagaattgaggtctcctggggctatttatattctccagtactcctgccctcccatatgcatggcaggagagacctacatggttttggaaaaatgctcttgggtgcagagatgccgtaatatagcccctggcagctggaagtgggctggagcaccctgagagtgcaagtaatgtggtcagggctcaccagcctctgccagagaggcccacaggattagaagtatctctaacctgagcacctcactttctagactcctagaagttgtgggttggtctgatagagcctcgctgaggttcttatacaagatctagtagcatacacctcacagtgtgcaggagttgggtgaggcaggtgtggtatgtgggtgaagaggaccagggtggggcaggaggaagcagtgaagacagtgggaagatggagggttccagcttcacccacagggcagcaggctcacagcagcattcagtggttgccaggtgggagtgaggcccagcacactctattttctaataaaaccgagagatcttatgactttggcagctaattaaaatgttttctgaacatcgtatgagccaaacaaaacatgtccagtgaccacctccagcctgcaggccaccagcctgtgacctccagcctggctgttttccgtatgttctagtccggatctgcatttctggtagaactagtctgtctgcagccttactgtgtttcatgttctccccttggcaacagataaattagtcaaagagatgagagtttggggcttcaagtgtccgagtgtctggggaaggagaggagtggagagggtcaaccggaatgtagtgtccatggaatttttagaactcatgatgttttgaaaactatttgctggctggaatatttgtacttcacagtgattgcaagaagcagctaaactggagtttgaattttagaagctgctagaagtaaaataacaggcaaccagtgtgaaatagagggaaagtgtagctttggtgaccagcagatgcagagttgagattccaactctgtttcttgtggccagtgtggccttggctcaagggtcttctctctgtgcctcagtttctttctctataaagtgggattgtgccaaggattaaatgagtcctacaccatcatgtacagtcccacttgtatatgatgggtactaccatggtagtcccgactctgccacacatgagcttatactttatagctcattcatttactcagaagagatatactgatcacctacttcagaccaagattaaatgctgagggggaagaggaaaataaggcaagaatataaaacatagaatgtatgtcagggggtgataactcttccttttaagccaaaaattatcagtcattgtcttaatgaaggattgagagagagagagagtgtgtgtgtgtgtgtgtgtgtgtgtgtgtgtctacatactgtaaaaaaaaatagagacagtgttaaactgacatctcttaatttaatgagttgcttgtacttaagaaaataaaattatatgaaaattaatgtgaagcagtaaatataggtcagtcaataaatgtctgtgttggcttttgtgactcctgattttattaaaataatgcttgttgattttttttttcccatttacttaccattttgcttaagtattggagtttttggtttagggatattgactttttaaaaccaagatatataattgttcaaatatgtgatgcacgtaatacataatagcgaagtttagataatgaggagaataatgccctccaaaaacaatggcagggggctaggtcctgactctttcagactgggcagggaggcatctggcccaaagggctggaggagtgcggtatgggattcagactttttatcaggtaggcagtaagtgaggtcttgactgagagaacagagaacgaagaacagaggctagagacatcttagaggaagaacaaagaaacagtgctgacaggccaggaaggtcagagactcagtgttgggactgctggaagaaagacaagtgaggaagaggggtgattgtgaactcagcagggagaacccagatcctctactcctgatcatgctctagcgcacagagcactgtaagctcgtgaggaatgtgcttcgtacctggcatcggttggccataagtcactgaatttggctaataagatgttgcattgtctctgatctccttgagagactgagatagatggataggccctaggtccttatttcctccatgggagggtattgtgggaggggtgatgatgttcgaagggaagctcatttttgctgtttctaaggagtataatttgagttccaaattaaactggtcttccaagttggggtttggaggcagtaaagcaccaggtcaactttcaaggctttcagtggctaattttttatgacagaaggcatcgagggcttgtaagtttgtttttcttatcaagtgattcttcagattatatctacctttaccacagaaagggtggtccctttctttcaggagtggttctctcttcactttcaaggcaaaccgctcaagatggcaccaggtgataaaacagatccacttgctaatctggatagagcaggaaggacttaaacatttatgtgtttgtatacctttatttgagggagtgctttggcctgtttttagacagaaggttccatacagaaactgcatctgggcaggagaacaaagcaaattgtgttacagccgggaaaccaagcattgagcaacagaatggttcttaggcagaagtgagcctcatccctcagtgctgggacagattacagccttccttcactgccgctttcattcagcgcagggactgattttcattgtgttctgctttctctggtgtctcttgtcaagttaatagtagcctcaagtaaaattcaacccttagatgtttatagtcatcttggcctggccattaagatgatgaatgaacttgctgcttgccctggtaagagagccctgagggtggatgccgatacttagaaaataataagtcttttccgcccccttcctgtctttaatccagtgccccaagccccctggtgactttaccttgaacttcctgtataacgccaggtagaaaagcctcacctggctggaagcccactcgaggctctaacacaacagcaagctctttatcttgctttgttggtcttccccatccgcttatcagatggaaactcggcattcctcagagacccttcagtgtttctcagttgcttctgcaggcccttcccttcctccttgagaggacaagagaaggtggcggggagcaggcacccccagcctgtgtttgtatttcctcacctggattacctgtggcccttgcatcagggagagcccagccttgagtgaaactgcctgggagacaggctgggcgcttcctgcggcagtcggcagtgaggaagtggtggagaaacgcagatgtccatttcaaatcacaaggcggcttcagtattccgccgcggggctcagctttcacgtatatgaaaagcttcatttgtgtattcactgcgtttggaaggaaggctatgttttgctttagaaatgtcaacagagctgtagttacgacaaggatcaattaagaaggacgtttcccagagccgcaagacttgagtgaatctgtggggggaatttagaaaacatgtgttaaacctctagatttctttttttctaactaactgcaaaacagcaatttaataatttcctcttttaaggggaaaggggggagtcttggattttaaatcttcctaaagcagcacagcatctcttgaaaagaaagccatgaaagactactaagctaaggcgaataaaataaaattttcaaaaatcgagaacttcagtgtcctagtctgggtttccctgagcagatcctgagatgagggctcacatgcaagtggttcataaaggatgtgtttccgggggaagacaggtagggagtggagagacgcaggacagggcaggactgaaactcaggcagggtccctcagagcgtggcctcagcctgatgctgcaagggggatcagaggtgtgagttacgccaaggtactgttccatctccagcttaggaagctgagttttgttctcccgtaaacaccagtcattggttaagggccacttagggaggaataagtggtagaaagtggtcctaggcactttccacccaggggtgaagtgtagacagtggggcttcaatagcttaagggcagaagaagacccacggttctggctcttggagccaaacgaagactgaagccacagtgtgcatgtaaagggagtccaaggagcattgggtggggcattgaaattgtttgctacagtcggtttaccttcaactggtttccttcttgttctgaaggatatattacaagcatattgacaaaagtctttgaactcttgaggtgtttgtatgatattctgtgtcagttgcacatgggatgtttctaccagcatctgaattggggaattgacatatacagatgcccgtggaatttaacagagaatgtgaatgtacggctacagtccgtcaccatccagcttgccagggctgtcatttcatccttttgaggccaggcttacagacagtctgggcttccactgcccccatgctctgcctgtgatgtgtggtggcctctggcattgttgtaactcaggcacctgagcataactagtgagcctgtcctgctctcccaagcaagtctgtgtttaaaatcagttaggaatatgttgggctgcatgtaacagaaaagccaccttttttagcagctgatccttgtgagacttttatttttctttggtaataataaaataagaaatgggcatttcagggctagtatgcacctgtgtggtacccacaggaaccccattccttctgtctttcctctcagcctgtcttcataggggttttcatctccatactccaaggctgggctttccctgatggtgctttttggtttccgcttccaacactacagctgcattccaagcaagaaggagaaggacaaagggcaaaaggtctgcctccttttaaagagctttcctaaagctccacttgacattttccacatatatctcattggccagcaccatgccacaaggtggggtggcaaatgaattttctcagctgggcacattgctactctagacagagtcagagttgtgtttattgggaggaagggaagagtggccattgggaagcaccagcagagtcagcagggcagagacctgagagaggtagtttgtgagtgtgtatccctgagatacgtagcagaactggggaaggactgcccagtgagtctactcccttcagtatttgtcagatcctgctcaattataagatgatctttatctgtccgccttatctatcttcactgacgtgtatttcttattttcacaaaatgaagccatttcaacgatgttgtcaatgtgtttggatttctgtccttcaacagaggtgccacagctccatactaggtcaatccatgcaataaagaccaagttccagaacccctgtccttcagaccatttggtatatataatttccaggcccttcttcactgttctgtttatcactccctgtgctgtctctagtttggcatcttcctttttaaaatagaacccaggcttgaactgcaattcaaccagcccagcatagttattattgtcccgagtctaaacatgatatttctgttaatgtggtagccacagcacaattctatttattcttgaggcattccctcttttattttcttggtctttttgtgttatttggaagtgtaatcatgtcatttatacccttgctactcgaatatggtccatgaaccagcatggtgacgtcacctgggagtgtgttagaaatgcagaatctcaggccgcagccctccggggtcaggatatgcattttaacaagatcgttgggtatctgtatgaaaatgaaaaattgaaaccagggcgagatatccagggcctcagaggaaaatctcaaaatggtcagggaggtcccttcttagagatgagaaagtcactcagaggctgccatggcctaagactgagacaaagagaatatgtctgtatacaactaaagaaaaagagaaaaggttcgctgggccagagagtggctagagactcgattgtactcagacttgctgtattaccaacaggtaatgtacaggacagtcatgacctacacctggctaaatccagtagtcatttttcagtcttctttctggacccgtcagcatctattagtacaaataacgactacttctgttattattattattattattattattattattattattattatactttaagttctagggtacatgtgcacaacgtgcaggtttgttacataggtatacatgtgccatgttggtttgctgcacccattaactcatcatttacattagatatttctcctaatgctgtccctccccttgcccccaaccccacgacaggcccccatgtgtgatgttccccttcttgtgtccaagtgttctcattgttcaattcccacctatgagtgagaacatggggtgtttggttttctatccttgtgatagtttgctcagaatgatggtttccagcttcatccatgtccctgcaaaggacatgaactcatccctttttatggctacatagtattccatggtgtatatgtgccacattttcttaatctagtctattattgatggacatttgggttggttccaagtttttgctattggaaatagtgctgcaataaacatacgtgtgcatgttctttatagcagcatgatttataatcctttgggtatacacccaataatgggatggctgggtcaaatggtgtttctagttctagatccttgaggaatcaccacactgtcttccacaatggttgaactagttgacagtcccaccaacagtgtaaaagcattcctatttctccacatcctctccagcatctgtggtttcctgactttttaatgattgccattctaactggtgtgagatgatatcttattgtggttttgatttgcatttctctgatggccagtgatgatgagcattttttcatgtgtcttttggctgcataaatgtcttcttttgagaagtgtctgttcatatcctttgcccacttttggatggcattgtttgttttttttcttgtacatttgtttaagttctttgtagattctggatattagccctttgtcagatgggtagattgcaaaaattttctcccattttgtaggttgcctgttcactctgatggtagtttcctttgctgtgcagaagctctttagtttaattagatcccatttgtcaattttggcttttgttgccattgcttttggtgttttagacatgaagtccttgcctatgcctatgtcctgaatgatattgcctaggttttcttctagggtttttatggttttaggtctaacatctaagtttttaatctatcttgaattaatttttgtataaggtgtaaggaagagatcccgttttccatcatatgaatatgccacaatatgttttctccattatcctgatgatggacattgaagttgtttctggttttatcttttgtgaataaggatactaagaacatttttataccagttttcgtgtgcatgttttttttcatttattgagtaaatgctagtgagtgtaggtgctggctcaaagggtcactgtttagctttattagaaactgccaaatagcttttcaaagtggttctgccttttacaccctcaccagcaatgtataagagtttgagttggtccccatccttgtatattcagtattgtcagtcatttttattttagccattctggtgtgtaattgtgtttctttgtgatttagagctgcatctcccatatgactaataaacacgttttcacgtgcccctcagccattgggacacttattttagcctgttcaagtcttctgcactcccttcttctggggatacttttcttctcctgtgctgtggtacactcctcaccccaattcttctcactcgccactccttttctgcttcctttgttggggtctccttatcttgccaacctttcaacattggagagcctcagggtgcggtcctgagaatgcttttcttctgtgtatacgcattccctggatgaactggtcaagtctcataacttcatatcatggacatgctgacaactcccaaattttcccctccagcccagagctcactcctgaactccagcgttgggtaccaaattgcctgtttggcctctccacttgctgtctaacacatttctcacacttaagatgtccaaaatgagttcctgatcctcctgacacctgttccatttgtaggaaacagtaactccatccttcttggctctcccttttctctcatacaccacatctatttctcaaacaccctgttggctgatcctacagagtatctcataatccagccagttctcaccatcaccattggttccatcttggtccaagtcaccatcgtcttttgcctcattattgattggcaatagccttcttcataattggtttccgtgcttccacctttacctcttacactcctcctcttacactcctttgctcagaagtctccagtggcttctcatctcattgtaaagcttagttttttataatacctctaaggccctagaagatctgaccccgttgctgcctctctgaacatgtgtcctgtcactttcttccttgtagcctcagtggcctccttctgttccttgaaacacactaagcttatccctgcctcagggcgttgacactggctcttcccttaaataggcacatagcccactccccatttccttcttgtctgtgcttaaatgtcacctgattagaaatatcctactactccaaacaccctatctgtcctctttatcttgcttttctctatagaacctatgaccatctggcatactatttttttgttttgttttcttgaaacagagtctccctctgtcacccagactggagtgcagtggcatgatcttggctcactgcaacctccgcctccctggttcaagcaattctcctcctcaacctcccaagtagctgggattataggtgcatgctaccatgctcagctaattttttgtctttttagtagagatggggtttcaccatgttggctaggctggtctcgaattcctggcctcaagtgatcctccctccttggcctcccaaagtgctgggatgacaggtgtgagccactgcacctagccggacatactatttgtttgttgctggttgtcttagtcctcctaccggaattaggttaggtttctacatataatatgcaatgacttttttgagacaaggtctcactctgttgcccaggatagagtgcagtgacatgatcttggctcactgcaacctccacctcccaggctcaagcgatcctcccagcctccggagtagttgggaatacaggcatgcaccaccacacctgggtaatttttgtattttctgtagagatgggggttttgccatgttgcccaggctggtcttgaactcctgagctcaagtgatccacccacctcagcctcccaaagtgctggagattacagagtgagccaccacacccggcctggaatgactttttattcattgattcatacctagtaactgcagcagtgcctggatgtgtggtaggatctcaatctttgttgaataaactaatggatggtgggcaaataaatggatagaagatgggtatatctatctttctctgtactttatgagcactctttcaattattgttttatattacaccagtaatttttaagtagtgttaaaaactagtaaacaatgtaggggtttggagaaaaatgctaattccttatctcccggaaaagggaaaccatcaggaatcagaaatggagaaatgcttcccccacctggtgattgcatcttgctgtatgggatcaggcctgaaaagtgagttaagtctgttggtgctggaactcatcactgaggaacagcctatgtctgtgccttcaggggtgacagacagtggaccaaggccatgcctgcatattcctccctggacccctcattcaaagccagaatctctttcctgccagagcagtcctttgtccacatgggtttctgcagtagcccaagtttgcaggcccttgatagggctggagtgtgagctgtaatcctatgggcttgaaataatctctgctatgggctctttaaaataaccccaagtaacactcatgtcttatttaggtatccccagaagcaaaccctgagataagaattcaagtgtaaagtacctgtagtttgtttgggaggtgaagatagggggatatattaggaagtgagacagagaaaagaaaacaggagaaaaggacagagtgtcaagccagccacaactatgggcagctgggcttactcccactggggaaccctgggtccacagagcaagctccttggggttcttctgcctgcgtggtgaggagtctggggcctttatccacctgctcccagcagctgttgattgagggctgctcctgaaggcattaagatcttgacacttctggcctgttgtttgcaggggcagagcagttttatgacaagaaaaagtcctcaggtgaaaaaatgcaggtgtcagcaggtggagacacagggcaggggatctggaggaacatcagtggggtctgcgacaacctgtgaccacctcacagacaaggtgacttctggcttctcagtgactcagccacacttctctttttcactcactcttctttctggtcctcactaagacaaaatacagaatacagagcagcagttcacgggctatagcatttgaggagattaaatacaggcctccaaccacacaggccatctggaagctttggcctccagatgaggacataacgaggtcatctctgctttcagggagctctcagagtctcaggaacagatgtacatggtccatcagagtgtggctcagggcccagggtgggttggggaaaaggtgagttatttagcattggaggagcctgtttgtagccatggctgccaacatgcatgagccacttagaagggcttagggtggtgagggtacaggtctacctgtgaagctgagtgatagtcacggtaattacagtcacctactatagcctcacaatgagccattataaaaatgaggaaactggggctccagaaagatttctcagccccaggacggtgcagccaggaaatatcatagctgggatttgagcccagcttgtctggacactgagcctgtgttttgcacactatgcacacacttctcccagatgaagatttgccttcatccaaggggaatgtctgtgtgagacagtggcagcctctgatgggttcctgccgattggcaaggtggttagagctgtgtattgagaggtcttctccaaggtatcagtttttctctgggagggttaaagaaggaccttgcaaagcccatggcctttgaatagagagctctgttctgtttgcagtgactcccctcaaaaggcagaatgcaattctctaaagggaaaaaaaaatgaggtggctgctctctggggttaagcagagaaaaccgtcaggcaggagaggtggggctgtatttgagagggtgggagtggcccaggagacctcacggtacagtcagctgcaggagaggagctgctaaccctcatcttaagaatatcactctcttgacaatcacagttgggaaatgtgtaatctcagggtgcctccttgcccgggcatcttcattataaaagcttagtctttctaaatgcagccaagctctcctctgacaagagatgtgagaattccgttgacactcactgaccacctagaaaccagagacccagaaacccaaaggtgggtcacatggtcgccctgtccctggggaatgcacaggaaaagagctctgcctcccggaaggttccaggtgttggggtaaatagagatcctgctgctgcctctactcccttactggtctccctggggacatatttgaacatattttactcataaattctcatctcagggtctgtttctaaccagacctaaaacagacaggtcccccccttttttaatcagtaactttggtttattacagcagaaacttcccaaattactgatctgaccaattagatatgttttaatttttttatgaccggaatcttttccttcaaatgaacctgtttggattctcttatctgtgcaatacaacctaatgtaagtctactttgtaagtatttgttctgagattatttgttctgaaggaggcccaatccagttcagttaaatctgaagtttttgatcaattgggttgctgagattacaactttctttttcattaactattagtacttaaaatattgacatgctaagtttttagtcttctcttttttgacctataaaaaaggtcaattatatcttaaaagtttcaccttctatttggctattgtgtatcattctttaaatatctggctgggttcaacttgctaagattttatttagtatatttgtatctatagtcataaacaagatttctctgtaattttctttcttgtcaggttttggtgtcagatttctgctagtgtttgcaaaaataagcagaaagcttgcacttttctctgttctctgaagacatacaaccaacatagttgcaacagcaggcagtgagagctgacccttactgagagcttgtttatgtgccagaggctgctcaacactttttattaacgtgtttaaccctcacagcaacccagtgaggtatgtgcagttaccatctcagttttcctgatgaggaaaccatggcttagcaagcttaaggaggtgactcaacttccttagtgagtggtggggctgggattcaggcacaggcaggctggtacttaatctctctcctacaaataccagcttccttggtgagtattggggctggggttcaggcacaggcaggctgactccagtgtgctctaatgcatcttctttgcataaagaggcttatttacatgtcttttggggtatgctggctgctcacgtggctttgtagacattaccctctggagtgccaggtgctttgtgaattagatctttcttattacatcacggccagttttttgtggaggggggcaatgggcaaggaagcattgatgaattttctgagacagctgcgatttgtctaaacaaggcttttccttcagtacccaaggattctggcacacagacccagctccccaccagcctcccctggaatgagctttcctgaggtgcccgcgtgtctccactccaggtcctggaaagctggcagcagcctcactcttgggttttcctctctggaattaatttgtccccaagtgaactcaaataaaaggaagagcacctatgagagctttgcctttgactggggctgggaaggtggaaatagcatggtctatcctgttttctcatttgcccgttgagcactgaacgactggaagtagagtatgatgtgaagtcttaccctttgtgagtcagggggcttgggctgtctgcacacactgtctccaactccaccaccaccatccaactcaggcccaatatcactgggaaaaacccagatcccctacagaaatacaacaccggtgacttgctggatgctggtggctttgtgctattggcatggtgggtctgaaactcttgtagacaccaaagaaattggtaggttatggaatgattgattatatcctgtgtcagctggaatcctgcgacatgttctagtttcctagtgtgcagagtacaatgtgggcaatgctgggttgtagaacatctgtgattttcatgggataaaagcccttatttttgttttgttttattttaagtcaaaagcaatttctaccagtaagagactgaatgaataacaggaagccccttgtttgcatggttcagaactaggcattgcaaagataaccatttactctgatttcagaggtctaaaggtgttagttcccctcttagaagtaccaaacttacaaatgggaaagtggatgcttagaatggcatgaatgttggctggcttgatcatgagtgggatcacgatggcattcactctttcattcagcaaagttatgtgttaacaggtattaagtataccgttatcatttttccttactttagaagataagccaaaaaatttgaccttaatgaaaatagaggatttttaatggagatcagaattttcacttataaaagtaccatttacacatttcgtcactgctgacagtcattagctagtggatagatccaagctttaaatctgaatcttgtcataggaggatggaagctcaagttgttaaaggcctaaaaggttgcatgttacatatagaacaaggccctgggaaaggaaatggtctgttgaaagtcacaaggccaaatggcataccaggtttttggtccttgtttaagaaaaccaaatgtaggttcagaatagtttcttctttcttccacgtctctgaaagtccagcttcgtgtgggagagctctgaggccctctcccagccctcgtttttcagctcggggttaccacgtgtattccgtgaaatgctctacctgctttctgtatcggctttctagccagttgcagtgtacaatattagttttggctttgggaaatgaggtttctttgacttggctggaagtatacagcaaccattttatttttcttgtgcctcatgaattaatagggcagtgagaggaaagagcatgcatactgagcatctgagcttttttaaagcaacgattcacccagctttctagtataaaaaacttcctctggcccaccccgagcaaaccctcattcactgctcagtcctcccatttgttcatctggaaagaaggaatgttctagtggggccaggccccatgtggtatcttccttttctgaagtcatccattcattctcttcctggtggggacttaaggttggaggcagcaaaaagtggaaagactggtagatagtctgtcagctctgtggggtgggtgtgccatttggggggaaatgaaaccagaggaagtttggctttgcagagtgaggacccaggcaagttcattttttacactctggttccatctccttccccctgcacacatgagtcagctcccaggaggaccccgtgtccttgactcttccttgctgtctcttcaagctatcaatatgccctctctctatcttctccctctggaattctccctttccgtctcagttggactatctggactttttgattctgcttcttcccaaagtgctcttttcagtccattgtttttcctgagatgtaatgactcaagggtaaatggtacctgtcagttgcaacgcctgaaaccatagatgcataggtgcaggtggtttatttgagtagcgccccagaaagtaagaaagaaggaagaaaaggagggtatgtctttgaggtcactgccattggtgctaagacttttttgagaagcatatagaaagtcacctagaaatgcttacctataggacaggagactggagcactcacgccccagctccaatcccaggttgttaagggccacctccaaggaatggattgtcctgccctggccaggggtgtcattgagtttgggtgccctcagaatgctactgaagatggtacaaagctgaaatcatcagagttgggccagaaagaagtgacacagaacatctaaggcatatcataaaccatttctgaccctgatctcggaacaggatcccagaacagttcaacctgtaattgctttctgacatttgagcaaaagcatcagtagctcttctcatgaccacaatcagtttactaggatttttccataggctcaaagaaaagacagtctatgttctaagtacagatgaagaagtaaaagtttgtgttctggaggggtggggcttcaatctagaccttgcctctttctgatcactgttcttgacactggatctaaattaagaaaaacattaaatctaaaaatgtctaaaaagttaggacatttaacctatactatacaagaagttatcagctaagcaaataaaatccagactttgaaaaaggtaaataaggaactgatttactttaatcacaagttccttctgcttacaaaatgattcatactgaaatttttaaaaaatttcttaacagagtttagtgcaattcacataaaaaatgtacttcagtaatttgcaaatatttacttaaggatttagtaatttagtaatgtttagtaattttttcaacaagttcttttctgtttaagtgggttctcagaagtggttgcaccttcagcaggcaaggaaaatatttatttgaagacgtttatgaaacacctcccttgtttttattatgtttgtgttcttcttatatttctttttatttgcagtaccctcaagtactttgaaggtttggggacagtaaataaaattgatggccattttttgtcatgcatcttctgaattggtatgtttttctgtgttcagaatgtcattcctcagcccccaggggacataagtacaaagtgaaatgaggcgatgtcaggatcacctgtgcacattctgcttctctccaggccctggcttctcttctttccggtagatgaacttgagcacatgatctcaccacttggagcctagtaaaatccatgctactgttctgcaattgttcttttattctttctctctactaatgttttcacctatggatgtcagttctacttctccttggggctttaactaaaaaggaagaattgtctgtggcttcttagaaagtggtgtgtggacaggcaagggctgccctgcccttggctggcagcacaggctctgcaaagggggtgggtgagtgaccacatcatcatggctaccccttcccgagtgcttcctgtgggctaggcagggcccaggtagctcaaaggtgttcccatttgttcttcacagcagctctgaattcattagcataacaaaccacccccaaatctagtgggcttaatacagcaatcatttctatttgctcataactctaggggttagctaggcagtttttcagttctgggccaggctcggctgttcttggccaaccttactcatgtgtctgtggttagctgcaggtcagctggaacccaaatgttgtctggaacaaggggagtgatttagctagtggctctcatccccagcaggctggcccaggctcctgtagggttccaaaagagtgagtagaagttccaaggctttttgaaatctaggcctggaacagacagcatcatttctgctgcattctgttggtgagagcaagtcatgatttcagctcaaattcaaggtgggggaataaaatctacctcgtgatgggagtagctgcgaagtcaaaactgcaagggatgtagttaaagggagggttggagagtgggcgtttttgcaaactatctaccccaacctctgagcggtaggtataattatcccagtggttctcaaccaagggtaattttgtctcctaagacacagttcacaacttttggagaaatttttggtttccacaactagttcagcgctattagcatctagtgggtatgccagggatgctgctaaataccccacaatgcacaggacagctccccacacaacaaggaattatccaacaatgcacaggacagctccccacacaacaaggaattatccaacaatgcacaggacagctccccacacaacaaggaattatccaacaatgcacaggacagctccccacacaacaaggaattatccaacaatgcacaggacagctccccacacaacaaggaattatccaacaatgcacaggacagctccccacacaacaaggaattatccaacaatgcacaggacagctccccacacaacaaggaattatccaacaatgcacaggacagctccccacacaacaaggaattatccaacaatgcacaggacagctccccacacaaccaagaattatccaacaatgcacaggacagctccccacacaacaaggaattatccaacaatgcacaggacagctccccacacaacaaggaattatccaacaatgcacaggacagctccccacacaaccaaggaattatccaacaatgcacaggacagctccccacacaaccaaaaattatccaacaatgcacaggacagctccccacacaacaaggaattatccaacaatgcacaggacagctccccacacaacaaggaattatccaacaatgcacaggacagctccccacacaacaaggaattatccaacaatgcacaggacagctccccacacaacaaggaattatccaacaatgcacaggacagctccccacacaacaaggaattatccaacaatgcacaggacagctccccacacaacaaggaattatccaacaatgcacaggacagctctccacacaacaaagaattatccaacaatgcacaggacagctccccatacaacaaagaattatccagccccaatgccaacagcattgaggctgagaaaccctggattatccctttttacacatgagatgagggtcttacaggtcttctaagtggtggagcctaggtttaatcccatttccgtactcttcagcactcactgtgctagtatccctctcaggcgtatgaatacgtcaagccacttcagcatgatggcgtttaagttttagcttgtctacaaagcagcacaatacagtggttaagagtagggttttgtcaccagactttctggcttaaatctgctcccatcccagcaccacttaatatgtgttgtaccttgggcaagttcaatgatgtctctgccttggccttagttttcttcttcttttttttaatgctgcctcaattacagaacagatgcctaagttttcttatctgtgagactgagctaagaataatgttgaccttataaatttgttgcaaagattaaattagacattcatgtaaagcacttaggaccatacctgagacatagtagcctttagttatttttgtctaattcttctttccctgatacagtgcccaccataaatccccagtcatggtgctgacctggcatgtgaagctggctgggaggaaagagatttttctctcccagcaaagtagtaaacaggctctctcaagcattcatccatctggggagcttggcacacaggacagatcctttctcttaagtgtcccaaggccaaccctgaaccatggaagccttcatttaccatcagtttttctttcaaaacttctgcaagggcataaaaatgggggactaaatagggaccaaataagtgagtccatgctttggaaatgatgacctgagagtgtgaggaaggggagagccaggagctgagtggcagcattgcgggagggctcttcctcccttggttggcagatgggcgggtgtgactgaggctcaccatgggtggactgagcagacgcctgccctcacacacaaccccatgctttcagaagaaggcgtcagacctccttgtatgggaacatcatcaccttcacgctttgtctttaatttgagaagcttatgtggaaggaaacagcacattcttgtgagaagataggttttggaaagtccggagtagacagcatgaatccagggtttctaaagtataccctctccatgcttgctactcaggaagcagaggcaggagaatcgcttgaacccaagaggcggaagttgcagtgagccaagatagcgccactgcactccagcctgggtgacaagcgcgaaactctgtgaaactttcattctgacagtaggaagaggaaaagactctggctgactccttgtgatagagcaaaccaagttgagtgttgtatttacttttctggatttattttcacaaatattcagctcagaatgtgccagggaggggaggaacacaggagctgtattggccacagccatgtgcgtcatcccaggggacacttatgtgagccctgtggagcaggaattgttattcccatcttacaggggtgacagcttagctcagaaagcttgcagtttgctccacgttacaaagctagtaagtagcagagctgagattggaacccccgtccgtctaatggcaatgcttcctcttttgctattctgcctcacaattaaatggagtaggacctgatccccgacatcgagaaactgacggtgttgtcaagaaataaatatcccccccccacacacataaatagagaacaataaaagataacgtcggaggatgaacccacgagcgtggtttgtgtgggaggatgtcttgatcctgggctcgcagggctgtccgctgaacatgacagttatcctggcttcacagtaacctttcagaggtgctctgagtcctgaacatcggagatagattctttatctggggagtgactacataatttaaccatttgttattttttattttatcagactgggatcctttaggagctgaaagggacagtatgaataattagccctaggacaacaggcagaaaccgggactgccccaggcagttaagatgcatggtgaccccacttaatggccaaaatacaaggaaggcttggtgtctccgcagcttcctgaagagggaatgaggggcaaggctctggcctcgcagccagctgagggagcgcttctctttccactgtctgattctgggtctctgcttcctcatctggatagcagccctaacacccactgtattagttatctgttgctgtgtcacaaatcacatgtcaaaacctagtagcttaaaacaacattgattagccctcatagtgggttggggattccagagtggttctggctcgaggtctcttatgagactgcagtcaggatgttggctggggatgcagttgtctgaaggctccactggaggatctgcttcccttgtggcccctcgcttggctggctgttggccacaggccacagagcactcaggaccaaggactggagtggtggaaccctcgtccttcattaacacaagcagggcaggaggatgagggtttgtacctgctgttggcaggggggcctcagttcttcagttcttctccatatgggtccctccaacaggtagctcaagtgttccaccatgtagtgactgactttccccaatgaaaccatccaggagagcaagaactgggcagaagctcgcctttccatgacctctcagaagtcacatagcatcacttctgccacattctgtttttcaaaatcgagccactaagtctggcctacattcaaggggaggagaatcatagctcactgtaaccttgaactcttgggctcaagtaatccttccacctcagcctctggagtagctgggactatagtcacgtgccaccacgtcctgctcattttttaatttttcgtagagatggtgtcttgctgtgttgcccaggctggcctcaaactcctggcctcaagtgaccctcccacctgagcctctcacagtgctaggattataggtgtgagccagtgcaccttgcctaggcttcacctttcaaagggaggagtgtcaaataatttgtgaacatattttaaaaccactgtacttagggtcaatgttctacacttataagttaagtaccatgtgtaaagtgcctgcagcagtacctggcacccattaaaaacagaatcttggccctccagagtccagcagctgcacttctgaatgctggtgggcacggacggggtttgatgtccagtaagcctgagcagccctgcaaatacagatgagcccaagtcacctgtacagttggggcctgaggaagttaggtcagttctgaggctcccccagatgtgggacactcctcacggacaagttcagtgttgtatttacttttctggatttattttcacaaatattcagcttagaatgtgccagggaggggaggaacatacctcctatgcggcaggagctgtattgggcacagccacgagtgtcatcccagggaactcatgtgagccctgtggagcaggctctgagcctcccccagatgtgggacactcctcaagggtttccaggtgaccacagagggtcccacctcagtgtggacatttccatgtgtcctcctgaaaccctctggtgagcatccccacccaccctttggtgtctggagccatggtggctggttgtccttcccacttaggggaaccaggcctcagaactacagctcagaggcctactctgtgggctgtccttttttctagggccttgattaaatttgcttctctgaacactgtgaggtatctgtacttgttttaactcttctagtgacagcaatagaaaacctaaattggtgtaggtaaaagagaatgtagggttttgcaaactgaaagtacctggggttggcttcgaccacagcttctggttggacctctggaagttgtcatagtgtctctttctctctctccatctgtcagcttctcttcctccttttggcttcgttctcaaacaggctctctgtcccttcagggtggcaaaatggttgccaggctacagtaaataaataatctcatttcctaaaagttcttgcaaaaatgtcatagagtctgattggtccaattgagttaagcctgggtcgcatgcccacctcctaacgggttgggagtgaggtggagtggggaggggatggctccccagagggaagggtagatggatgtgggtggcaagaaacatgtctgccatggtattgttatcctcatttaccaatgaagtgttggcactcagagcaggcaagtagcttggccagagtctcacagataatagcaggtgcagaccgtcatcctcctgccccactagtgttgatgaaggacgagggtctcacctttccagtccttggtcctgagtgctctgtggccatcttccacttaaagctctaggacagaccagcagctctggaagtgactggattaaaaccccaccaactgaagacagtggcgtgggatgatggctcgctgatgggagacagaatttctgtctctcctgtcagaagccctttgaagaactcagctgtctggacaacaaaagtgggagcttttgttgtctagaagttcatgtgacctttcctttcaccttttagtgctgcctaagtgtaagatttaagcacagcattcttttcccatgtgtcatttttcagcagttaaaaatccatcagctgaggccacacaaagttggcactccctcctccaccaaccctcagctaaaaggttcagtggaagggactgatgctgtctccagatgcagactggggccatggattgagccacagagggaggagggaggagggtctcaaattaaaaagacaagaaacaaacaatctccccaaataagcagaaagtctgagcgtggaactgagctggttggagctggggagggggtgcgggaggtactttcagcactccctcgtgagatcatggaacagggcaggaaatctgaacctgctgccaaagaaaactcgctttgccttttgtaaaaagcctgtcgagctttcttcacaagggagctgctggtggggactcacaaatgggcatgctgcctgccagcaagggtctcctggccagccctaaaggcccgggctgctctgcttacagccacacggctgtttctgagctgaggatgaccctccaggtggctgagattccctccaatctttttatttctggttgggaaaccctacacagaccagtgtctgtctcacggtttaaaaggctgcatgcaaaacatttcctcccctggtagaaatgctgcattgagccacagccctccctctgcagcctgtgcagtgtcaaggggacagtggctgcatgatgatgtgcctagcagggtgtcccccatcaggacagtcacaggggtggaacaaatgcaggagccatggagccaaactgaactgggttggaatcccagtttcagccacttaatagttacatggatattgccaagtagcctgagttctcagaggcttgatatcctcatctgtaaggtgggaagtataagacctacctcacggtgtcagtgttaaataagacagggcaaaatgatgaaggtactctgtaaatgtatgtccattccttcctcctcctctgggttccttttcagcacttcctcaccacagcaccattcttaagttttctagccccatttattttagaaggggaactggaggcagcttggagggaggtaacatctggatgtcgcagtgacagctggtggctggtgaggagtccacaggtcaggggcaacgggccctgcagacttctcagcatcccctgctcagaaggggctctcagagtccatgggctcagcaggctgattcttcccctctcctatgagaccatcctccatgtgggtcccatccaggaagctgcttccctcccaagggaaggaagccaccagtgtttctagaatctacatcagtgccactcaaagcgtggtctcctgaccactagcatccacaccagctggggcctggtcagaaaaacaaccgtgggctcctccccagacctattgagtcaaactctgggggtagtcccagcagtctgtgttttagcaagcctccatgactcgaatgtgtgccacagttggagagccactgtgctacgggcaggttatcccagagcaaaggaaggaaaacctcctctgcacaatgcactctgaaggccccactgaatacgggcatctgtgaggcagcatgggacctgatcactctaccatatatagctgttgtgtgaccttggaaagttccctcaccctctctgggtctctgtgtcctcatctgcaaaatggaacaatcataatactggattgaggatgagaagcatcaatctgttcatcctagcaaaatgtttagcaaaatgccacgtgttcagagctcaggacaggttagctccatcctgttaatgttgaggcagcccacccaggttaagggtctcattctgagagtggctttggacagcttgagaatctacaactgtaggtgacagagcaaagaaaactcttgaaaagtttctcttagagcctaatagcaataaccattaccatggtggcagccaccagagtaactcattatatcattccagcaacgctgtgggttaggagttactatctgtatttttacagggaggtacttaaggcaccacttgataagtggtagagccaagtcagtttgaaaaaaacataatcattgtgcaatgacaatttgagacattttcagggtcccagttccatcccctaggaatctgtaaagaggagagtggcttcaacctgctgttcagggcctctgccctcattccctggaggctggtttggacagtgtgagaggcatccttcccaaagcagacaaagagaaaacacatgggaatggtaattaaatgagtccatgtttaaggggcacttaagtggattaaaatcaatatgtagtcacataagtctgctaagccatccttaatgtttggcgggtggatttctttgtttaaaaaatcctggtttgcttgaaactggctgccccattgaagcatgagataggacgagagattcccaggacctggaagaccacttgctcagagtctgaaatgtttacactgcctctgactggcatctctataccagaaaggagaagagggggactagatgtttttgtgtgatagtctctttcctgctatcttaggctgagttccctaaaacaaaatcctgagatgagacatcatgtaaaaataatttgttaggaagtgttctcaggggaatgggaagtagagcttcaaagggaaggaggccaaacaaggatgtgatatcaagcaaagtccccaggagacagaaagaaggtgggtgactttggcaccgtctaaagtataggtcacatctcactgtcccaatcagggacaaaagagcatggctgaggattcccccaaggggatgtgaattctcaagcacttccatctctccatgttcatgcaaagaaggtgccaggagccccgtggccatcctcccacaaaagacacacaggtggtggcatctggggggtcaatgtgcatggttgtgcatggtagagacccctggatggagctccatgatgtgggatttacatcccgcccatactctgctgtgagagagatggtatgcagccagtccagccatctgaagcagaacgaaaaaatggtatggaaagcaaggcacctgaaaaaattttcaaagggagaaaaagaatgagcaaaactatcctgtagaggagagagacattgaaaatgacatatacagacacagaaaaggttgctcagtcaacaacttctgcaggctcaaagcatgggaagtaatcagtaaatggccaatttatctctccctcacagccaagccaactcctaacataattggaagtttaatatattccaacaagttcagaacaagcatactagatcttaaggcaatctcatggccctgcagctcatcctttttttcaaagaaattaattttcaaaaaatgactctattgagattgaatttagatcttatccattgccataaccaaaagcaacccttactatttgtgtgtgcaagtcgttttaaacagctggcccattaactgaaaaatgtcaaaaacaaatataggagaaaagtaagataatcttggaaggcaaagcctgtctccctatattgttcttaaaaatacaaaagggacacataacttcatcatttaattatattaggaggtccgtcattcagtgctcttgtaaaactgtcttgcccttgttctaattgcgtattgatcaccgaggttcttggcatcgggcttttctttgatgtgtgcatgatcagaacacactaagagacagcctgtgtgctccttcctgtcctcgtgggcatttcctaaagcttcagccctaagctggtatatgtttctctgttacatcaactgccaaggcaattactttacatctgatatttaatggaaaagcttctgaggacagggctatactcacatacctccacacctggcacagtagatgagctcactatctgttgaataagttcgtgacagaacagaagttctactgcagccacaaaggcctattcacagtctttaagcctgatgaagttctgaataagtaaacccttagctacatcaggcagtttatgaatggtgttttttgttactgtcatttgtaatagcttttgacctatgtgtttgtattagtccgttttcacactgctataacgaactacccgagactgggcaatttatgaagaaagaggtttaactgattgacagttccacaggcttcacaggaagcacgactaggaggcctcaggaaacttacaatcacggcagaaggtgaacggaagcaagaaccttcttcacatggtggcaggagagaagggggctggtgggggagtgccacacacttttaaaccttcagatctcatgagaactcactcactatcacaagaacaataaggggaaaatccacctccatgatccagtcaccttccaccagatccctccttaaattcaacatgagatttgggtagggacacaaatccagaccatatcagtgtgcaaatgatgagctaattttcccactaaagtaagcactggtatggtacatagtatgactatggtagtccagtattggattccataatttaaataactagtagactttttagttagttgaaaggtaaaacaatggtaataacaatgagctgtaaaatacgacctgtggggtgggaatggggacagccaatgcttctctggtaaagggaggccagtttcagcccctggtgcaacagcacccccatgcattcatcatgtgagatgataagtgtctttccttgaaccagttcttcttcttcctcctaggctgggaacttctccttggagacagcaggaactgtgttacaaaggcatatggcccaacaaaggacactgaggctactcagtaattattaaatgagagcatgaacaaaggaatgtaagatgtaacagaaaacatacgtgtctcacacatgagaattattgtgtagaagctgtttcccatttgagacaaaataagaaacacttgttgaacgagtagatgggcttcctctgggagcacagcaggtaggcacccatgttggagccagccatggtctgcagagttcatttctctgagtccctgccccagaggcacatgacataggaggctccagacaactgactcaaagacagagaggaccataataccagggttcctcagtcctcaccagcataagaatcccagagaaggcattttttttctcacatactctaggtctcaatctcttaacttcaaaaatggcagtggctacattagctcttgggaccagtgtttcaaaggctagtgtagaacacttgcctcagatgattcaagatccaggtttcctgactctgcttctgctgtaaagaatcccactctggaggctggggcctgcaatctgcatctttaacaagcccaccagagaatttcaatgcagtttcacttttgagggtttttaacttgattgtccatcagaaccacctggggagctttcagcaaatgcatgccgacgccacatgcattgattctgcggccacacagaggggcctgcatctgggtcttttttacaaagcttttcataggattgtcatcgtcacctttccagcactgttatgcaaattggagagactcatgccaaggtgaagggcttggtgagagcagccaggtcttctatgcagtgatcagcctgcacagctgggtgtggcatctctggctcccaggtggttccagtgcacacccccagttaagaaccaatgaagaatgttgcttgttaacaacctttgaaggctttttagcaaaaacaaagtgtcatattgggattcatctgtggcagtttgcagaacatatcaggggagagaggtgtgtgcaaggcatccaccaggaggccgttttgtgctggtctaggtaagaggagattggagctgacctgttgaagcaacaaagagaaagggaggaaggatcatcctagaagtggataccagttctttaagaagagtcctgagatgtacccaggagtagcaaagtggatgtgccaacccgagggaagagattagtaagctgctgccccctgagacagggctccatgagctgacaggttgatctgtggagatacactctgaaggtgctagactaggaagaggtcctctcaggccccatcccttcatcttcagccaaaggaagttcagcagtagctgcccctggcctctgttctcagtccacagctccaccagcccagttgcttgtgcagagggagaggatgtgggagagatgctgtcaacaccctccatgtcccctccacccaccctggaggccgcctatgacagttcgccataggcgaactgtttctctggttaggaactttctctggctacaggagtgtgctgcacccgagtcaggagggctggaagtgcaggatagttaacgtccccagtacagttttctaccaaggagagaccggtgagatggatagatgccccagctttctcacccgttgatgacacacttcactaccctctcctggagctccctgagatcactgcccatacaaactaattgcaccccaatgcttgtcccaaagtctgctcagataagggccgtgtgaatagacaggtcttcagttccagaaaagtgtatactcacacaggaaatatctctcaaataacatgggcagtgtatatgttatttttctggagggcagagggcatcatgaggaaggtggtcttcgtggggtgaatatcatgtttcctccagggagggctcagtgacatggagcagtgcttctcaaatgtccatgttcgcagaggttagcttctaactcatcaggtctagggtggggcctgagaatctgcatttctaacagtgagcatgtccagggaccacactttgagtagcaagaccttcacagcttcaagttgcaaaccagttttgaatgagcagagtagaagggggtttgcaggtgagaaggaactcttcaccatgagtacatttctatgaagatttctggccaggattttagtaagtacctgagccccttcaaacatttgactcccgcataaccttttcatccaaacaccattcatgagttgtttttatgccatgaggttaaattctttcctatcatttcaggggaggtccccacttgttgagttttccgtcagcctataaggcaaaggaaaagagtgatagaaaataaaaataacttgattcattagatggaattcaacttgaattcttagtttgttgactaagaatttgcagcctccgaggaaattttttttaattgaagaaaaactaatttttaaaaatctgaaaataattcgtttgtgactatttaacagaaggaaaaacttcctgagtgagcatcaaatactttaattacttcttaggcttcagaagggatggcttgctagtctttgtactttgggctttctgttacgactggttgacttagatttatttgtttatttagcttcttaatttcatatcctgtggtcctgaagaggacaatcaccaggatttaggggagtgtttttgtctttattcactttggaaaaatgtaaagattagtcctaagcagggttgattcaccgcactacagagggacacgttaggaacgagacagcttattcaagtgcttttgaatttgtattggttttttaaaatgtaagattatttttacttattttaaatctttcaaagcacttttttcctcagggccaagtggactctttgggaggagacctcgccgtctccatttgatcacataattgcttctgatgccagccagtctgcaactgccagtgattggcacagggttatttcatgtgcacttcaatcaaatttcttttcttgcctttttttttttttttttttttttttaagaaaaaatctcactgtggcacccaggctggagtgcagtggtgcaatcatatctcactgcaaccttcaattcctgggcctgtgatcttcccacctcaactcccaagtagctgggaccacaggtgtgtgccaccacctctggctaatttttatttttgttgagacagggtcttactatgttgtctaggctggccttgaactcctggcctcaagtgaacctcctgccttggcctcccaaaatgccgggattacaggtgtgagccatccatacctggcctccaaatttcactacctaacttgggagaggaattttgcattagcagttacatggttcatctgcctcaaacatttgttttgactctagcttttgcttgtttcacttttttaagcttggaaagaacaaacttagaatagtgtaggccttggcttccacatggatgttttgacaaaatttcaaggaagcaactggctttgtagtgctttctttgtcctgcttctccaaattccccaagtgcatgggtaatcacctctggttccctcggagtgttcgtggccagctccttcccagccttgccagcccattgtctgcatttggcatctgcgctggagtcactgtgtgctccagttccttaaggatacttttagtttatctgatctgtgctccacacctcttcagactccatttccatgaatgttttgggagaggtgaggaagaaaccttttctgctcattgttgcgcgttccccaccccaggccccgtctgatctattcttacatcacaactaaaaatattcttaaaaatgtgaatcagatggtatgactcccctgctcagaaccctccagtgccttccctctgtacttggaaccaagtccaaactcctgatgagcagcagggctccgcatggcctggcctttcatctgttgcttcccaaacgtgtggcctctggttggtttctggaactcaccatgcctttccccacacatgctggttcttctgccagggacactcttcactctcccttcatgtgcttagccccttcttagcttgcaggtctcagctaaatggtacctcctcaaaagggccttccctccacctataccaggtataatgctgtttgcctccttcagaatgcctctcacaggctgtgattactttaaacagattcgttgagatatagttcagatgccatgcaattaacccttttaatgtatacaattcagtgggtttgagtatattttcagagttgtgcatctattgccagagtcaattttagaacatttcattacctcaaaaagaaccaccatacttcttagctgtcgtaccccttcccctatttccaccagccaaaggcaaccagaaatctactttctttctctctagatttgcctattctggacattgtgtataagtggaatcatttatatgaaatggagccagtcctttgtgactggcttctgtcacttagcgtaatgttttcagagttcatttgtttgtggcatatgtcatacttcattctttttcatggctgaataatattccattgtatggatataccacattgtgtttattcattcatcagttgctggacattagattgtttccagtttttggctattacaaattatgctgctatcaatatttgtgtacacatttttgtgtgggctcatgtttttatttctcttgggtacatacctaagagtgggattgctgggttacatggtaacttatatttcactgttaagaaactgccaggctgcttttcaaagccactatactattttacattcccatcagtagtatgtaatggttccagtttgtccacatctagtccagcatttgttattgtttgtctttttgattgtagccattctaatgagtaggaagtagcatctctttgtggttttgatttagatttccctgaaggttaatgatgttgagcatcttttcatgtgattattggccatctgtatgtattttttggaaaaactattcagatcctttacccatttgatagttaggttacttatctttttattattgagctgcaagactttttaaaaatgtatcctaaagttcctattagacatatgatttaaaatattctcatcctgtggattttttcactttcttaatggtgtcctttgaaacacatgagttttaaattttgatgatatccagattatccagttttttttgctacttttgtaattattattattatttttattattattatttgaggcagagtctcgatgtgtcacccaggatgaaatgcagtagtgcgatctcggctcactgcaatctccgcctgctgggttcaattgatccttccacctcagcctcccaagtagctggggctacagatgtgtgctactacaactgggctaatttttgtgtttttagtagagacagggttttgttatgttggccaggctggtcacaaactcctggccccaagtgatccacctgccttggcctcccaaggtgctgggattacaggcatgagacactgtgccctgccagttatttttcatttccttttgaattttttgtttttgccatctccccgtgtaggctgcatgtgctgcgacggcagcgctgtgtttgccattgtagccccatcccctagaacagggcgtgatatagggcagcggtcagtgaatagctcttcagtgagttagtaaacaaagtggttctcaaaatgtaaaattcttccttgactcactaagcaaccttctgattgcaactgctttccctttttggcctccaagacaggaattctctggccctgctgacaggagccccatgttgcacagggcaactatgtcactcattggaaattaacatgtctgccctctgacttcagtatttctcccaggagcagaggatggaagttcttcacagctggatctgctgtatcattcagaagctggcttcagagcctgtgtagctggaagcctcgggctcacatcaaggaagggaatgccactcagcctctgggcacacagctgcaacttcccctggtgctgtctctcttggtgctaccctatactagccttgtcctgaaacatctaccccattcatttcaccctctctgctactatgtcactgcctctcccatcacagtattccacccaaatgaggcaaattcttatcctttcaagacctaccctagagtcaccttttttgatatatttgcttttttatttactccaccaggcaaagagggtggcaccctgctatgagctcttggaacaatttatttataagttccttatagcctggatcgtattcaaccaatagtttttccccctctattaaaatgcgttaatttggagtctttgcttactaaatgctgtctcctttttttttgagacagagtttcgctcttgttgcccagcctagagtgcaatggtgcaaactcggcttactgcaacctctgcctcctgggtccaagcgattctcctgcctcagcctcccaagtagctgggattacaggcatctgcccaccacgcccagctaattttttgtatttttattagagacggagtttcaccatgttggccaggctggtctcaaacgcctgacctcaggtgatccacccacctcagcctcccaaattgctgggattacagtcgtgagccactgagcccggtcaaaatcccttcttacctgtcatttgtattctccccattctgtgtctgacatcttgtaggtgtttgttagatgattggtgagtgaattaatgaatgtacagatggatgatgtataagtcctttcagagggaaactttgagtatgttaagaccccaggaaggcttatacttgatctttgtatccagaatgttgccaacattctggatacaaagaaaagcaccctctctgtgacttctcagatcccatctgcctctgatctttcatgacccctgctggattgactacatgagcctctttcagaagtttgactagcaaatcaacaaaacagttcaccctctgcatctctgctcagggatcaacaggagtgcttgcttatgtggcttcattccagtgggaggttcatattttcttagttatgtatcatgtagtcttccttgattcaagagtaccatgacttgtgtttgttctgactccaggactatccatgagtaaccctcagccaagagtgtatcatcagggcctgagcaagtggcaggagacaaggtatagtgtgaatctagtacatggaagagaatgtcttgacagctggggtctgtaattcatatgctgttcaaatgacaggccttttccccacacctgtgtgtattcaaagcaccatgtcatgttctgtagggagataggcaggggagttgggtcaggagaaggaagttaagattgaaggagaacatgcagaggagctttgggaaggaatgtgcccggctcacatcctggctccatcatttaccaactgggaaaccctgggcaagtgatataacttcacattccagtttcctcctcataaaaatggaaataaagagaaggtgtacatagagtttttagataatggatttaaaacactacctggcacacagtaaaccattactaagtagaggctatgtactccatcctacacgcatcagcagtggcagtccagcaatactcctataaggcacatgttatgacttcattttactggtaaggaactggaggcttagagaaaggatggttaatttgcctgacaacacattgctggtatatatctgagccaataatcaaaattgggacactaatgccaaaggttttacaatttctatgctgcaggctcaggtgtttttcttcatgggtaggaactttatggctcaagcccgaaggattcccctctgggaatacgactgttctggtaaggttcaagctgactcatcattgagtgctgctaataaagtgtttgctgagaatgttttctgttaactcattgagccaggttattaagaacctgtgctcacctctgacacctcagttgattggggaatttgggatgaagtgcttccaaaatttatttgaattctaaattaactaagtgagttaacgtggaagccgcttttaccagcccacaagggtcacgcttgttgtgtctggaagaaggaaagggtcttagaggaacacaaattgccagactgacagtcagatatggagacaccagggtcatcttcagtttaacaaacacatgtcagaactagaaagttggaagtgagacttcaaactctacctagcattgagcataagcaggtcactgaccacaaagatattctgttcccaaagagcaccatattcgtggtcaagtaaggccagagtctagactgacatcaaatgcttgtatgattgggaggaaggagcccgaaggccaaagaggctcactaatttcattattcgattcttccaaccactgcacgttacaaacagggctgtagcctgggtctactggccaagcttccggggctgggacaggcaaggtatgtctggatgagagaaggtctttgccaagacaagcatctcttgtgccaggcagaccagcaaatgagctgcttcttgcagccccttctttggcatctcccataagccaaggcctattcatttaataaatgcagactcaggagctactaagtgccaggctcggtgccagacactgagaatacggaaatgagtacgcataaatcaagtgtgcttttcatcactgtgtttttaaaaatgttaactgatgatttcctgatcctgagagtaatgtgcagatgctccttgaactatgttggggttatgtcctgataaacccatagttagttgaaaatatcataagttgaaaatgcatttaatacactcagcctacgaaacatcatagcttagcctagcctacttaaacatgcttagaacagttccattaacctacagttgggcagaatcatctggcaacacagccctccatagagtatcgattgtttaccctggtgatgatgtggctgacgaggtgctacagctcgctgcgctggccagcatcttgagagtattgtacagctttctaccactttccactgaatacctattgtttttacaccatcagaaagttgaaaaatcttaagtagaaccatcataagtcagggactatctgtatggtagtagaaatttttaattgaatcttctgtaatcttcagcaagaaaccctgagaatattgaacgtctttgccagacaaggaaaagtgggactggggaaaaggccagttatgtgaatcctcttaaaatagggtctaaaattttataataaaaatgtattttaaaagttttgattgagactttgcctgaaatgtgaaactgaaaattacgaaattaggtttattttatcctgcatttattcagtggcactcaaaacattgtaattataattgtcaaagatatcttagaccaaaggcaaaagattatttgctttattagagtctttaaaataacagtgccctaacttctgaaacaaaagaaggaattgagtgctggataggcagcttttgaatgtgaattttcctactatttcataagataacatcctttgcttcatattttgtctggttttcggtacaatcacaaaaggatcattttaacaatggtcacttttttctaagggcttctcttgatcttttttatttaaatctttgtcttctgaagcatcttaaagtagtatccaggagaattttgactccttcaacagttaactgatctaactctgccagatccagatttatcagtggttttgcagtggttttatccatttttcaacatcactttcattgatttcatgaaagtctgcatcttttagagcaagatttctgcttcactctgtatttgatttgcattgtattgtagtcagataatcagatgtctgcactagcagtcagggacattagatagacagtttgctcactggtccgcgttcccagtcagctaagagtctcataaccatcagccttgataaatgctaatgttaagttctctaagttaaagccagtgtaggcaatgattggaacttggaagcaatcagagcacagaagaagcctggtccctggaatctctcccatatgcatcctggtggataccaagtgcctggcagaagtcataggcaactcccaaccagagcgctctccactgacatgttgcttagagctggggacagcttagattagccatatctccccaaaatttgtatttttaattgaattgattttttaaattgaatccattttaaacatgggattttatttttatttaaagaattaccttgtgggtatgtctgtgactcttgggtgcctgcctggctgccaagaagacatgtggctccatgatgactctgctttttaaggttatgccctgggcatgatctgaaaccaggagaacaaagtgggtactggtgttgccttgaatgaagtgctcccctaatgggggaagccttgcaacctttataaactgcagtcaggactgttttctcttccttagtatggatttaaacaagaatcataaacacgtgagctttctcctcatcctccttttgttgcctctccccacctgggagcaaatgcctaggactttccaagtggttctcggtgccagcagcctcataagggaagagtattatctgagttcaggttcatcagaagcagcacccgagatggactctcatgaaggggatttattggggcaagaggagcgaagggagcagaatgaggaggggaagaaaccaaacaggcatgtgggctcagctggagtctgcttcacccagtcctatgggagctctggaacattaattgtacaacagagttggtcttgtcttgaggcaaaggggacatccttgggtacccacatcaatcagaggctacggaatgcttttggggaaggtgtcataacctcccaggcaaagcgactccattcaagctgttgtacttatctagtaaggggttctgagtggagcaccaccagcatccacacaaggagtggtactgcttgccaaagcccatgctctgatacacctctgggcctccttggaaatcacagtagtagaagagaggggtatagaattaaaaacatttggtcagggcagttgacatggccagtataaacagctatgttggtgctgacaggcagcagaagggtaatccatgacatcccttcctgtaacaccatcccggagcacatgagtcatgaaccataagctcagctctcttgttcctagagatgatgtctttggtttactcttttggcctgtcctcaccaagatccaaccagaattttgaaatttttatttgactgagtaaggtggaagagagaccagaaatagttaaataaatgctgatataaatgttacgttctagcatttgggaattaacaaaaataaggtagctgagcagcttttgaatgatcaaaagtactgttgtcttaggtcaaagctaattaaactgaggtttcctcgagttccagagtacatttttgaagacatttatttcacacatgcaaaaactgaagaagtctttggggcaataaatctttttgatttcttttttttttttttttttttttgagacagagtcttgctctgtcaccaggctggagtgcagtggtgcgatctcggctcactgcaacctccacctcccaggttcaagtgattctcctgccgcagccttctgagtagctgggactacaggcatgcaccaccacacccagctaatttttatatttgtagtagaaacagggtttcaccatgttggccaggatggtctcaatttcttgacctcgtgaaccgcctgcctcggcctcccagagtgctgggattacaggcatgagccacagcgcccagccaataaatctttacttcaagaacagacctttgacttaaaattaaagcttctctcctggtttgaaaggaattcccagtgaggtattgggcattacaagagaaactggaaacagagttaggtaagcatgtaatatatgtatatgtgtatgtgtgagatacacacacacacatacacttatatatatttgcttatcctgggacactcttgagactaattataccagaatgacagaaatgaaccaggaccgtccccaggaaaccaagagaactaaagtcatccaagactttggcttgctgcctctgatgtccacaggccaattagccaggatttagggtagtgtctacttgggacagttgtgggtgttgcttctggcaggaggaatatgaggaagaagatggtagggaaaggccatctatggtgaatcattaatgccatgcagttcttgagacagcatttgagaaattattctctggttttccttattgaaattgccaatgcctgttctctaggttctaagagcagccctcacacttgccatcacacagctatgtaaacacctatgtctctgctgggaggtccccacctcttctgaactctgagctctacgaggacagcgattaacatctctcagatatgttctctcagtgctgaaatgtggtgtgtgatacgacaactcagctacccagtgcatgctcagggcgcgttctgaatcctgtgccatttgcatgttacatacatgagcttgccatccatgagtgtttggggacaagacagaggaagaaaaccttgggggaagggctaaggaaaggtgctccttgacagtgaggacaacttaaacagaggtgtgaacataagagcaggcagggtgtgtgtagaatagtagcatatacgtgccacggggcaggggtggaagaaccacaacagaacaggatgggccaaaatggaagctgggatcttaagatttgagactttattctgtttgcagtggggacagacatattttaagaagcttcctctggcagccagccaaatggactgaaggggaaggaaagctcatagcagcagctaccaaacatcattatccggcagaatcactaattttatcactcaataattttatgtattaaaaatgctcatcccagaccctgcagtctctgtgtctactcagaaaagactcatgctgtgcaattagagtgtggcccaggaatctgcattttatttatttatttattttttagacggagtctcgcactctcgcccaggctggagtgcagtggcaccatctctgctcactgcaagctccgcctcccgggttcacgccattctcctgcctcaaccttaaagaggctcccaaggtgatactaacgctggcgatcctgggtctctgtgtgaataacactggctaagagcacagagagatgttagaaaactaatcatcattgagatcagttatatccgagactggatgctgaaaagatatattagagtttagttttatatttatatatctcttatcttttgtttaattgtatttgggcttttaggggttttgtttcattgctattttctaagtaagagtgtattgatgtttaacaaacaaacaaaaatatacaagttattaagttcccagctcaatgaactttcacaaaatgatcaaacctgtgtaacctgcactcagaactgccttccacttattccataattactgtcttgatttctagccccatagattatttaccttttatcacctttatttttggtgcatttgataatgttcataatatattagaataataagatatgtataattggataatttaagtagatatattatggtaaatgctcacatgtttttaccagttggacacaaaataaaaatgtttttcatccacctgtctagatgccttgaaatgttagtctgagctgagatgtgagtcctggaaattggaggacctctgtaccttctcttccaaaatctgtaaacatactgtttccgcttggcagtcttgatttgctttcagtgactctgagaagccctgtggtttgtgaagagcctcttggctttcctttgaccttggttggaagccatgtgcccaggtggaaagacagcagttccctacagcctttctcttctgtttctctcaagtcgctgtgtgcagagtccagcctaagctggctacacttggaaacctctcctcacccttgtaccctccccacaccctggggagacttgctggtggacagcccagccctcactgcttcaggctttaggaagaaaccctctcttttcttggtgtgattttcttagagtttgtctttcctgaaccaccaagatctgaaaaggcaggattagggtgtgggcttaggagaaaggggccaagaagatgacagggttgccttttcatccaaaccttaggaggtctccagctcagccatggcccagcccacctcaccaggactgccctagggtttgaacccaaagcattagttaggaatgaagagtggttttgtcctcttacctgtcttcccagggaacccatgaaaaagtgggcagctggaagggggctggagacggcctggtcagggcatctcgtcccactggtgcctaccgtctgagcactgctctgaaggactcgattgccccgtggagcctgctcccacacacctgccttttgtgcagccggcccatctgttggtgctttttctttcaggaggagatgggcatctcctgtgagctgctggaatcggacttcctcaaatgcagcgtgggatttcctttcatgaggtcaaagtcaaaggtaagggacacagacgggacccttcctcagcagcaggcccccagcccttccaccagccactgattccgccgcctccctgaggtgaggagtcctcccaccccctgcctcccatagcagctggggcggccactgaagccctgacatgctcctgtccctggctgtgtacaccggggtatactccggaggggctgcatcatatggtctttctcttcgattcacatgatgtaccccaaatgtgaaagtgaaggacacaccacagcctctgcactttagcacgtgccatttagttgaccttcctaaaataattttttttctgagacattctgtgcctctttgagtcccctagacaacacagaagaagatgtggtctgtcacctatagtcctgtcattcccttgggtgctcacagttttctgaagagaactctcaaaattctcaaaacataaatacctgtatcccacttcatttttaagaagagtaaagaaattaagtcactttggtattggtatggagacagattttctaagttcaaatagtatactacagcatcttcagacattcatggaacattgtagtatgtgccatcattataaggagatacaaacataggtaaaaagatgtggtgattggaggcaaaactagaatctaaaagaccaagtctgcctttggaaatggaagctattttccctgccatgaacagagtgagactccgtctcacaaaaaaaaaaaaaaaaaaaaaaaaaaaagtgaaagcttcatccttttctcctgcctgggtcatacactcagatcattttaatctccaaggctctttggtcccagtatctagtagctatttgtaaaccaatggtgagaatattctggtgagggagaagacttggtcatttcttagcaaatcacttgaacccataagccccattgaatgcacctcgatcttggactttccagccttcagaactgtgagaaataaatgtttaaaccacccaagctagggtaatttgtgatagaatcccaaactgactagggcaaaaaggtaataactttctcactgttagggtcaatgttgttcagtgctgtgttcacatatcacccaagataatctcatgaaccacctaaaataatcttagtgtaccactcccagtgtgaacatactgtgatttgggtaacactgccccaaacaaatggtgttcaccatatacatatcaggcacgtgtgggaatgtgggaggaacccctgggtaggggttataggaccaggctctaccacaaactgtgtgatcttggcgaaaccacagtggccaagtggccaagtggcccatgactcctcggatttttttctgcctctcttcctcattctgtccacattcaccccaggaggagggaaacctcaataagtgtctgcccttggaaaatggattacatgtggatggcagagtacaggccaagtcccattagactccaggtagggtgagggtggagataaaggaggacgaccacaatccatggacactattgcctatagtaatgtatgtggcacatctgcacacaaatttaattaaaatcttttgagtaacagataataggcttaactggaaaacttgcaacagtttccatttcattttaaactccagcctatatcacatatcagacctaagatgtgtctttctctctctagtggagtgttacattttgtcaaatttttgtttgtttgagagggagtctctctctgtcgcccaggctggagtgcagtggcgcaatcttggctcactgcaacctccgcctcccaggttcaagggattctcctgcctcagcctccctggtagctgggattacaggtgcccaccaccatgcccagctaattttttgtgtgtttttagtagagacaggtttcactgtgttggccaggctggtcttgaactcctgacctcaagtgatctgcccacctaggtctcccaaagtgctgggattacaggcgtgagccaccgtgcccagccaacatttattagatagagcccacagaagtatgaacattggaatgttggttgttttcccagctggtaatgctaccactttcctcccacatacagatgctgggacctgaagcaagactgactaaacctggggattggggggcatgggagcagagggtgattccctggagaaagcccaacaagtcacccagcagagacggggctccccgtatccgcagcccagcgtgcactcccatgtccttccaaccctgagggtcctcaggctccaggccacatgctaagcctcatggctatactttggcttaccttggatggccatgtatttctctctctcacagcctgcccagtttctgacattctgttcttccaggcctccatccctgattttggcttctcacccaattcttttgcctgtcatctcactgtgctctttaatgtttttaatttaattcagatctcctcccagtgctgactctacaccagtcaagaccctgcctctctcttccttcttgtcctcttcccgccctgtctccatgcctgccccccaccccacagtaagctgaccagtcccacagcaacagaaatttctgtctagaaagagatgtccatgttcactgtagatgatggtccattgtaatggaccaatgtccgttgctttcaggaaacattcagtagaattcagtgttgcaaatattagaccattgcctagaattcaccataatggaacccaaaggtttagacattgtataagttataggctctcaaaatttgatgaaatttaagaaccgttttgtccaacctcctttttttattgaaatgcaaagacagtatcttagccaagatcacagtcagtttgtggtggaacctggtcctgtgacccctacccaagggttcctcccacattctcacacatgcctgacatgtatatggtgaacaccatttacttagggcagtgccccctactcacaggatgttcaccactaagtggtacactagataattttagatggttcatgaaattatcgtgggtgatacgtggacgcagcactgaacaacattgaccctaacagtgacccttttcaccttagtcagttcagtcatctataacaaattaccctgggctgggtggtttaaacaacagacatgtatttctcacagttcttaaggctgagaagttcaaggtcatggtcccggcagattcagttcctggcgagagttctcttcctggttcataaacagaaccttctctatgtgtgcccatctggctttcccttggtgtgtgtgcatggagagagagagatctctttgtcttctcttcttctgagtgcactaattccatcatgaaggcctcaccctcatctaaacctaagtaccttccaaagaccccatctccacataccatcacataggggggttaggccttccacatattaatttgaggagtggcggggggacacaaacattcagcgcataagacttttcaatagtcttccaatcctagccacactcaggagaacgtctccaatcctgctagcacatctttaacacttctctatcaccagcaaatctcccttttcaacaaagatggagtagaccttaggctcagaggcttccaaaggcaacagagttcagcattgctctgttttcattgtgttcatttttacaactaccttctctttttggcaagtgatcctggattcccatctatgacagtgatataaattgttcttttaaaacaatctttaaactaaaagagtaaggcaacaaaaatatgaacaaatatcccaggtgatgtaatttgcagatgtggcagaaattgaaaagatggtatgtgagtgaaacttagaaagtcccggttaaagagtgtaaacgcatcacttcctaaggagagcctcggtggcggaacaggagcagcaggtctctggccagagtatgtgtcaggcttggttttactgttaaagctgtgactttggcctgacagtcagaaagctatacataaaactaaagcttatcatgcaaatgagcttccagaggtcataaactgcagaagatggaagagaacagtttaagtttggaatgcctgctgatgccaaataccacttcctttttcactagtatgaattcagcgtgatctttgatacaagccacctgtctggggaagaggaagttctcagcttcattgttactgctcagaggtaaggggggggtttaaacacttttttcaaagatgagagatttatgggaccaggaaaggatgtgtcctggttaagctttgatgaatcccaggatgctgaggaggaagaaatggttactcagtgataaagccttgagccgcaaagtggaattggatttcttggggatggtggttgcctagtgctgcttgcatagccgccactgcagattgaactgagaggaactgggcatcagccactcagaggtgatgattctacagctgaggagagacaggcccaggggggtgaggctctagtccaaggtcagttcccacttggctgtgtatttcccagatcagacagatgtcctctgcaaattgtctggctgggcccactgctgcttttggacatggtgctgtatcccttgatggagtgggcaggtcacctgcagcctgagggcctggctgagcctgttggcagaggccccaagagatgctactcaagagagggcttaatttggaagccaagtggatggataggaaaggggatcgtggggtggcagcttctcccctcagtagcatgtgcccgcccctctccaggatagccatgagtgcctgtgggggcttctggggagttacaagatgccttctccagggcagatccagcatgccttgaagcagcatctaggtagcacttggctggcagctccagtggagggaggggcgttcaggtgggtgaacagggagacacaagctttgattggggtggtggttggacacccaaggcaaccttttcattttcacttggaaatgatcttaaacttaacagaagtcttacaagaatagtgcaaggaactcctatataccctttacccagattcacccagtgttaacattttgcctcatctattttatcatcctctttctatataattttttttgttaaccatgtgaaagttgcagaaatcatgcctcttgattcataaatacttcagtgtgcattcccaagaatgaggctgttctcttaataaactgtagtatagttatcacattcaggaaattgaacattgacactatgctattagctaatccgcagtttatgttctgattatgccagttatcccaataatgtctttttagccgcttctttttactggtccacaagacttggttattttctattgacactattttcaagatcacataatttacatcacataaaacatgactgtgatctaatagaagcctatgcaaagcatagatagggtagacttcattcccattgcacaaaatccagaagggcttcagtggggaggtagcatttaaacagaggagtctgttttcaggctgaagcaacatgggcacggcagtgaggctgtccatggggcaagaagccctgttacacctgtgtaggtggtgggcacgagagtgtactggggattcgtgcaccttctcagaagaaggatggggagcacacaagcacagtgggaatggggctgaaagaggagcctgggcgctaaaccatgggggacaaaggtcacctagaaaatctgaactatatcctgatggcactgaggagccactgaaagtttttgaaaaggggagtggcacagtgcaacagcttggccccagagcatgaggttgatgaatttgataaggggcggcagatgcccattcaaacctgaaaattctcattctcttgccatttcttggatccacagaacactcgccattgttgggcagacccatcaatgtgctctcttggtccttccacacctgaggcagcctgtatgcctgggaaggaatgtgacatggaagagatttcccttgtcaaaatagaagacacttcctgcctccacctaattcagggctaatcataacagtcagagagggcagggaaccagtattgcaattgtgaaaggttcatttgttagaataacatgtccacacagcagcagtgctctggttttggatgcatattagaatcgcctggggagctttcaaaaatatcgatgcctgatctatccccagagaccctgaccctgcctctgcctggggtgagacctgggcaatggagttttcagaagggctcaccaaatgattctaatgagcagccaaggctaagaaccactatttataatcccttactctgtgctgggcacattttcactcagtaaatatttattgtgcaccttatatttaccagttgcagtgctaaatgctgggcacatgagaaaatgacagtaacctactaaattcaagaacaccccctatgtacattaacagtgctgcatagcttcaggaagccctaggatctgtagcttcaataatataaaaatttctagtttcttaaatcacaaatgttaagatgaccatattatcttctaagcacacaccagaatatttcagatgctcatttcttttcaggcattggtgaagatatggtctgactgccccggagggcacccacacacagcgcttgactccctgctatgacggaaagatccttaaagctccttatcttgaaaactacagttaaaatctcaattgttcctttcttccatcaccaccctttgaaggtctctttgcctacttgtagatttagggggacataacattgagactgagcagtttcttgaacctctcctctcagcagccaccagcctggcttttgcagaccactggaaagtatcccagctcattagcttttggaatgacgggaagccttttgatgtttgacgtctttatctcaactcttcaacttagctcattctggagcagtcacacgatgacagatgagacggttgggcctaagccggccaaacaaacggcagggcaagacctggcaggatgctggggtgggggcgggagtgggccaggatggtgttaacccatccacaggggagtcgcctttggcctgcccacagcagtgatcccaaggcttttgtcaccccttgggaaaggaaggacaaggaagtcaggctgtgtgggcacctgatcctgctgcttttgcaaactgtggatgcccctgagggactgatgtcaccccatgtaggaagacagatgaggagccagggcagagactgtggccctatggggtcagcgtcacacagcaccattgtttcagaacaataggagggagaaggagaggggatgtgagagctatttaagtgctgttgccattcagcacttgctggttgagagaggaaggcagtggggcagggcttggagggggcagagagagggcacagagcagacagggactcagcagatgttcagggaacggcgtggtggggaacagtcaggatgagctgagccagcctcagcaggtctaggggactcttttcttccgcccatgcagggtgaacttgggaaccaactgtgaatgtaggttcaagaacatgtacccaagagccacgcattttcccaaggaataatgatcacaattcctattagaaatttaataaagtaataaagggaaactaggtcttctctctcttcctcctgttccttctcctcccttcttcttttgctcctcttccttctcgctcccaaatctggcatcaggagcaggagtcacagctgagagagccctagtttgaagtctgactgagctggttggaatctcagctctggtttgcaggggggccttgggcagttacctgatttatctgacttgctccttacctgtcaaaggtgggtgctccatctccctctggggttgctctgaggtctcagtgaggccatgctgagaaatgcccggcatagtgcctggcacatagtagccacttaacagcatcaattccctcatgttcacctttccagaatgatctcacaagaatccccgttctgtgctttctcacccggaggccttatgtggatgtattttagaatcacctggggagctttcaaaaatatcgatgcctgatctacccccatagacttgctatagccagggtctatagcgagagcttccatgatgtttatagtggtaggtttggtcagggcctctttcctgggcttggctgtccatggatgatgggtggtcctttcaggtgagacatagctgctgaagtctagcaactccttcctggctgcaataccctaacttcattggtccattgttcgtggaacaggcacttacacaagtagcacacacagtaggtgccctgcccataacccctcagccctcacccttcccaatctatccgcaaactgggcagattccggctcccagcaccagccaccctgctgaggctttctctggccagagcccactcacttgcctgacaggcaggtgccagggggttcattccaccccacccccacccccagcagcagcaacagcagctctcaggagtcagtggataaaggcctggctcccatgccctcagctaggaagactgactctgcctcacagagtccccgcgagactgggccctggctgccgacagcacgaccctcctgtatggcatgcctttattgtctcctttcctttgctctctcccttctccactctccagtcctactggcatttcctggggccacctctcgaataaactacttacactcaaatctttgtgtggaacacaaccaagacaatagagtgcccttgatagatatgtacagggaccaaaaacagactgaaggcaatgaggtgccatctgcccttggagaatgtagagattcaactctaaagtggaacagagaaagcccactgctggacagctagtgttggccagcgttcattcattctcctctctctgcacagtggcaacacggagcgctctgaatccctgcatgacaacaccctcgtgctgatggtgccactgatgcacgaggtggacacgtccatcaccgggtgagtagcctggtcctgggttgccacaacacaggagtgccctccagtggaacactgtgcttctcatatttgcatgtgtagccagccaggagccaagggctgtgccacctccacttcctcccagccttgaaaagcaggatgaagctttagctgcagtaactcatacactcctccctccttgttttctcctctgtcccacctacccacccacctggtagataatctgagaagtttgatgacaagtttaagccccataatttctttgaacattccatatacctttatgtgcatatattctcatccgcccctagtccctccagaatgctgtatggtaacaagcagcatggctcctgggattaaaatctcagctggaagttgctgggccagagattatcaccagatgtgtctccagtcctggctcacaggaggaccactttctgattagctccacaggcagtgctggctttgcttgtttctgttaactccctctgcagagccagaggtggcttttcctgatgtctataatggtctggaatgggcagggaaccatcccatcggccacactgtctgtctgggtcaagtccacggtcattcagtgccgctggcattgttggaaagcaggaccctgggctgcagtctgtggagacctgaaacaacctgtgtcagttttcaaccaaagccccagcttggaaaaatgagaactccatttctttccagcttcagaaaacagagtgcatacctctttgatagtggaaaaaagatttacacaattagtttagatcaggtgaggacccactgaacccttgacccaaatgcaagctgaactttctggaggttcacagtttctaatttttcggttttcaagtgcttctgggtctcagccttgattagcagtagaaatgttgatcccttgcagggagagccatccctgcactagcccgcactgctgggagccagtggaatgagtctccaagcattcctgctcctgagcttttggcatttttggtcatgttttttaaacatgaggtactgatggaatatatttgcaaattagcatatttttgcctctgttcacagctctatttttaactgtatcatttatttacttgtctcatcaaaggcacagcaagaatatacccagaaccaagccctatccttggggacaaagagaaaacattctccccaccacccccagacacttgatcatgtaatcagtccttagaggaccttgttgggaggtgttaacagcccctgatgaagccatcagttaaacaaatgagtcaacctctgatctctccaggaacctaaaacagctcttgccatttggtaatgctgggaactcactaccttactaaaataatgcactaaacattgaaaatggatgagttgttgtctattcggacttagtctcaaaaatctgccattgttgtgtttaggtgagtgagtggcctccagcatctagaagtcgatatttgtctgggagtgtcagtcagagctttgtttcttctcaggaatgtgttcatataagcaacattgaaagcattgctgcaaactgagcttgaattcttctcacctcttatgtagcctccgaaatccaagggaaaatgctatcaatgaacggattcagctttcaaatgcctaacttctagtcatcttggcagtctgataaatttaagttttttaagtgaatttgtcatagagtggggtttaggatgccaaatacataactcatttatatttattttttaaaagcttatgatcatcttcttcaacccataaaacatttttcgaatgacaaaacagaaaatgtatacttttataatccagtttttaaaaagtcaaagctatgataatcttgtcatttcagaaaggtaatcccagtgcatatttctccatgcagcttattgacgtaacctaagatgagaagacactactattcatgcctggtcagaaagcacagactggctatgtaacagccccagcagggaagcactgggtgcaagacactggattaaattgagacaaatgtttgcttctcagaatggcagtgaccatgggtgcttgactgtgggtggggatgacagatttcatgctttcctctttcagaatcatgtctccaacctcctttgtatatggcgagtccgtggacgcagccaacttcattcagctggatgacctggagtgtcactttcagcccatcaatatcacccttcaggtacccactcctggagacctcctctgtccgtgggggctaacggaagggcacatgggatgtctctcctacagagggctaagctcttgtcaggagaaacccttctgtggttggctggtgtggtgtgtgtgtgagatctgtaaccacacacagaatgaatccttttcgatgcctggtactctgctgtgcaggcccctctgctttttcaggatttggaaggacaggtccacgtcatgaatgccagttttccccaagaagccctctgtgtggtggaggcctcagccaatgtcccagcccagatgaccccatgaggacccctttctgttctccatcattccccaccttctgggcagggctgcctcagaggatttgctgtgtcccttcctcctgagattttcttgccagctcatccaggagcccactcctcctgcaggggaacagcctttcggaagggcagttttataagaacagaggagtgtgagcccctgtgagcccccacgggaggcacgctgctccctcactgagccatggctggcttgcccaggcacacaggcatcatttccagcaagtccacttggtgtagactgtggacctcatgaaggacactgtttcttctcttagttgggggtcagcaaactttttctgaaaagagccatggggtaatttaggctttgtgggccatttggcctctgcagcatctattcaaccatacttctgtagttcaaaggcagccatagataacacagaaacaaaattttagttccttatagacaatgaaatttgaatttcgtataattttcacatcatgaaatgtaggcccaagcgagaaaggatatcctgaaggtcccagagctgggagaagccgggctggggccaagacctggcggcactggccggaccctgtgtggatgaagtgaaggagatgggcccaactcacccataggacacaacagtccatatctcctcactctctggttctacctcccagaactcttctctgcctcttgcgtccttccccatggagagatggtttcccactctggcattcactgctgtggctaaataataattattttctttccttgtggcctctcctaggtggacttaggggatgacaaataatgacagggtgagggtctagagaatgtggcagtaaaacatttgtgggctctgacaaacaatggtcttcctctccccagagtattctcccagcaacagactgcgaaaccatgatacataacacatgtccccagctcacagaggatgtgccttctgaccaactaagcccctgctgtcacaccctgctcttgatttacaggggagaaagggaaggatggggttagagcttgtttttgagacagtagagtgattgctgtgaacagcacctctgcatttctgaattgcttctcagagttattttatttttctcctttgcttttcgtaattgggtaggaaatagataaagacctgatgggtttatttcatcttagttgtttctactctttcctactcttatagttttgggggtgtcttgcaattaaagatgtagttcagaaaattatttagaagggttcaagtaacacagaccatgtaatgaagagggtatgagtgttgaaagaaggaaaagaagaacaggggttgcacagaatataccaaatgttcttatcaccctctggggaacaaaagaaagaaatctgagggtatgcagcttatccttccagttgtttctctgaaggtaatttttacagtgagtttaaagtttggtattcaggcaaatagttttcttcacatctgacctgaaataggactcaggctagagaatccagccctggggaatgagtgattggcatgtcccttagataaactcctccgtgatccattgcctcaggaagtgcacagcattcaatccagggttgagagagttgggtctgaaagattgatagtgtgtgccattgattagaaggagatccttctgtgctagcaaagcccactttttccttgagaattgtctgactacttatttattggtataatggttgttattgtggttgtcctgcaggaaggtcactaaccagcttggcagtgataatgaccagaaggtgaaaatactgtggaaggaggccaggaatacggagaaaatgtttctatatttccttattccagtaatattgttcctgaaggagaacataagactttccatatgaacagatttttctatgcttttaaaaatcggttattcaacaagctacataattgtttaaaggctccactgccattgtacacaggagaaaggcagaaatactagtcttgggcctgctttttacatttcatcatagtttttaaacagacacattaatttctcgacaataagaggcttttttggcatcaaaatttaaagcatttccccacctgaaaaacaatggccaaaaataatgcagatattacacatgaacatttgcagagaatccagtataaagacatttgttaaaaataaagatggtaatacaagctctcctgtcctcctggctctgatgagtgaaatagtgcaaatcagcatccttttcttcattgcttaccccattcatgcttgaaatgggatttcccagacatgccaggatgtttctttttaattctgtgcactcatgtttcacttcaaattagttatttcagctatggtcagatattccttccttttctatgtcttcaggttgtttggtgaatattgttcttttttgaatcaggagttggcaacccactcatctgctctatcagtttttatctatttattctttgaagtggaaccaactattgcagaaaaccaaagacacagttttctagggaagagctagctggagctagatcttcatacatcctgtcatgtgtgaagacctggtaagatttctggctttttgttggctctgcccttctgacctcaacttcagagttgcagattccctggattctctctctagtgcccaggccaccaagcagcatgtcattccttcctctctcctacttatcctttttaaacatttagttttaaattgacaaaacttatatattttatattttactcatctttttaaaaataacacctttattgagatatgattacataccttaaagttcacccatttaaagcatacaattcaattattttaatatgtttacacaattgtgaacctgtcatcatcatctagttgtagaatatttttaaatttttttcattttaatttttgtgagtacatggtaggtgtatatatttataggatacatgagatgttttgatacaggcatgcagtgcataataatcatgtaaaatgggggtatccatcccctcaagaaatcccttgtgtttcagacaatccaattatactcttttagttactttaaaatgtactattaaattattattgactatagtcaccctattgtgctatcaattgctaggtcttattctttcaatttttttaatccattaaccatccccaccaccccccgccacagccatccccccattatccttcccagcctctggttagcatccctctactctctgtctgcatgagttcaattgttttggttttgagttcaattgttttggttcaattttgtttgattttcacaaataagaacatgtgatgtttgtctttctatatctggcttatttctttccttttttttcttttttttttttgttttgttttgttttttgaggcagtgtctcactgtcactcaggctgctggagtgcagtggtgcagtctcagctcattgcagcctcaacctcctgggctcaagcaatcctcccacctcagcctcctgagtagctgggactagagttacacaccaccacgcctagctaattttttttgtggagagggggtcgggttttagatacggggtttcaccacgttgcccagctggtctcaaacatgcctgcctcccaaggcttattttacttagcataatgacctccagttccgtccttgttgttgcaaaattttggaacatttcaatcacccccaaaagaaatttcggccttttggccagaaccaccatcttccagtaattcgccaaaatgtcgaacacaaagggaaagaggaaaggcacctgatatatgttctctaggctttttagaaaacatggagttgtttttttggccacgtgtatgcaaatctataagaaaggtgacattatagacatcaagggaatgggtactgttcaaaaaggaaggccccgcaagtattaccatggctaaactgaaagagtctacggtgttacccagcatgctgttggcattgttataaacacacaagttaagggcaagattcttgccaagaaaattaatgtacgtattgagcacattaagcactctaagagccaagatagcttcctgaaacacgtgaaggaaaatgatcagaaaaagaaggaagctggcggcacagtagctcacgcctgtaatcctaacactttgggaggccgaggcaggcggatcacctgaggtcaggagtttgagaccaacctggccaacatggtgaaatcccgtctctactaaaatacaaaaattagccggggatggtggcagccacctgtaatcccagctactcaggaggctgaggcagggagaattgttcgaatccaggaggtggaagttgcagtgagccgaggttggcccactgcactccagcctgggcgacagagcaagactctgtcttaaaaaaaaaaaaaaaaaaaagaaggaagccaaacagaaagatacctgggtccaactgaagcaccagcctgcaccacccagagaagcacactttgtgagaaccaatgggaaggagcctgagctgctggaacctgttccctatgaattcatggcataataggtgtctaaaaaatgaaagacctctggactgtttaaaaaaaaaaagaaaaaagaaaaatccttaacccattgacatagcttcttgtattaatttcttattgctgctgtaacaaattactacaacatttgtggcttaaaacaacacaaatttgttatcttacagttctgaagaacagaagtccaaaatgggccccgctgggctaaaaccaaagtatcagggcctgtgttcttgccagaggcaccaggggaaaatccacttcttgcctttgccagcctctaagggctgcctgcattctttggctcatggcccccttccatcttcaaagccagcaatggctggtcaagtcttaggatgttctctttctgatctgacttctgcctcttccctatataaggactcttgtgagtacaatgtgctcacctggataattcaagataccctctttattttgaggtcgcttgattagcaaccttaattccccctggccacataacattcacaggttccacagatgaggacatggacatctttggggggcctgtcatgctgcctgtcctactccctattcttcctgctccccagccctaggcaaccgctaatctactttctgtctctagagatctactcactttttttattcctctgcatattctgtttcttcctcgagtttcatgttcagctttttcctctccctccttgctcttactggtctctgtgacctccatctttttcctcatttctcaggaaatgattgacttctgaagacagaaaatggagaaatgctagggaaaacaagagaggcaaagttttatagaaccaaatgctgagacagaagaggggtacagttgtgcaagtgatgagctgcagattgcctggaaaccaaatcagctggctcatgtagtaaaaacagccctttctgtatattcgatcgcttggttttgggatgacccacttggtccttgagggcctcagttacctcaaactggcaaaggaaagaggttggaccagatctgtgggtctcaagtggtggttcctggaccagcagcagcagcatctcctgggaccatgttataaatatgaatctgccagccccaccctagacctactgagtcagaaactcggcatgacccccactccatacccccccaccaaaatgtgttttaacaagcccctcagatggttctgatgttttgctgaaatttgagaaccactggactagattatgatgtctgagttctcaccaagtgtaatagtctatgagtaaattcctatgcatgtaaaaagaaaagttttagcaggaagaagacaaaatgctgaaagagaatatggtaatttcaaagtttgagatttttagatgcatgttagaagtgtttctattttgttgaaatttcccgtcattcagtagttcactttacttcaagttgtgaccttccagatccgaaccttagagtttctgtatgtgatttcaaagaatcttagaatatatattgcatgacaggaaatggaggtctgctattttccactgagacttgctgtgtgtgttccacacccacaggtctacaacactggcccaagcacccttccagggtcatctgtcagcatctctttccctaatcgactctcatctggtggtgcagagatgtttcatgtccaggaaatggtggtgagttctccatttgttttcactattgctttcagctttgagccagcccattcaaattttgtattccaccctaccctgacatccaccttgagggtttggaaaattcaactcattctaccctttggagacatatctggagaggccaggggacctgtgatacctgaatttctacattgagaccatttggttaatgctgtaagaagacctctttggagatggggaagagttaattacgaaccagctcctgggatggacttcgctggctctgggaacccccagcagcatctgcagttgcatgcgtctgaatgcattttgctgagtgcattttgcacagggaaagtgcctgcagtccatgttgagaggattgtgaaagcattgctctctataggggcacgtgaaggacattcagccaaagggacagtttttccatagatagcttgaaaatcagggcagcaaggcccatatggagcaggtgaatatctgagccgagagttgaagaggacacagcccacagggtggaggttcagaaaacattgtgtgatggtgacagtaatttctggcattgctgccctctgggtcatgtggactgaaaaccagacgcatgtgaatgttgaatgtagaacaggtcactcctcccgagatgccagctcagatgttaacatccctcatgatgttccattccagttccatggcatccccttgtctttgggctctgctgacccagcagaagaaagccgccagtgttccgcacctatgatgtactatggttggaacttagcatgaggtgaacaaaccacacaggcttctggctaccctcttaaatattattaaccatgctgaccatgccacatttccccagcatctaggagtgttctcttcctagagcatgctttctgagttgttcacgtgaacatctacagtgttgcaggagcctttttttttcctatgggcaaaatcatctattgaccaaaacaagacatttaagtcactcagattctgaaggtaccccaaaaccagggataccccttttcctctttactgatcatcgagccaaggaaaagccactggaagggacttgggctcacacttacaaatagctggcttgcatggaaggcattagaagtggtttcctgaagacctggacaactgcctggctatcgttctggctgagtggaccctcagatacccaagtggtgtgagctggctgcactctgttctttgggctctgagaaacaaatcctttggattttcaaaactatatttagaattttcataaagtctgtaacagacttggccctaggatggccaagtctccatctggatagcccagcctgtgatcaaaggctgtgggcatcttcatcgtatggaaaagtaaattcactggcacatctcactaagcaagtaggaaagctctctgtgttcttataaacgatcaccactgagcccagaatgacaacaagagtagaagcataaaagcgagtgcatgaggtgctgtagtgaagaggcgagagtccccagatacttgtttcagaggcccacagctggcacaccctctgccttaaagccctcggcaagggcctcctgtggctccgcccctcccttgctcagcagggcctgagaatgctcactgggtcaggtgtgattcagagctcatgacggtttccactttggccttatgggactttgaatggagcagggctttcattctggggatttgggtggcttggtgcaagtgaaattcagtcctattaggagaaaccagcactcattctctgtactgcactaggaggtgaccctttggcctggtggcattccctccccacccccactctcagccaccaccattccccaacctccaaaggctactgaacagctgggcaccagctggacatgttaagccaactgaagcagaaacagattataggcatggagggaaggctcatctgtcattcctctccacacccttgggaccctcaaattgtttctccctctctaacagtgcccttggtgtctgtattgcctgtgatcatcatccatagagcataatgaggatgggcttactcgccctatgggccctgggctgtcaccctacctacggacccacgtgtggcacagttttctgacttggttcagaattcatttagaagtctctggggctgcttctggggtccctgggcaggaccaacctgcctctagctttcaccaaagagtcttttgtgtttgcccaaagcatttcttgaggtccagctgtctgtaagtggagagtgtctggcttatatatgggaggtttttacggggagcctaatgaagtgtaaccactccaaactcccagccttggctcgtgatcttctttccttgtagctaatgtctctgagcccctctgctgtgcttgtatttaccttaaaaacagagccacggtggtggcctgaggaaagactatcaattttcactgcttcccacccacgggggttgtgtggaccctactctgacttcccacagcacagaaaaaaaaggaaacaggtcactgtggacctagtgtctgtccatcaggaagccaggttgtaatgatcatgaaaataatagaggggaagaatgacagacctttctagtctatctgaaatagcaaaattactagtaacaaatcattcttgatttgttcacaaacactggctcagcaagtacctattacgtgccaggctccaaggagaggaataagtcccacatctgccccagaactcactgtcttgcaggaaacagatacataaaatgccattgtaataccgtataacaaatgcaataatggaggcatgcccagaccccaggatgctacaaaggttcagtgcttcacaaaggaacctcttcaagtcagggcttagaggatgtctagttcaccaagagaacaggtgaagaagagaacattccagatagaggaacagtcaccacttgtgagtgtatgatgagtatctgctgtgctgggagctacacccggttctccattctgtttgcctagctcttatacaaataggcaagagtaagtgttccgtatgccttctgcagatgtacagcagatagatattttggcagaatgacagagagtactgaaccacagtcatttcctctgtcagtttgtaaattaatcactcttcttgggtacatcgtgtgtgtgctgtagacctgaaccttcctacctgctgacttaggcatggagaaggccaagctccctgtttgatactagagtctaactacatgtcatggacattgtcagcaaaccacccttggcctgctgcaatgagcagtagctactgacctccctagcttacttttttccttctattggacagtcattctaaaaaactcacctgatttccaggaataaaatgagtgagccagacagcttatgggaggcaggctgtgtccacttgctccttagagatttctttttgaagtgaagatagatcatcttctcaatttttcagaacagacctgaaaaattgaaccacttcactttattgccattcttctgcagaggcgagccgtgtagcatagcccctgagcacaggtctaagattgcaccaagataacacatctgtcacaagcttcatggcttatgaagggaagagggtagtggtctttccaaagttaagttttactcacaatttctgaaggttcaatggaagagatgggagctttatctcagactgcaagcttcacttgatggagttaaaaacctgtatctgtgagcagctttctcacactggaggagaaggctttgggatttggctcttgttaatatgcaagaaggggaaaagtcagaaatgatagctaacagggagtgaagggctagaacttttattccaggtgaaagtactggatttttgaaagaactctagtgttagtccagaagagatataaaataaatatcataccattcattcctcctcctgcaaaaccaattgaaaatattggcctctctggcttgttgttttcttgctatggggcagtgattctaaagaactgacctgatttccaggaggtaaaattgtagggatgaatgataattttctaaggagatatatcaatgtctttgccatagggtaccattaggacattgacttcaatatggcatgaataccaacatctgttagaatattccaagttggtgccaggactcatattttagtaaactgtaaaatcttccctccccatgcttgtacagtagacagggctacccatgatgtacgatgggtatcccacaatgagtcagttgatgtgggaacttcaattaatttatagtgggactgctcacatccctatgaagaaaatatgcacctgatacatcactgaccataacaggagcttaaaattagacataaatggaggaatgaattgttttccccaaggatgacctggaggagcttcttaagttggggccatcaaatcagtcgatataatccaaagctaaagagtaaagaaattactcctgaataactgacccccccaaaaaaatgaataccatttattgctgtcccaaggctttagtagcctttttcatgtgctgtcaaatttaatccttatggcaccttcataaggtaagatcagcatcccaagttgaggaaccaagcttcaaggatttgcccaacctgacacagctgctaaaaagtagagctgggtttgtaaccaggtctgactccaaagttcacgtggttcccattgtgctgaattgcacactgctcctgaaagtgctgcccactccctaatcaccagaggcaggctcagtcaataggacagacagatgatgagtagacccccaagaatcacccaccagaggaggagcatcaacaccagggcagagaggcagcaaccgcaatcaaaagaactaataccagagggtgcagtaacaaggccaacagaaggcttctgaataagcaagactgatgtcttcagagcaatgcaaaaagacagtgtttccatgaaacagaataaactagagatttgtaaattcaagatattgatcattcaaatgaaacttcaatataagccatagagtagaataaatattaaagaataaagtaggggattcgaaacttggattttctgagaatgtattgcagaagaacaaaaaagccagttaaacttattcctttttttaaatagcaatctggaatgaaaatatcagatgatcataatataagagttagaagtcaagagagatggaaatgaaagcaagtcaagattcttgtcttggggggacaagtttatgtaccaattagctcaaggctttggtaaaataaatgtttaaatatgtaaaattttaagggcaacaaaaaacaatgtaggacatccaaaccactaaagaagaagaatttaaaacataattaaattcaaaacaatccaaaaggaaagaatttatgaagaaaaaaataaatgtataataagatggaagtaataaacctaaatatttcaataatcaaaataataattaatggattaaatgccctaaagacactctcagattagaattttaaaaatccaagtaccaaataacttgtaagaaatacaccttcaaagttacccagaatgtaaggcattcaaaaaaaaaaggcaaatattaacccaaagaaataaagtatagcaatattaacagcaaatgaagtataattaaagcccaaaacccacaaacattaaacagagcaaaagaaaatatatttcagagtgttaaagatttagtccactaagaatttgtaacataaatgaaattttatataaccaacaacacagctttaaccatagaaacacaaaaagaaattgacacattcacagtcattgcaagaaaatttattgctttcccctcaaaaatcatcacacaagtaggagtaaaataatgagtatttgaataatgcaactagagttgcgatcatttatatagagaccaagacagaatgagtcagaatgtctgattttcattactgctcccttgtttaccagctatggcaacctataggaagttaccttaactccccaatcttattttcctcatctgtaaaatgaactagtagtagtacctatctcacactgtaaggactgaagaaactaatttatatggagtaattaacagagatcctaacataaataagggaatgcacattcttttcaaatgtgaacatttacaaattattcaacatacaacaacacaaaaataagcatcaatggaatttttaaagtcaaagcagtagaagccacagtctctgaccacaatgcaataaacttggaagctaaaaacaaaaggttaggcaaacaaccaaccaaaaacaaatccacttgggaaattttaaacaccattcaaattaactttttagaaaaaaaagaaatcaaagttgaagggatgaacaaattagaagtgaaagacagtgagcggttgttcatatcaaaaccaatgggatttagacaaaaccaacacagaggaaaatgccactacttacatgtggaaaatagggaagactgaaaataagtgaactaaattgacaacataaaaactagacaagggacaatgaaataaacccaactcaaagaaagtaaaatgaaggtattattaaagacaaagcatatcctgaaatagaaaaaataataacaacaaaagtattccacattagcaaaatcaaaagctgtttttttgtccaaaaaaatagacaaacctgcagcaagcttcaacaagaaataaagaagagcgatgatgccaaaaaacaacactagaaatactttttaaagaagtaccatacttatatgaagatttaaaatttataacatcttttgagctgggcatggttggctcatgcctgtaatcccaggactttaggaggctaaggcaagaagatccttgagcctaggagttcaagaccagcccagacaaggaagtaagaccttgtctccacaaaaaataaaaaacaaattagccaggcatgtggcataaactacttgggaggctgaggtgggaggatcccttgagtccagaaggtcaaggctgcagtgagccatgttcacaccactgtactcaagccaggatgacagatcctgtctcaaaaaaacaaaaacaaaacaaaaaaatcttttcaattgtattcacacaaagataaaatctgaataaaatatgcatgaggttaaaaaaaaagtccaactagactatcttagaaaaaaatgtaaaagtagacaaagacctatatcttaaaaaaaatcaccgacccagatagctatataggcagattctagtaggctttcaaggaatggataattcttatgttaatataagctgttccagagagtagaaaaagataaagcaactcattccagaaaactaacatagccctggtacagaaaccagaaatggagagcgggcacactcacgcaaaaataggaagcagtgagccaaactcactttgaaaacagatacaaaagttctaaataaattgcaaattgagggccgggcgcggtggctcacgcctgtaatcccagcactttgggaggccgaggcgggtggatcatgaggtcaggagatcgagaccatcctggctaacaaggtgaaaccccgtctctactaaaaatacaaaaaattagccgggcgcggtggcgggcgcctgtagtcccagatactcgggaggctgaggcaggagaatggcgtgaacccgggaagcggagcttgcagtgagccgagattgcgccactgcagtccgcagtccggcctgggcgacagagcgagactccgtctcaaaaaaaaaaaaaaaaaaaaaattgcaaattgattcctattagaagaataatatagtctgggtaaaacaggatgtaatccaggaatgctaagttggttctccatgaggaaactgattaatataactcattatatattattattaataataaaaggattaaatgaaaaataaccaaatgataatcttgataagggtttctaaaaagttaaaaattaaattcaacatttatttatgatattttattacatttccagtaaggaaagcatagaagacttcctcaacttgacaaagaccctttgccagaaacctataggaaacttcaagctaagtgaggaacaggcatgagtccctgctagtgtctcttcagtttagttgtgttggaggccttaacaataaaaagaaatgatagcctttattcttaaaaaaaaaagtatcctattgtaaaaattgttattgtctccctaaaaaaatccaagagaatcaactgattggccctgaggacttgtgaatacagaaggtaagagctgaagctgactgtaaactgcctgatcttcaaatgctttccccagagacacacacagacccaccaactgagggtgaaaaccttcctagatcaagatgtttacatacagcctctgaccagtcactggctgatcactaagctgtgctgatccaggacagcccctacaaaaccaggcttaaaaataaaaacaagtgataaatatatatatacatatatatatacccacacacacacacacacacacacatatacccacatacatatatatgcatacatgcaatatatattttgccagcagaaacatcagaggctacacactccaggaaaaacagactccagagactatgtctaggcaagtcactaaacaaacaaaacaaaaaaaaagtaacaactacccctcaatgggaggggtaagaatccagaattgctacaatatattatctaaaatgtccaatttaaatacacacagacactgtatatatcatatatatttctcatgtgctatacaggaagaaaaaaacagttaataaaaactgaggaacccagatgttggatttaacaaagacttcaaagcagctattacaaatgtttaaagaactaaaatcagtttaaataaagtatgacagcaatgattcatcaaataaagaatatcagtaataatattgatgaataaattaaaataagtggaaattaaataaatgaataataaaatagatggaaattataagaaccaaggggaaattctggaattgaaagtaaaacatgggctgagcatggtggctcatgcctgtaatcccagcactttgggaggctgagttgggcatatcacctgaggtcaggagttggagaccagccaggccaacatggtgaaaccctgtctgtactaaaaatacacaaaaattagccaggtgtcgtgggcaggtgcctgtaatcccagctactcgggaggctgaggcaggagaatcgcttgaacccgggaagcagagattgcagtaagccgagatgtgccactgcactccagcctgaatgacagagcaagactccatctcaaaaaaaaaacaacaaataaataaaagaaagttaaacacctgactgggcacggtggctcatgcctgtaatcccagcactttgggaggctgaggcgggtgtgaggttaggagttcaagaccagcctggccaacatggtgaaaccccatctctaccaaaaatacaaaaaattagctgggagtggtggcagatgcctgtaatcccagctactcaggaggccgaggcaggagagtcgtctgtaatctcagctactcaggaggctgaggcaggagaattgcttgaacccaggaggcggaggttgcggtgagccgagatcacaccactgcacttcagcctgggcaaaagagtgagactctgtctcaatttaattaaaaaaaaaaaaaagcaaaacacctgaaatgaacaattcattagaggggctcaatagcatatttgagctgacacagaatcagtgaacttgaagctggattacagtacagattttccaatctgaagaacagaaggaaaaaagaataaaacacaagcaaaatggttgaagccccagaggcctttggtgtgctttgtgggacaccacaaagtttatcaagatatacacaattggagttgcagagaaagacgatagagaaaagagggcagaaaaaaaaatttgatgaaatatcgttccaaaacagtggcagtgtataaactcttcaataaatgatatgaagacaattggctatccatttgggaagacattagagaaagcctgtacctcacagaaaaaaacaaacaaacaaaaaacaggtgaattaaagttagatgttaaaaaaaatatttgcagaactgaatattttcataatctttagatgggaagctcttcttcctaagcaagccataaaatcctgaaaccataaagaaaaaattaacaaatttaaacctataaaaatgttaaacttttatgtgatcaaaatacatcataagggaaaagatatttgggagaacatatttgcaacatgggtaacaaatagataatatataaattacttctacaaaataatgcagaaaagaccaaaaattataaaaatggttgaagttatatgaacaggaaattcacaaaagaagaaattttaggggctgggtgtggtggctcatgcctgtcatcccagcactttgggaggctgaagcaggaggatcacttgaggccaggagttcaaaaagaaattttaatagcaaataaacatatagaaagatgcctagcctcactggtaatcagagcaatgcaaacttaaaatgaggtttttctcctcattaaactggcaaaaatctaaaaaattgttaagatccattgttggttaagatgaagagaaatgagcactttcaaatactgctggtatgaaaggcaatttgacaataactaccaaaatttaaaatatgaatatcaacaattccacttttaggaacctgtctcaaaattttcacataatatatccaggagaaacttctaattttctgatagtaggtgtatattatcagggttctcagcataaatgttgacttctattttggtgaagcagaatataactttaataatgctcccttaggattctgagagaaagttgttagattcagaccaaaaagtatgaaatcttactaacttattacagataggtatagtgcagagatactgtatcaagtactttacaagaacaaattaatctaatcttcataataatttcttaaggaaattgaggcaaggaagagttagagggaaggccaaggtaaattggtaagtggctaagttgacgttcactcttaacagtggggttcactgtgaaataggagttcagcaggacttgtttctcaagacgcaggtcacagagaccccgctgataaagcaggatgtggtaaagaagccagctgaagacagccagaatcaagatggtgacactaatgataattcaccagcaccatgacaatttacagatgccatggcaactcctagaagttactctgtatgctctaaaaacagaaggaaccctgggttctgagaattcgcagcccctctcctgtaaaactcatgaataatccactccttttttagcatttaatcaagaaataaccattaaaataggcaagcagcagcccttggggctgtgttacctatggggtaaccaccttttatttctttactttcttaataaacttgctttcactttactctctgggcttcctcttgaattctttcctttaggaagccaacacccaccggccctcccaggccaaaccccaatttgggggttcatcctgccacaactgtacagtgtggggtcaaggggaacccttggtctttttcactgaaaaatcaactcagaaaaggcagattaataggagaaaaggcacacagatttatttaacttgtatacaggggaggcttcagaatgaagacccaatcccctggtaaggtacagaagcttatataccatcttgaggttatagaaagaatgcaggctcagagcatgaccacaaccaggttttaatggcaagacatgtcatgggggagagaaagaaggaggcttggctagcaaaggtggcattgttatgtagatgaagccttccaggtcataactcctagagagaatagatggtgaatttcttttcagacttgtaaaggtgtcagactcaatctgtcctagatctgggaaaggcctggaaagagaagggctggctgcattcaaggagattctctacaggtgcaaaatttccccacaagagacagttttgcaaggccacttctgtctgctggcccagcagcagccatttcaaacgatgtcaaagaaatctattttgggataaaacattttgatttcctttagccacttgcagggtcttgcgccatccttttgtctgggtgcgtagctgtccagcagctctagcactacctggaagttgaggcatggtcatgcagaactaaggccccacccaggcctgctgagtcagagccttcacttcagcaagatccccagggattcctttgtctgttcatatttaagaagccctggtctaaagcatgagacttaaatctctgctctcccattttcttatctgtaaaatggtgatgacagtcctcaccacaagaggctgttgtggggatatttttatacacatgttcattctttcaacaaatactttgcgcccagcatatgctaagcacctagtgcagagaggaaaacagacaaaaagtaatttccagccatcatgtagcttacattctggtggggaaagagtaataagtaaagcatatagtttattacatgatggtaaatgctctggagaaaaatttaaaaagcaagaggatagggattgggaaaggctgtaattttaaacggagtggtcagggacagtttcacggagacctttattcagaagttgcagggaccaaagctatcttacgggagtttgcaatgagaatttctttgcccatgaagtccttgccaagtctatgtcttttctgagaattctctcccccttgatttcagccctgtttgatttctgacctttgaaatgccagcccccatgctgccgttgtgtggggttccgactggacatccagaagtctccgtgtgtgttctcattagctttcactctgggggagttttctgccacaatgtgaatcacttattttgctggcagcagcagttgacagtgacactgatttttaaagcctgcacatttcacatcagaaaagtcctggattttatgacttagctatgcttagaggataattgcaacaagaagtctcccctgcagccagcttattggagctgagacttgtataagagccagacctggcactttaaacagcccagcaaataacccaaaacaaaaatgaacaatgcacatttttatctatgctgctcttccccatcatgaacacatgcttctttttttcctcgccttcaccctcaattttttttgtggaaattcaatggttgactgtaccaagccagctctctgggtgagaggttccttctaacaaggattagaaacccctctcatgtaggaagaggtggatttgggggattatatgatccaaccctctacctttggacagaatacaatcgagatgtctccccagtacacagaactgcttttccagcaagttctctttgttaagccattctggtatccctcaaatcccttgttatgactatccacaattctccatgccccatgaccctttcttagctaaaatgaaaaataattgcctagttccctcatgtagagaagttgagctattaccttgacttcccccttctcttccaaaaaagattacaattcctttaattttctttcccatcctagggtgtcctctttgctctctccatattctccaaataaaaattcaaaactgagcagcaaatcctgtgcctcttcatccaacccctcctcatcatgaatcattatcactcaggaagtaaggacctggtttactatctgagaactttagtcctaataatttctctacaccaacttctagtcctaataatttatccgtataatgctcagaaacactccgagattctcagtaaaaaaaaaaaaaaaaaaaaaaaaaaatcaaggaaatcttaatggccaaagccataggtccaaaacccggcgttccctcccacccaactttccaggccattttctccaatagcccctcatccctgaccttgtcttccagcctccctggaccatgaatgctgctgaaggctctcactttgtacttccctgggccccctgcccttgctagtgacttctcctcccctctggctgtggaaagctactcattcttcaagacccagttcatatgtcctctctgtcaaggcttcccagatgccttcacagatggccctgcctcagggcctttgcacctgcctttgctgagaacactgttccctccaatctttgcatagctggctccttcttattatgcagatctgagcccagagttcactttctcaataagtcttccctgaacactttacctaaagttgcaaacccccattactctctatctcatttgtatgttgttttcttcatagcacttgtcactatgtgaaattactctcttatcatcagtcttcttccacgagattaaaaacaccatgagagtaaagggcaaggtccttattttctgtgtatttgcagcatttggtgccgagaccatagtgagtggtcagacaaatgaaagaaatggctgcttccactctgttagtggcatcctcagacacacagtcaccccttgtatctcctggggattggctccaggacatccccccatctctacttgagatcgcccagtaggaatattttgaacaaattcctttaacccatggcagaggttgccttaatttcaatgtgagaataagaaggtgaaattttgaaataagagattgaattacttatcagaaacgaaagcttcttagagcaaatttaaactctacaaactttggtcagggatttgaacacatatttccttccccctcagtttctctcacacagacactgctgatctcagtaatggccctaaactttcttttctttttcttttgcattttcttctttctgcacatgtatgaatgcaagctgaatagtcaagttcctgaaatgggtcaggattaggtttgccttaaatctttttctcaacagaagccaaacacttaaaagaagggagatggctgattgaattctggaacaaaagttacattcctaggctcttggttaatttgagcttggctagagggagaaagcgtgtgtgtttctgtgcacaagttacactcaacacacaccctctggaaggtgggggtaagcttcagtcccggctgtccgtacagagtgtggttcagaggctgccctttaacctgtgtggccagagagaataaatcaagccagcagtgctgtctccctgctgactgaaggcgcccggccttatcaaggagcccaaatgtcttgtgctcacagctgctgtgacatctggaagcattaacactttgttgccagcatgtaggctagttgaatgccgatgcgtaggtgcctggtgttttctggtctgctacatgaataggcgtcaaaagttggtggtgaggagtttgcttacgttcattccttaaaagcaacatgacacagagccttgccatggcaggggtgatgggttgttaccaaagtcgataacaggaaatctcactgaggataaacagggctcatcggccattgccgagaaacacatggttctcatttaacctgccaaggactaattgtgtatgcttcggaagcgcaaaaacaggaaaacgcttttctgacatacaccccaagtttcttcagaccaaaaagaactgcctcaatgttgttagacgctgagaagtaatgatctccccagctgtcagggagccaacctcacttacttctctttaatctaaacttatgacctaaagcatatttcaggcctcccatgaagtccttgaaacttgagacttaatgaaggacactgaggtttcacttttcactgctctggtgtatgtactctcagaaaagcagtggaagaggttagatagatggtgatgtaggaatcatggcatccagaaaatgagtgtgatttaccctttgataaaagggaactaataaagcaatatatgcaggaaatgcagagacaacccagtgaataggtgtgctgctttagcctttaagggaagatgggtctgagcttcattctttaccttaagatgggtccaagagctagaaccagaatttaaacaagcagatacaattccaaggaccatgttttgtctcatatgggggctattcactcatttattacccaaatcaacagaccattctgcttccaaaatatttcattatctgtggaaggaaaacatttttggtatgcatgtcaagtgctcagataacatatttatgtatcgctttttcactaaagagaatctgaccgcatctggaaattcttttgtgtcactgcctctctcagactacttcccatctgtatcgctttaactccaataaaaggccatccccatgcctgggaaatgggctttgtctggggaacttgtctttctctgattacatgtaaattaattaaagcccatcccgttttacagggcagcctggtggtggtggcctgcactcttgactttccagcatgttggcctgtcacacgcaaaggaagagggaggaggggaggatgcaggggcattgttttagccaaaccctaaagctgatggaaatgaaatccactggcttttatcatgagaagtgaaattgttcatgaaataatggcagcctcatacagaggctgtgcattggattatactcaacctttcctctgaaacgttggtctggaggctttgcccctttattttcagtttcagatttgatctcagtaacaccctgaccttttcagactccataccacttttcacagggatgactgccttaagggatggggaaagggttagagaaagcaagtattttatttagaagacagttttcagttagaaagggagaagacatctagagttaaagttacgatcttttcctttctgtgcttaagtgatactaggtcattctttaacttcttgctccacctgctctatccccagctctgcaggtttggagtgggctgtcatgtgattttgtttacccgtttcggttcaaagacagaactctttatttgaacactgaagctagcagggactgtccaaagccagagcccctcatattagcctagcttatgttgttgtgatcatcagactgtttctgttttttggatttttgtccttaaataaacaccttggaaccactagctacacagaggggtaaatatcagaaaatccaaatttggtgcactaatgaacacggggtctcttttcacaaagcaaaagaccatcattcttcagaaggatctcccaaagaatgccattgaaaactcctcattaccttcaaatggggtgatgcacacacgagtagcatgaaattagccatgttcatattaaggagcaatctaagatcattattgctgtttctctggccttatattaaatagtgtcattgcaattgaaaaattagagtaaatgaacagagcctgtgagcatccaccctttgtaggttatcctgagtctgcattattacagggtcttgaaatgaatggtgatacgtgaaagtatttgtcctaggattcattaatattattatattttagtctttggtcaatatgaagaaatactcaatagtaaatcatagcaacatgatttaacatgagatataatttgaagggctctttaaggctgctaagcaaccatgaatcatggtttgcatttttctagatggataatatgaagctatcttatttatctttctagaactagacaccttaggtcaggctaatcaaccagctggtatcatttctcagttattgtatgactactatctttatttcaaaccctgaagtcctaaaattaatgtcaccacagccattgtagtatgtgttcagccgcctgtgccggaataggggcttactgtcttttgatgccttggttctcagagtaggcaatgggtaattgaattagcaaagtagacattcaaaacattctctgagttttcaaactcaaggagcgtgtgacttcagagaagcaggcgataagtcagggggtgggtcatgtttacccggttgccgtcagctgcgattggtgtaatatgatatggaaaagtggcccagggatgtaactgagaacataaagtcaatgaataacacagaaacgtgagttaacaggaaacacatgttattctaaaatgaacctaggtcccttttaacccaagccaattcaacaaacatagcttttagatcataccttttaggtttttttttttttacccaaaaaccacactggggatgactccagccgtggctcatggggaacactactgtcattcagtttgttcctctgctaatttaatcttccattttcctttgattggtgatgcacgcattcaaggggcatcaagccatggacactttggtgaccctccctatccttggaaccccagccagctgatggggttcgtactggtaaaatggcaaactggtagaggcatctatgcttctgcctgttaaaaatatactaataggccaggcgtggtggctcacacctgtaatcccagcattttgggaggccgaggtggacggatcatctgaggtcaggagtttgagaccagcctgaccaacatggtgaaaccccatctctactaaaaatacaaaattagccaggcatggtggcacacacccatcatcccagctactcgggaggctgaggcaggagaatcgcttgaacccggaaggcagaggttgtggtgagctgagattgcaccattgcactccagcctgggcaataagagcaaaactctgtctcaaaaaaaaaaaaaaaaagctaaaaatatcacataccaaagctgcaaattatttctttaattttgagcgacgttaatccacatgatctaaatcatacattctcacacattctcctacttcaaagctttccctggttcctattaccttctgggtaactacctccacccacgccatgtgtaagacttgtcacatgccctcctctgtgtccaggcccatctcccctgcctcagttctggccactgctacccagcattcatccagtgcttgacctgtgttgaactccttggctctctagactccagtctcaagtttgcccctctatgcttttgcacatgctgttctcttcctggaattcctttctccctcctccctttactcctgagaagttttctttatcctttgcgatctacctgcaatgccacttcctctgggtcagatatgagaggggctgacttcctggtggagggagaaatttgtagacaagatttataatctcattaggagctgtgctctgaggggctgcgaatggataaacagtgaggtggtggtcaggtggtgtttgggcttcagtatgtggaatagctactatgcagcctggtgcaaggaagatggagtgggacagagcatcctggtggggattttcgagatgtgcttctcagacatgacaggttacttaacctctctgggcctcagttttctcatctgtaaaaaggggtggaatttaaggagagcagaagttaaagcttatctgtcacatccctgataaatgtctctgtgctgctgttctagctggttgaacctcaaaaatgtcccagtttagacaataaattatatggtcacccttctgagagcagtaccctccacacatgggtgccgtaaggattcagcatatgccgttctctaacatactaatagcacctaatattgtattatttccattgatatctgaactcagtatagagatgggaccataagcgatttcccaggatgatgtgcttggagcatgacacttagaaaaaagatcagaggacttttctgcctcttcagtgttcaaacccaggcacagggactgtgtttggctgctctgtttggggccctgtgggaggaaacctgtgtcctctctcttgctctgagtcaacagacaactcttagaagtgcctgattgagcctacaacatggaaatgccatttcctccaagccgtttatctgaccacctcagcctggaaagtaacagctcttgacttcccttctccacctgggatcagatgacgacaacatttgaaacaaagggtctgctctctttctcagtatcacacctatggaatcagccctgattcacacttcaaacccactacttcatgaagcaaggtcttgccagatcccctagagtgaacaggggattctttatcctctcacaggcctggcaccgtggtagcttctgaccatgacagctcctttcactgaggctgacccagactctgccaccaagtgatggccactccttgggctcccacagccagggttcctgacagcttccccagtcaccaccatttcatggtttcagtttgcacaatgtcctctttggggtaaaggggaggacagatgccaacagaaaaccctcagtacctgccttggtagaatacagccttgtcactgtgtcctgcatcctcctgtccttgtttgggtgcctggtgaagtccttttgttcaaattctaatagccatggacctctgccagctcccagaggccctgagagataagcagccatgtcatgagaagcatttggactccggtagcctgggaaataaatgaggactgactgggcagagaagagcaagggggcgatggccacagagtccttagccagccaaggaaatgacattgttggtcattggccggggatgcttgggttgtctgcaacacatgaaaaaagcatcacgtccccttgactttgagcaaagagtgcggttaaaaccaagttgtgggaggatggatagtcagtaattgtttatctgtgtgatgagataaggtagtcccctgctgtaatgaaaatgcacagacagttcatgaagtgaggaattagcaactaaggacaacctgagtgactacatgggccaacatcctcatgtgtagatgaggaaactgaggccctggagacccaaactggcacggctgttagcaggcagagctagggctgaagccaggactattgagtattcatcaagagcgtctgtaccacagaacttcactggggcccggacatgaccttggacaagtcgctgaactcggggacctctgtttccttatctgtcagctgaggccacaaggactgcatgatctcgcagctgccttccagaaacaacattccagaatgctctgttccccccttccagcccaagagactgtgcagaataggcctcttctcagtcagcaggcacttttgtctcccatggtctaggcaggagtcatttttttttgctacagtggtggaaatgggtcaggctggagaatgctgaggtttccaggctagtggtttcttcctctgaccacagtaagaggaaaggaagctttccctccacctctactcctctgtgactcctgccccagccccatcctcagcttccacctaagaggtagtgcaggaaagtggtgataagcagatgtctgcagctgtgtgacgtgtgtcccagcccagttctgtggcctgctacctggggagcctctggttgtcattgggcctcctgttgcctctcagcttgcctccctctgtaaaatggggacagtaggccaggggctgtggctcacacctgtaatctcaacactttgggaggccaaggcaggtggatctcctgaggtcaggagttcaagaccagcctgaccaatatggtgaaaccccatctctactaaaaatccaaaaagcttagccaggcatggtggcgtgtgcctgtaattccagctactggggaggctgaggcaggagaattacttgaacccaggaggcagaggtttcagtgagccaagatcgcaccactgcactacagcctgggtaacagagcaagactccatctcaaaaaaaaaacaaaaatgtggggacagtaatagcacctgcttcagggaactgctgtgaggactgaatgttaatgtgtggaaagcaccgagagcctggcgtgcagtaagggccatgcaagtgttaggtgccgttgtcatggctgtcacattggtacctgttcaacacacttagaggaccgcctccctccaccttgatgacccttggtaggtactgagttcctgagttttagctgaggactgaaggtgtgactgcaataggattagctggtctgaatcagacttatgtagcaccaggcaaccttcaatctccttttgaaaggggaccaccctgaacctttcagaaaaacgttgctttccccgattgaagtgattcccatgtaaccacagtcgggagcacaactggccaagattttcattcaccgcagactcagtcctcatttcccctttccagatcccaccaggggcagatgaggtgtcacattgcatcacatcacgccatcgccattaccctgttcacaggccaccccagaaactcccggcgggagacagaaactaacttctgagctgtgactctgccccttggggttgacactgaggcttaggctgtttctcactcgcttgccctgcctttcccagctccctgcccctctccgctggcgtcttgtggccagatgacagtgctagctcttcacacctgaagcacattagcaacactggctgggctggagctctgctcccaagcttcctctccctgcctagaaacctgaagcaccgatgtgcagagcaaggaggaactctgctcccacgcctgattttaatgagggatggatgcatcctgcagggctcagaggttctgtttctctaaacccagaccaaatgtgtttgggtggccaggcctcgtaatctcagcagaggaatgtgcatgccacagggctgcagaaaacagtttccagcggtctgtcagcagatgtccactccagaagacagacagggaatttggagacctacaggctttggagtgaaaaagtgatggatattaagagcacaactacacacattcggattctcaaacgcccaataaacataaatattttccatccacaatgtactatatatgcctaaatatagggcaagccccaaatagcacatcctccatttccctaattagataaatttaactctcttttttttttttgccaacttaataggaatcagaactatgattgcctttgaggtggggggagtgggcagtgggaattgactggcaagggactggtgggaactttctggagtgagagacaagttctgtactttcatgggggtggtagttactgggtgacataattcatcaaactgcaccctttagatctgtggattttaatgcctgtaaatttacctcaataaaaagaagtttggagaaatgaagaaataatcaactatctgtgtataatgtttaacttaatcatgtggttgaatgcttaaaattttataagaatgatatattaatctataatactcttcattcttatgtttcacacaataattttatccaagtgtgcatcttctgagattgatgggtttcatttctaagccacatttttagtcagcagtttaccagaatatatcatctacaatttgcctaatttatttgaaatgcagaacttcttgaatccatgttggtgctgaaatttgattggcacacaccaacgcccacttgcgtagcactgcagcagttgttttcctcatttgtcttgcaagtgaatattcatgctgctccccacatcaacagcttacgtattgctttctaaaatgggctttcaaatatttattgcaactttcaacaattgaacccaaggaataattaccaaatcttcattaaagctcattgcctccttcccattgtttccctctcgtgacctctaaaatcgtccaaacctgatgttgattgagatcatttcaggctagtgtgttttccccaaatgttgtcgttcaaataaagtaattgaggctgggtgcagtggctcatgcctataatcccagtgctttggaaggccaagacaggcagattgcttgagctaaggagttcgagaccagcctgggtaatgtggcaaaactctatctctaccaaaaaaaaaaaaaagaaaccagcaaaaaacaaaacaaaacaaaaactagccatgtgtggtggcatgtgcctatagtcccagctactcaggaggctgaggaaggaggatcacctgagcccaggaggttgaagctgcagtgagctggactactgtacttcagcctgggagacagagaccctgtctccaaaaaaaaaacaaaaaacaaaaaacaaaatttccaaattattagacacttaaattttaaaggacagtaagtcccaaactgtgagaaacttttataggcaacatcctcttttctaatagtttaacttgaggatataaaccttcaccttatttattttcagacatatatagtaaatcctggaatgtattcagatcaaagataaaatagagataaatttagcaaattttggtggtcttgttttataattcactattaatagattagcattgttagctttagtttatttgtgtagcaaaaactgaccaatagaatctaattaaactgaagagcttctacacagcaaaagagactatcaacagagtaaacagacaacctacagaatggaagaaaatatttgcaaactatgcatctgacgaaggtctgatctctgtcatctataagggacttaaatttgcaagaataaaacaactccattaaaaggagggcaaaggacatgaacagacacttttctaaagaagacatacctgcagacaacaagcatgtgaaaaactcagtatcactggtcattacagaaatgcaaatcaaaaccacggtgagataccatctcataccagtcagaatggctattattaaaaagtcaaaaattggcctggtgcggtggctcatgcctgtaatcccagcactttgggaggccgaggcgggcggatcatgaggtcaggagatggagaccatcctggctaacacggtgaaccccatatctactaaaaatacaaaaaaaaattagccgggcatggtggcaggtgcctgttgtcccagctactcgggaggctgaggcaggagaatggcttgaacccaggaggcggagcttgcagtgagccaagatcgcgccactgcactccagcctgggcaacagtgagcgactccatctcaaaaaaaaaaaaaagcaaaagtcaaaaatcaacagatgatggagaggttttggagaaaagagaatgcttatacactgttggtgggagtataaatgtgctcaaccattgtggaaagcagtgtggctattcctcaaagagctaaaagcagaactgccaattaacccagcatcccattactgggtatatatatacccaaatgaatataaatcattctaccgtaaagacacatgcacatgaatgttcattgcagcactgttcacaatagcaaagacatggaatcaacctaaatacccatcaaagacagattggataaagaaaatgttgtacagatataccatggaatactatgcagccataaaaaagaatgagatcatgccctttgcaggaacatggatggagctggaggccattatccctagcaaactaacacaggaacagaaaaccaaatatcacatgatctcaatgataagtgggagctaaattatgagaactcatgaacacaaagaagggaacaacagacactggagtctacttgagaatggaggttggaaggagggagaggagtagaaaaaataactattgggtactaggcttagtacctgggtgatgaaataatctgtaccaaaaacctccatgacacaagtttacctatataacacacctgcacatgtactcccaaacataaaataaaagttaaaaaaaaaccaacagcaaaaaaagtttttgttccctaccatgaataaaaagttgaaacattcttgaacaactatattttactcaagggcattatagacagggcaatttaacagatgcctgtggttagccatgggattgtaagcacaattctaaattatgaattactaattattaattttctggtttaacctcacatcctgtccagccttcagctacaaccagtgtgatatggtgatatataaagaagacttcatttttctaacagttcctcaatttaaacatcagaaagagtgctgttcttaaggaaatcatcaagaaagactaagcaccattgttttgtttctgatgttgctgtcactcagcaccgttgccattgctgtcagaagcaaaatcaaatcactcaccaagagctcggcaagcatgcaggtccccgtctggctcagggcagagactggtcagttatttttttggtagcaaaactctggctttagagttggaccatgagcagtcctgcttgctgctcattccctttctctagaaggacccctaaggagttttacagcaccgtgggggctttctagaatggttgaaaacctctggcagcagatcatccatcaggcttggtcccaagttccagacctgggttcttgactccatgactgttggccagtgacctaagttcagtctcattttcctcattcagacaagaattgcttgtaaggatgttcttaagtgtgctttcaaaaccatggagtataaggcttattttactccttaagtcttcctatttcctagtcacatctcatttgcatgttatatgccatctcatcaattattgggggacctaagatccacattttctattatttggccctgttgatgctacaacttctgcctttcagcttttcagccattgttctccacttcaaaatggacaaggaggaaaggtgaattggggttctaccactcctgcctctacaataagaggctccagcatcatgattcattcttgagaatgactcctctgacaggcctcttttcatttgcaggtgggccaagagaagggaaactgctctttccagaaaaacccaactccctgcatcatccctcaagaacaagaaaatatcttccacacaatatttgcttttttcacaaagtctggaagaaaagtcttggtaaggatttgtttagtggttggggtaacacgggtggtcctcactcggaagacaccagttttctatttgatatttattatttcctaaatctggttttaatcaatttgacttacaaaggcacagactgtggtcaactcctaattttcagtctgaggtttcaatcaaaatgttaaatttacattccaaatcctattacctggaaaagggataaatctttgcaacccaccaagcacaaagtaaaatgtttcttccactagaatgagtctaaacaagagtgattattcttgtgcaaacattttgggaaactgtttgataatatctactaaaacaaaacgtgtgtatcctatgacacagccattctactcttgagtatatccccaagaaaaatgagtacttgtgcttcccagaaaagacatgaaaaaggatgctcacagaaatgttaaaatagctgaaagctgagaacaatgcagatatccatcaataggagaataagtaagcaattgtggtatatccatacactggaatattacacagtaatgaaaaataacaaactactgctaatgaatgaatctcacagacagaatatattgagtggaagaagctagagacaaaagccacatattgtaatatttcacttatacgaagttcagaaatagcaaaaactaatcatgatgatagaggtcaagaaggtggttactttcagaggaatgtggatgggatggggcatgagggagcctgcttagatgctggaaatgtcctacatcctaatcagggtggtagtcctccaggtataaacacatgtaaaaatttttaaagacaggccaggcacggtggctcatgcctgtaataccagcacttagggaggctgagggggtggatcacctgaggtcaggagtttgagaccagcctggccaacatggtgaaaccctgtatctactaaaaatacaaaaattagctggatgtggtagtgggcgcctgtaatcccagctactagggaggctgaggcaggagaatcggttgaatcagggaggcagaggttgcagtgagccaagatcgtgccactgtactccagcctgggcaacagagcaagactctgtctcaaaaaaaaaaaaaaattataaagacacacacttcagatttgttctatttactatatttgttacacctccatttttaaaaagtgcaggtattgaagatggaatgacaatgcttttccaaagcctccttttttttatctttggttacatttctctaagctccttatttcagccctggcacatctcacctttatcatttcctttctcattcttttctcctgttggagaagggtgactgtttgccacttgaaaggttgggtttttttttttttttttttttttacttacatagtgagggtgatattgttgaaagcccttagacttgttagatgtagtgatacctagtgattttatagttacgactctgtctggctgaaaattttgccgtatagatgaaacatcatcaaggtatgtatacgcattttggaacctatcatataaaaaagaaaacttttgtaacttaaatttgggatttatgtttttggttttttgtttgtttgtttgttttgagatggagtcttgctctgtcgcccagggtggagtgcagtggcatgatctcggctcactgcagcttctgcctctcgggttcatgcagttctcccgcctcagcctccccagcagctgggactacaggcggccaccactatgcctggctaacttctgtattttttgtagagacagggtttcaccatgttggccaaactggtcttgaactcctgatctcaggtgacccccctacctcagcctcccgaagtgctgggattacaggcgtgagccactgcgcccagccgagatttacgtctctattgtaacttttgtgttttcttgaggaagtgtcacatgacttcttagccctcttatttacctacctaataaataggcatgaaagtatatttgccactacacaggtggaagtcacataatgtaggaaacgtgtctgtgttcaaaactcataagaatgctttcagaatgcaaaatttaagtttgtgggtttaaaaaaaaaaacaattatttctctttgtgaattcatccaattcttggtaggataaattagtgagctgttttctcccagttgcttgacttaaaggcatgctctggttcccactgggtgggaaatcccttgaatgccctctggtggcgagaaagaacgattgcatcttcttgtggatttcctctgcctggaattgccttagtcaccaagttcatggagcccactactctgtaaattgttgtggatttgtctttgttcttaattccattggaaatttttctgacttttcttctcaggactgtgaaaaaccaggaatttcttgcctaacagcacactgtaactttagtgctcttgctaaagaagaaagtcgtactatagacatttacatgctgctgaacacagaaatactgaaaaaggtaagccctaatgaaccgcacttgtggatgcatttagaagcatttgaattgttgacatctgattttgggtaaaaaaaaggaaaaaggaaagcatttgaattggtgtcctcatgacaatctggctgcccccccttttggctgtctacaagagactgtttttatttttatgtatttagggggtacaagtgcagacttcttatatgaatatattgtatcgtgatgaaatctgggcttttagtgtacccaatagtgaacatggtacccaataggtaacttttcaaccctcacccccctcccacattttggagtctccaatgtctgttaattccactctttatgcctatgggtacccattacttagctcccacttataagtgagaacatgcagtagttgactacttatgagttatttcacttagggaaatggacttcatttccatccatgttgctgcaaaagacataatttaattcttttttatggctgagtaatattccatggtgtgtgtgtgtgtgtatatatatatataccacattttctataaccagtcatccattcatggacacttaagttgattccctatctttgctgttgtgaatagtgctgcaataaacttaccagtgcaggtatattttttatacaatacttctttccctttgggtatatacccattagtgtgattgctggatggaatggcagttctatttttagttctttgagaaatctcgatactgcttttttgattgtactaatttatcttcccatcaacagtgtataagtgttcccttttctttgcatcctcaccaacatctgttgttgtagttgttgttgttgaactgtttagtaatagtctggctgccccttttgaaacttttccagcaagtgccattggtaattttgctggtagataatgccagggtaaaataccagacccttgctactcaaagtgtggtccgaggaccagcagcatcagcatcacctgagagtttcttagaaatgcagaatcctgggctccaccccagacttaataaatcggcatcttcatttttaacacattccccagggattttgtttggccatttaagtttctcatgctttagcttgcatcagaatcacctggagatcttgttcaaacacagattcctttggggtgcagtctgaggctctccagttgccacaagcacccaggtgatgccagtcctgcagtctagggacctcgctttggatgaaggttggctaaccttttctgtaaagggccagtggtaaatatttcaggctttgcaggccctacagtctcttgcaactgttcaactctgccattgtattgtgaaagcagccatagacaacactcaaataaatgggcatggctgtgatccagtaaaactttataaaaacaggcagagggccagatttgacccatgagtcctagtttaaatgacggtttgttttggtccaacttttgaacctcaggtcactttgctattatgagtttatcacaggtggttcattaaaaaaccacctcaaccagtgcatcggtggctcttgaagaatcatacaaatttcctatgatttattttaaggtgagagctgctgagaggccacttccaacaagttgctgtaaaaataattacatgtgaagataaaactaaatatgcatgttagcctcagagattccaattatttttctttagaaagactaaatgtgttaatctgtacaaacctatccacgtgtgaatgaataaccttagaaaagtcattctgtggttatttttaaataggcacagaggtaacacactgacctgagaggatgcaggcatcaggggatgtttttccattttcaatctgtagccgttacagccctcacacacctgaagagagctgtgcatagttctggtttctctggtttgctctggagggaaactggtttggggcaagttggactcacactgcagtgctttcttctccctttgtacctctccctttataaaggacagtgttggaggaggaccaggcctgacttagagcaccactggccatcctctgattccataagggaggctggaaaaccccacgtctggagaagtaccttcctgaaatgtgtccgcaggccaggctggaggactatgcctctgcatatgtacctgtcctgtttgtattcttcaaaaatggtgctgcagacagttttattgcctgtgccatacttgccactgtccatagagccctggtgacagcactggtggctgtaagccactctgatgtttcctttatcctcaacccagatggctgctgcttgcacttcagttatttgcacttaatcatgcacagctctgcagcctggttcttctgcttttctatcccggcagccagtggtgaccctttgccaaggaacatgtcccagtgactactgtccccatgggccagccaggccagtagagccgcaggcaagagagctgaaagctgtagggtgtcatatgaagccttcaaggctcattctccatgtgccctttcagcagaaaccaggagcacttccaggtgcagagaaaagcttagaacaaagttgacctggaagccagatggggccccagctgctcccagagcttcagttgccctgaagccagctacagcctcccttggggagtggagcccacatggctccaggcctcccgaaggatgtggagcagcgccagccttgtggtttgcctgggcctgcagtcgtgtttattttccttttgacctcaagatctggccccagacaagggaatttgaggttttactgttttgaccttaacaagttttcatttgaaatgtaggatctgatttttaaaatcactgtaggagccgggcgcagtggctcacgcctgtaatcccagcactttgggaggctgaggtgggcatatcacaaggtcaggaattcaagaccagcctggccaacatggtgaaaccccatctctactaaaaaatacaaaaattagcctggcatggtggtgggcacctgtagtctcagctactcgggaggctgaggcagaagaatcgcttgaacctgggaggtggaggttgcagtgagccaagatcgtgccattgcactccagcctgggcaacagagcgagactctgtctcaaaaaaaaaaaatcaccgtaggattcggatttttttggaagtattcttctttcagtctgtaaggcttttctcactgattctacaaccgtgggggcccatcctgtgccagactcctcgtctgcttggcctgtaacgttggcaattatcatcatcattatcgttattaatatccaagtttatttttatttattttaatgtttttatttaaaaaaatatttttagagacaggatcttgctctgtcacccagatgggagtacagtggctcaatcatagctcactgcagcctcaaactcctgggctcaagtgatcttcctgcctcagctagtcctcagctaggactgcaggcacatgctaccatgacaggtgaatttttttttaatcttttgtagagataggatgtttccccaggctggacttgacctcctagcctcaagtgatcctcccacttcagtctctcaaagtgctgggattacaggccttaaccatcgtgcctggcccaagattattgttattattcaagattgaaaatacagcatatcctgatacataaaaccccaactttataaaactgttaaattggtaaaagattatttgttgcttaaaattatttcttgcttaaagtgagttaactggagtaactcttttgaatgacaagcttcccaaaagcatttaaaatgtgtcttatggttgttttaagaaaagaatgataattggtgcataactcccaagtcacatatacagaccagggtccctgtgtgccccaggaaggtctttgtggtttctttggcagagatgagcaaagggtacccttggaactgttttctgtggagtcctctaccttcctgtttctttgagggtttaaccaaaggtggcatttaagtgtaagctccttgcatgacaggcaagctgggtagatgtaggtggggacaccacaggacaccttgcctgtggagcccctcctgccccacaggtagaatgttgaatgcactagttctctgctatctgtttccacgacagaagccaggctgcccttctgctccacaatcaacctgtaccactggcttgaggttctggcttctccccagaccacagtttttccagtccctgtcttcttccaaattctttctccatccctgttttggcgccattttctggttatctggatcagtgtctttgaatctgagcccacaggaagacctctgcctgcctctggctggggggtgattccagagtcttagctgtgctcccttatacccctgcccctttctccttaattcataagccagatatttaccccttccccatctctccatcaggcatcctctttcaatgtttaatggttttgattccaaaatgacttcatttaagagcaaagaaagagttaaaagcaactcatatgaagggtttgagggttgtggtcaaggcaggaagatgcctataaaatgtagatcagatgccttctgtggaatgccaggcctagatttgctctacacaattaaacagctttatttatcctcaactctttgtgaacatgtcaatatcaatatccaaatatctggctctaactgcttggaaaccacagcacacatcttgcgtgtgttgattactggcaaactccatcatttcccaccatccaccatgatctgcaaagaatccttaagagagaccctagtctgtgtttatgtgggtgcctgggatggagaggtatctagttcaatgataaaatttttgtctgggctacatggaatcatggaatttcagttctgcccagtccctctcaaggcccagccattatcatagaaaaatcttcaagtaagttgtgttgtttcttccacaggacagttcgtctgtcatccagttcatgtcccgcgccaaggtgaaggtggatcctgccctaagggtggtggaaatagctcatgggaacccagaagaggtgacggtgagtcagccaccccaggacagccctcctcagagggcaagggaagctgggtgacttggagacctggagctggaatttgagggtcaagacagtctctgagccaagatgttgggtttgtggcagacccaagactatgcctgccttggcttccaggccccccctggagaacttctgtggttcgttcttgtgatagcattgtcctttaggatgccatcattatgtgaatgtttcctgctatgattgtccaaagggaaaatggtctggaagtacacccacgtcaacagagttggatttccactgtggagccaggactatttatatctttcttagacctttcctaagacagaccacatctgccttacccgtcacattactccatgggtaaatactgtgttttggtttggtttggtttggtttttaagagacagggtctcactctgtcacccaggctggtgtgcagtcataactccctgtagccttgaatacctggcctcaagggatcctctcaccttagcctccagagtagctaggactacaggcacactaccatgcctaatttttaaattttttaaaatttttttgtcgggatagggttccacgatgttgctcaggctggtctcaaactcctggcttcaagcgatcctcctgcctcagcctcccaaaacactgagattacaggcaaacactgggtgttttaaaaacaagttgtttgaatgacttaaagagattacatccaaattgccaagacctagtaactgctctttaactatttaccacccccttctcctccataaagtgcagttggcaccaaggcctcagagacacgggagggtgtggcaaaccacgaggctgagagtggaggtgtgggagaggctggagggaagctatggccttggaattttattgccttttattgttgttcttgcaggagcaggggggttgaggggggttcatcctgtatttgacgcccacactcagatcccaggggagtagaggaggagacagcagccgatgcacttcttttgccagtgagctgtgcaatgatgctacctgtctgcttcccttctgtggaatttaccctctcttagaacagtcagtgttgctgtgacacatttacaaaagtgataagtttataatgattttgtgcttagaaactgttgttaatttactctctgacaacagtggagacaccacatgtcaaaatgtcagaatggggttcaaaccaaagactactcttacaagaccctggttgggaaagtttcatatagaaaataaatgctgggcaggcggatcatctgagatcaggagttcaagaccaacatggcgaaacgctgtctctactaaaaaatataaaaattagccagtcgtggtggtaggctcttgtaatcccagctacttgggaactgaggcaggagaatcacttgaaacccggaggcggaggttgcagtgagccaagatcatgccactctgctccagcctgggcaacggagtaagactccgtctcaaaaaaacaaaaaacaaacaaacaaaaaaaaaaaaaccaatagtaataatgcttaggacctcaataaaacttcagtcctgtccgtttttggtgagcaagagatgagaacatcagggagtctgggatgaaaatgaattcctgaatgagtgaggggttgggcattccctactcagtgaggagaatgagtgttccatgcagacttttatgctctacccacaagataagttgtccaagcactatttttgtttgtttgtttgtttctttgtttgtttgagacagggtcttgctttgtcacccaggctggagtgcactggtgcaatcatggctcactgcagcctccacctgttggctcaggccaggcactaattttaatgatagaaaccaaatggaatgatgctgggtcatttactacttagggtcagtttttctggcaggtcagatatttggagttggtgtttcccttttcttccctgccttctggccatttaactgctaattcagacctccacctgggaagtgaaaaagaaaagtggttccctgctcattgtcatagttctggtttaaaagttttatagaatgaaatacttgcccaacatgagaggtttagaatgttctggtaaaccacagtgttaataagtggaagctaatggaaatagctaacaggttttctacacgtagaatcccttgtgtagatgaaaaaaaaaaatcactgggcatattgccttccattataggactagactgtgggatccaggaaaatgttgcttaacatctcgttgttggattccaagtcatctgtactcccccaaaataccacttccattaattactgttccattttgagcactatggtgatattttcattatcaagagttcttgggaagaggccgagaggttttttttagcactcctaagaaaaaattaacacacatgggaattccacaatgccccttctccctcctttccatgactttgccttttcagtccatgagctacaatgaagttctacaatctgttgttctcaattttcctggcaggaaaaaaaaaatcttttctgagtaggaaggtttgcctttttagaacaaacacgttcttccctgcgtgattcttctgaatgcctggccttctgtcaactatcagtctgaaggggaatttccatagagcctcgccaccaaatttaaattaggcaaagtttcaaagattttagattaggcaccaaattgttatggccttggaaggaacaggaaatgtacttgcatttggtatcgagtgggggaggaaaacaatcagatttttaaccacataacgtgtgcacggtggtaaatttaactgatggagaaatcaagcaattttcctgtgatcttttttaataggagttttaaaatgcattttatattgagtagttatttcatgttttcttaaaacaattattgtattgaactaaaaataaactaggtagtttgttcacataacaaatctacattcaaagacatgcaaacaaattttccacttagtccatttttctgttctcagcattactacaaatgcctcattctgttatcacgttgaattcttcagcatcttctatatcatttccagggcatctctgggaagtagtgatgcctgtcttccctcagaagcacactgataaccccaatatacccacaattcacacttttttccttctctgaggtatgctgttttttgtcaaaacagaaaaaacacactactaggatatgaaaaacttcattctgggcctggttaggtcataaactacagaaccttaggtcatatattctcaccgggcgcttgtttctccactgcaaaaaataattcgtatttgcttggtcctttgtagtactttactgtttataaatgtagtacatttatcttcatgatgacccttaaatttaagtaaggtagtattatgctcattttatagaagaaattcaatctcaaagaggatacagtctcccaaagatcccacaagcagtaatatattaggcagagctaaactcacacactgtcactcaatatcctaatattggtacatgccatgctaataagtgtgctaaaatggatgaagcggcaatttctcaggtcccttccaatgatcctgtcctctgcttctacttgatattttttctctctttcaactagcattaacatccgaaactgtatatcatcaccacatttcatttaccatggttttttaatttaattattctttaaatttttctatttccatgttaaatccagagaaattgttactttttggaaagtttctactgctgcctgcctctgaaggccacgggacttacctgtttgtttgtcaaagcagaaatgcccaacattttgtaaacactaatttttttataactgtaaagatgattattccatacttaaaaccaattcaaaataaaataaatcctcaatacttcttattccctggggtagtaattttaattagattctattgattcattattttctcctgtgtgcctttatttgggaaatactgttagtttaccttgctatcgagtctctttccctaacaagaaaatgtcagccttacgagtcaggaaagcttttactttcactatcacatatgaagaatgaactaaacacctaacttggaaagtaaaacttaaatgagggattcaggacatttcccaaggggtcatctgaccaatttaagagttggtatgatgtgcctaaaatagcaaattaactcttctacttataataaaggtgcagatgtactgattagacatgctgacatgtacatataaaatatgcctaaaccaaattaaaagaaaacaaaatatattccatggcaatcttgaaaagtcagggagctcaatatatattaagagtatgcgctcagccaggcgcggtggctcacacctgtaatcctagcactttgggaggccaaggcgggtggaccacaaggtcaggagatcgagaccatcctggctaacgtggtgtaaccctgtctctactaaaaaatacaaaaaaaaaaaaaaaatgagctgggtgtggtggcgggcgcctgtagtcccagctactcgggaggctgagacaggagaatggcgtgaacccagaaggcggagcttgcagtgagctgagatcacgccactgcactccagcctgggtgacagagtgagactccgtctcaaaaaaaaaaaaaaaaaaaaaaaaaaagactatgctctcacaatgagagcattaaacatttggtaattaacataatttaatatgccaaaaatgagaaaatagtcaggatgagggatgaggagtacacataggaaatttttgtgattttcttcattttgattgtattgctttcttgtcttcaggagggaagattttgacttcaaaagtaacaaaatatttaagaagggaattcacatctttctgttctaattggtattcttgcgctattttctcagcagtccatgtttctggataaagtttatgattgttaagaagtgtcagtgcttctacaatggaaattttgcctttgggaatgctcttaatatttatcatatcaaagtgatgacctttcagcaatctgaattcctttggctcttgatgtgtttcagcagcttttacctgcgcggaagacacaagatctttggaatcaacatacacatcttttagaaatggcagcagcttgtcatctttatgagcaatctctcccttaatttctggatagagactaatctgctctcacaggaggctgttggtagaggggtgcctgggagcaggagagggcttcatcttgctgatttcccattctgctcggttctctcggttggaatgcctgatcctgcgagtcactgcagcccccatctcataacatgatgccctcaggtttacgccacttgtgggaacactggcacaggaagcctccagggcgtctggagcatgcacacatgtcctgtgattctttatatcttttatttttatgccatggtacaagttgtgctttacagagcatttgggtgaataactagaaatatgccatagattcttgaggctttgcctggttcactaatgacaggctccagggcgtttctcagggagcgtgttagcatgtttctaggaccagccacatcagccagacctggctctgtacagacccaaacctgagaatgccatgtgagacctgtgtgactgcagaatcaaagtgctggttgcgaggtgccaattacatgttgaatttcatcttcaacccaactctacttacctttcagggagtgatgagtagggggcgagaggggaaaatgcagaaagtgttgtttgaggcccacagaaactataaagatgaagaacaggagaaacgtagttaatcatgccctggaaagctggcctgcagaaagaaaaggaatttatctctgagaaggccttcagaaagaaaatgagtaggctccggagacgttcatctgtcttcgtgcagccataaaaagttatcaggtgaggctgaggggtgaaggcgctttctctgatccctgaattggttactgaggcccacagaagaggaaaggacccctgaagccagaaactcccccaaggcaaatcaagactttatggaatcagctctgttactgcaagacatcccctcaaactcccgtctcagtctgtgtgagaagcgtgcatgaattcttgctattttcttgatattttcaaatagcagaatacatgataaacttgtaagtccacagatgagtcggtaagctgctgccatatggagcatgcaccagactgaggtctttggtgacagctggaaagactggctctgtctcatttcagcagaatcagaatggattcgaaggctatccagtggaagtgctcagaattgcgctggaaggctggagaaccagaccaaaaatcagagggatctggaaacctgagggctataggctgcgtccaggcgcaggaagtctggcatggtgtcctggacactggacacagctatccctggcttctctctacctcgtgctctggagtcaggcagaaacctttctactttctggagttgctgagaaggttcagtgataccagcatgaagctcctagaagaagggctggtgcatagctgctgctcagggtggcacagcccctccacagtcctgcccacatgtgagttgccccttcacaccactccctaacactgccctcaccaaagatgcaagcctggtatctcaaccagagaggcatctttcaacatggcaagcaagattactccaaaaaaatgccacttaccattcctttggtgtactgcttctagaggcaaagtttactgcttttactgtcatgaaatagactgtgacttgttatttatcatttatgtgaccaattatagttacaatcatgttccatgtgacaatagaatctttccccccttgaacctcacattatgctgagatgtaggatgaagaggagggttgttgaagggtcatcaccgcccccatcctatgccatcagcagtgggtggtgagtagttctttctcttcacccacctccccacatgtgagaattaagctctgaccatcaagaattgagaaaactctcggtatagttttccaaacacacgagtcatattttctaatggtcatcatttgcttatttgtttgatgaatatttattgagggcttgctaagagccaggcactgtgctaggcactggggactcgatggggaacaaaagagacatgatccgtgccctcccagagctggccgagggggcagcagtcagcaaggacgcaaacaagaattctatttccagttgaggttagtccccagggagtagcctgctttagattgggggtcgaggaatgtttctacaaggaagctgagactggcagatgagaaggaattcgcttgccaagcatgaggaagagtgtctcagttggggaggagagctgtatggagccccaaaaggcttggcctcttcaaggcactgaaagaccaggtagcaggaagctggttagcagtgaagagaaccatggtagacctaggcagggtccatgccaggtaacaccactgggcacttacaaaggaaagccattgaaagcttctgtttggagcagggaatggcatgatccagtgtatgttctttaaaaatcgtaggccactgtgtggatggtggattttaggggcaaaggtggaaataaggagctggttagaaggctgcgattttcacctggcaagaggtcagggtggcagaggagacagagcaagtggacagtatgtctatgtcagtgaaggtgcggtgaccggtgccactcacacgtaaggaatgcttatcctggagggctgggagtgatccagtgtcatctcgatgcaaagccccttgcacagcacatccacggtggcactctgttaatagtggctgtcattgcataaagagatggccaaggagatgaaccacatgaaaaatgagcctccttctccccaaatcctcaagtcctggtcagtttactctaaatcaaagtttccagtcgtcatgatgagtatgatcatcatcattattatttttaggcaacagaacccatttctaaattgaaatatgcttcagttgactcaggggtgaggttcctggaactccctcttggtggcttccataccccctcactggacccgtgggctctaaagaagccactgctatggaaagttgtattctcagaaggttgcccagtccatcaaaggctttcactagatgctagttatacccccagtaactatgaacaagatgaaatttttaccctcaagacttccacagccccaaacaggtcaacacacacacacacacacacacacacacacacacacacacacacacacgtgcacacacatcacacccctgcagcactgtatgcatacgtgcccagagtatctgtgctgaagaggtcaagacaggtttcacagaaggagtgacccccgaacaagtattgaaggaatttcccacgtggacaaggaagatcaggcattcaagatgaagtcagatggtgtcttgggctggattctcaagaagcagaccctgagatgagggcatcatgtaagcagtttatttagggagatgctcctaatgagacccagaaataaatgggacaggataggaaagaggagaagggaagcaagggtgagatttcagggaccatcttagctccaccctgatcttgacctcggagttggtcctgcctggaagcaggggagctggggtctcacactcctgtatctgccagtcattggttggggctgttccagaggtagtaaccccaagccactttaccctctaaaagtgaggcaggcctctagaagtgaaggcatgacaaacctgggggctgggcaggccaaatcaagagaggggacccaaaaggatctgggcagagaaccgagtcttggccacagatggaaatgttctgcactcagagcttgggtgctgtgctcagtgtgcgtgtccatgtcccattaagatgaatgacctcattgtgtgaggtgtgctcgaatctgctgaattcctgtgaagtgctaggcatgtgctatgattacctcctgtcactctgacatcacccctgtgaactaggcactacaacttccatcttctttggaacagaggctccgggagtgaaggagcctgctggatgccccacagccggtcagtggaagaggaatttctggccacagctctgcctgttggcgagccctgagtctcccttgaccccttacccctctggcctgtgctgtcctgtagcccagagcccacacacagagcaggtgggaggaatcgcattcctgggtggtagacagctgaccctctgtcttaggagtgacccttggctctaatggcctcaggagcacatcatgctcagacttatttggtggtcagttggctttggaactcttcccattgtgtcctggtccttaactagatgcacagatgtgcagtcaaggggagaatgaagactcctcgggattctccatcgcttgaggtaaatgagctccatccctctctctctcaagagcaatgtgaggattatggggagtagtagatagtaaacctctcagcatggtgcctggtgcatagtaagtactctacaaatgtgatccattaccagtaacaggaattagaaagcccagctcattcctctgcaaactctgacagagaaagggattttggaaacatgacacctggcaggcatggggcatgtttgacatctctgttcatcacagcacagacttacagtgccagtcttgccaaatgtacagtttattttctgttcatttatgtcgtctccataagtctccctgtgcctctgaactggcttgccttctaggctgagttctgagagccatctgaggcatggttctgctgaaaacatttattccagccccaaccaccctgtctccctcctccctcccccacacctgcactggctattagatggaatcagaatcgggtggaaatgtcatctcactgtcacagatgttattctctttccacttcttattttatataaattccttccttctattgagacaagtgtgtgatgttgactgcagagagcatcttgcccttgtcattgaccttcagctggcctaggtctggagttgaacctcctcttggatggtattgaccgagctgtccctccgtctctggaagccctccatccagcagaagcctgggtgagatgtactgccattgtgatcatattctcaggccttgtggagacatgggcattgccagctgttacagtaggcatatttgcattgatcagaacataaaagtttccagaaacacagaagtgaatcaaatagtgtggtttaggttcacccactgcctcagactggaagctggcttctggccactccatgacaccagcttggcaacctcaggtacgttaaattctacagaagcaggcagggtgccagtgtctggacctgtctcaaaggcctgtttgccctcctcaaaggcccccttgagacagatcctcatactccccattttcgtctgttttgttagtcagcgtccagtgtgtgagccctccagccagggtccgcaccaggccatcagccatcccttcactggccagagctcctgccttccccagctcagcctgctacgaccctcacagccactcccccaaaaccagcagacttctcctcctcctcagtcaatcttctcctttcacaccacctcctttcttactgaaagcgtggatctaacctggggaaaccatttcccccgcagccctctcacgggggctttttccttgtactcccacattcagttatctcttctgacctagattcattttgcagtgtactttgcaaaatgcaaatcacatcactgccctgctcaaaatcctccagtggcttctcattcctcttaaggtaaagcatggagatcttactgcagcctccagctcctgtctctccagcatatcatgaacatcttcccgctgcttcttgttcatcctgttggctccagttcactgtccaatggcagtgtctcacccttgccaagttcactcatgccaaagggggtttgcacatcatgttccctctccttggaatgatcttccctcccttgtttagctggtaaacttctgcttgtcctttcaccttcagctcaaatggctcctcagggaactctgttcactcccatgcctctatcatgaggatcttttatcatcatgaacttctcctttgtagcacttccacagttataatgatgcatttatttttctaattgactagtagtctctagaagctggaagttctgtgaaagcaaagactgcctgttttattcatcaatgaatttccacaatgtctagcacataggagatactgcagacacatttgttggttggttggatggatggatggatggatggatggatggatgaatggatggatggaacgacggacagacggatggacagagcagatggacaggttgattgacagatggataggtggtggatgggcggatggacagatggatggatggccaggactcccccaaaagatataacatttgcaaatatatttttgaaggagagagaaaataatcacactcagagactccacttcaaatcccacatctcttttgttgcaaactgagtcgtgttcatacttcatctgattttatagcagaaatgatgttgaatgtattaatttgtatattcatgaatcatataatgaatcagtgccttggttcaggtgacaggaatgcatgcattcatgtctttattgtatacaaatcacagtttactggagtccgtagacaggaagatttatcattaccttaaagagtgagaaggacctagaactgggactctgaagtatacagctgtggttttaaaactctgttttgttggagccatgggttcccttgagtttgttcagtgcagctgaggtcaggttagggaggaacagggcttagaaagaggggctgggtcaggtgcagtggctcacctgcagaactttgggaggctgaggcatgcagataacttcagcccagaagttcaagaccagcctgggcaacatggcaaaatcctatctctacaaataataataataataattagttggctgtggtggtgtttgcctgtagtcccagctacttgggaggctgaggtgggagaatcacttgagcccacctcaagtgattgaggctatagtataggttgaggctatagtaagccaagattgtaccacttcactccagtctaagcaacagagtgagaccctgtctccaaaaaataaaaacaaatgggggctgagtagtctgggttctagctgcccacctaagaagctccattgtatacactgggatgctataggaggttgaaaatcactatgtttccaagagctcagagaatgattaattctgctgaaaacaggagtaaggcaggcttcttgggaaagcagatattggagcagagtctctcctttaaaaaaataaaatggttttacttgcctttaaaatgctcaatttaaaaaatagtaaaacgtagaaaagagaaataatattcataatatcaaaaaaacacctgtttactttaaagggttcctactgtattgctgcaaagctgaagtcttctacgtattagataatctttttattttttattttttattttatttttttgagactcactgtgtcgctcaggctggagtgcagtggcacaatctcaggtcactgcagccttcacatcctagattcaagtgattacaggtgtgcgccaccacacctggctaatttttgtagagacggggtttcgccatgttggccaggctggcttgagctcctggcctcaagttgatccacccgccttggtctcccaaagtgctggaattacaggtgtgatccaccatacccaacctatttattttattttattttattttggacggggtcttgctctgtcacccaggctggagcgcagtggcacagttacagctcacttcagcctcgatatcccatgctcaaatgatcctcctgcctcagctccccaaatagctgggacgacagttgcatgccaccatgcccagctaatttctgtgtttttgtagagacaaggtctcactatgttacccaggctcatcttgaactcctaggctcaagcaaccctcccaccctggcctcccagagtgctgggattataggcatgagccagcatcttctgattttttaacttagcataataaacatcattttcccacattattactatgttttcaaaagtatctaaaatttggaaatcaggcaaaaagatgattacatatcctttcagtgtcatactggagcatcccctcgcccctttctactcaaagtgtggtccacagaccagcagcatcagcatcatgggggagattatttgaaatctaggctctcaggccccattctagactctaattcagaatctgcattttaatagagttcctcatgtgattcttatacacagtaaaatttgagaagcactggtggaggtcccaaattctgtaaagttacctattaacttacggaaggctgataagttataaatgactcttgccagtaaagataaaaatgatttctgtttgactgaaaatatcccaaaggttagaatttattgccttgtagggtattagccagttttgtatttgatttagtaatctgatttcagtaatttttttcctgtgactacacatttttttctggtctttttaaaactagctttgccaccctgctgacttcctcaataataaattaaataaatctttgccacgtattcactatatatttgtatgagaatcatgtttttaactttttgaaaattatgctttgacaaccagctttctgtcatcatttttaatagttctgtggtattctattttgtgattgaccatagtttacttatctattgccctaatgttagacacttaggatattgctaatttagtaccaatataaataattctgcagtgaacatctttgagcataaaactttttccgtattttatatttatttcctttgagtaagttttcaagtactgaattaatggatcaaagggtatgaacatttttattttattttttaattttttatttttttaagacagagtcttgctctttcacccaggctggaatgcagtggtgccaccttgactcactgcagcctccacctcccgggctcaagtgattctcctgcctcagcctcccaagtagctgggactacagacatacaccatcacacctggctgatttttgtatttttagtagacacgaggtttcaccatgttggccagactggtcaagtatgaacattttcagatgagcaataatgagcttgtcaaatggacaaggatggaagggcatttcaggaggcaagagcagcctgcagagaggctggggaccaccggtctcacagaggagaggcctctaactggctagaatgtaaatatgtgtcctgggagcagctggaaaggcaggaaggagaccagagtatgaaggccctggtgtcctgaattagatgctcagcctaaaggaaagtcatggatactgtaaaccgagaagtgacatgatgagacctgtgccttagaaaaacaactctatcagcaaggaggcctttccaagcctcctgaaatagtgctggtgagagaagacgagatgtgagccaggaggtacctgggatggaaacaagaggatggagagaaaagttgtttagaaaggtgtaggggcttaaccaaggatcacccagctcattggtggtgatgacgggacctgatcatcagtgcttcttgcctctccatgtcgtccatgctgctgttccttccttagagttttgttttttaatctaagatatgacttcctagagctacaggacactcagctcatcactcacagatgagtttgagagttgtgatgtgagagaacaggctctgccaaagcatggagcacgcatccaaggggatgaacagcatccctaaaaataataagagatgaagcccacattccggggaagtgacagggcattcttgtggaacttgacagactaaactgtagctgctactttaacctctgtgtccacaaaaccagacctccaacgtggcgttgctggtatgcagatttcagtgtccctaagaagccatctgggttagcacagggggctgggttttacagctaaccccgctgagctcagtgtctcagtctgattcatagtcaacaataaggtttagcagacttttctcacacccaggtgctttcacagaactgccacatttccctatcagaccgccatttcacagaggaagagaaagttggttgcctacggttgcaccaggaccagattaaagccagcgctcctccctctccatctttcctaacagttcctcacagttcatctgtacaagacaccatgagagattccaaatgcaggaagtgatttgatccacagctttttaagggcaggaacccaaagacatgagtctgtctgcctttaaagatgagagctgctcatttgaactagatagaaaatagtggatttaggatgacagacttcagagcccactctgtcctaccacctcctaccagtaaatgttcttccctgagaattgcctattatctgaaaattgctctttttaataaccccaagctggaaataatctccatgcctatcaataatagcatgaataaataaacagtggtatgtccacacagaggaatactgtacagcagtgagagtggacatgccacagcctggagcaatttcccaaacataacagtgagagaaagaaaccagatgcatgcctgtaatcccagcactttgggaggctgaagcaggtggatcacctgaggccaggagttcgaggccaggagttcgagaccagccaggccaacatggtgaaaccctgtctctatgaaaaatacaaaaatcagccgagtgtggtggcatgcgcctgtaatcccagcttcttgggaggctcagacaggagaattgcttgaacccaggaggcagaggttgcagtgagttgagattgccccaccgcactgcagcctgagcaacggagcaagactccgtctcaaaaaaagaaagaaaagaaaagagaaaagaaatgaaaccaggtactgtagttcatacatcatcattccattcatagcaaggacccaaagaagcaggtgatgctaatccaagctgttagacatccttggtgggggtggggactggaaggaagggggaagggagcttctagggagccggtcaccttctgtttcttgatctgagtgctggttacacacatgcatttagcatttggtatgtgaaaattcagcgagctatacacttaggatacctatacttttctctatgtatattcgacttcaataagtaatttttaaaaagtaaaaagagctgggagtggtggctcatgcctataatgccagcactttgggagctgaggcacaagaattgcttgaacccaggatgcagaggttgcagtgagctgagattgcaccactgcactccacctgggtgacagagagaaactctgtctcaaaaaataaaataaaaactaaaaagtagccagccatgcacaacctcaaaaaaaactccctacaatgatgctaacaggaacactccatttgtcaagggcggactctgtgccagatgctatgctggggactctgtgtgcattaccccttttcaatttctgggaaggcactgttctgctcctgtcttgcggatgagaaaactgaggctcagaaactgtggtggcctgtgtgtccatttgcctcatcccctggcacacgcacacactctcctaccccagctgcgggaatggaggcaatgaagtagaggtggtctcattttctttccttatcaccagggaagagccagtaagtaattcattcagttgacaggtagcctataaagaaggccactgtcaaccaggcactgcagtgtggtgatgacaagctcagatttgggggtttggggttggctaagagctgggttcaaatcgtgactgtgcatttgaactacacaatccagagcaaatatcctctctggacctccatgttcccctctgtaaaatgggtgtggaagacctcatagggctgttgtatgacttagacaagagattgcaaaaaaaagcataaactgacacagacaatattcaataagtgttagagagggatggaagccaggccctaaaaaggttaaataagcagtgctaggcattataacatcagtattgtgcccagtcactgcttgggcttgagcaaggggctggaccagtgggcttcagcgatcagtgaggcttcttgacagaggattgaactaggtttagaaaagactttcccaaaggggaatggacattccaaagagatggcaaagcttggagaaagacctgtggttggccagcctgtctggagccaaaggagagaatgactgcccagagctgtgatttttttgtcttttgcagtgaggagcttaaatgggacagtggtgtattggggagagttatttggtagcagaagacgcaatagatgctttgaattctgcaaaaccaaactcccctgtgaccagtggggataaagcagagccgaaggggacaatcagaagtgagcactgatacatgtttaacaatcagttctctggcaggagggtaggggtgccctgatttgtttgccaaatactcccaccatagcccatttcaaactgccattgcaatgtcactaggtacggagttaggaagagatgcacagttgcctctcatgagctgatatgagccagttccacataccactgggtttcaggaaaagttgggaaaacttgcctcattggaacatgggctccaattgctgtggctcccatgggaaactacagtacagcctctcgaacgagtttctccaatgtgctaggccctaccatgagacccaagacagactgtgtcctaactctagtggggtccacagtctactggggaaactggcattaatcaaataattcctctaagtgacacattgagctgaacacttggaaagaagagctgccttacatgcagagcactcccgtgttctttgtttcaaagctgaaacaaaaggtacattgtcgttatctgttctgaatcaagaacatagtgtgtcctctaagtttttcagtacacttttgttcacttcatgatatttaaatcagggttgttgtcattacaaccctttcaagacctagggcttggatttcaagtgccttttcaggtgccagtgaaaaatccatcagtttgcaaccagaaaatcgttcagcggagcttatgtatttatttattagtaacaacagtctggatacttctctgtagttctctccaaatgtcaagcccaggctgggctccatcatgctctgcgcacttctgtttaggaaacgttttcagctggcactgtggctcgtgcctgtaatcccaaaactttgggaggccgaggtgggtggatcacctgaggtcaggagttcgagaccagcctagccaacatggtgaaaccctgtctctactaaaaatacaaaacattagccaggcacctgtaatcccagctacttgggaggctaaggcaggagaatcgcttgaacccaggaggtagaggttgcagtgagccgagattgtgccattgcactccagcctgggtgacagaacaagactctgtctcaaaaaaaaaataaaaaaggaaatgttttcactgttgcgttgcctcctaggtggtcttcgaggccctgcacaatctggagccccgtggctacgtcgtggggtggatcatcgccatcagtttgttggtgggaatcctcatcttcctgctgctggccgtgctgctctggaaggtgagtctggtgattgcaggtccccctggggtccccactcatagatgcccagctctcctgcctttccagggaagaaggagtatcctgttagagcttccttcatggcaccggtacagtgaaggacagtgacccttcaggcagggagtggaatcttggctccccttgaggccattcacaactgaggatttggaccacttcagagtgaaggcaaaagtctcagttctctcttctcttaccttcccttagagccctaacataggatggtgagaacctaactccaaaacagaagtctggggagcaactgccagaagggggcgatttcccatttgcttaaaaaagatcagaaggcgaactatagaacaattcttccttcttttcctctaaggaatgtgaggaagatttctgaccagaaaacttgagtaactgagatgggctacagtccagagtagcttcatcataacttctcccaacctcatggtggttcatttggaggtggcccagggtgcagacctgtcctgcctcaagcatcactctctcaaggagaaaggggtgtcctcatccccatgtctaggatgatttgtttgcctcacactctcctttcagagacccggagtccttttccttcagagcctctctattcatcagtaatggtattggaggctttagctgatgaaggtctgtctcttccttgtttccactgtgtccccagctccaaaacagcaccagggaccataactgcaacttcctgacaccaaagtccatacttctctagaattacaaatttcagatgtaggtgaaaacagcctcttagagtattatagatggatattttaaaataagacaactaatttctttgggattacaaaataatatgtatgtattgacctaacataacatatcaattaccaaaaaaagttgtaaaacaccaggagttcacatcccagaaataaccatgatgagcatagtattgcctcattttgacctttttctctgcatatatagatatagaccaggcattctcataacatcaacttatttttgaatagtgtattagttaaattttacagtaatatactcagcatattttcaggtgaagtacctctaaatttaaaagcagtgggttcctttttttttttaagtatggggtcttgttctgtcacccaggctggaaggcagtggcacaatcatagctctaactcctgggctcaagctgttttcctgcctcagcctcccaagtagctgggactacaggcatgcacaatgcctggctcatttttttatttttttgtaaacatagggtctcactatgtttctcatactggtcctgaactcctggcctccagctatcctcccacctcagcctcccaaagtgctgggattataggtgtgaaccaacgcacctggcctggatttgatttattaatctgggaaaaacgtatacctatttttccctgaagacagtactgtgaacatctttccatattgttcaaagcacgtttccagcacatcttaaagctgtagagtgtctgcagtctactcatccagtcccctgatactggaatttaggttgcttctgtttcacacttcttttaacagtgccacattaaatatccctggagccaaatatttgcacaaatctttcattatgtcgttaggttgaaagcctagaaatagaattgccatcaaaaggagtgtatattttaagctttttaaaaattatatttatttttttattttgagatggagttttgctcttgtctcccaggctggagtacagtggagtgatctcagctcactgcaacctccccctcccgggttcaagcaagtctcctgcctcagcctcctgaatagttgggattacaggcgtctgtcaccacaaccagctattttttttttttttttgtatttttagtagagaccaggttttgccatgttggccagggtggtcttgaactcttgacctcaggtgatcctcccgccttagcctcccaaagtgctgggattacaggtgtgagccaccccgcccggcctaagccttttattactattgcagattgccctgtagaaaggtcataccaattcaccctcccacaagcagtgtatcagaaatgtctgtttgccaatagtggatgttaccttttaaaaacaatctgccaatttgttgtttatttaatccacatcgccagatagattcttaattctcctttttctccaactccaactccttcctgctgagacagcctctggtttgtgggtggagaacaaagcctgctcagtgtttggcatctgaaaagacaaggcttcttgctgagttgagggctttggtgcatgagtgtgtgtgggtgtgtgtgtgtgtgcgtgcgcgtgtgtgtgtgtgtatgtgacttccttctgcctttatatgggctcttaaaatgagaggagctgtgtcctttatggctgggtgtgtggaaccagacagggcacagagtggggagtgttgtggccgtgccccacttccccttatagtctgcatgccctccttctggccgccccacctggctctgcctctcaggggtgtcctgtctcctctgcacagcccctgcctcctccagcccaccacctgctttgccttgcttttgctgtgtttgtttaaaaaagcatggttgcaggagatgctgtcatgggtggggagaaccctgaggtcacccagctgtgtgggatccaaagagccaggacctgagaaggcagactctgccctctgccacagactgggagggagagggcagtcacggccgccagggacacaccgtgtgcccagaccagggcttgccgtaactaacgggtggcaggaaagctttgaggaggctgttgaatgaggccacctgggtcacaacagctttgctagtcaacccagagcagtatctcatttcggctcacatttctcgaacgcttactttgccccagtccttgctttgcctggactaggcactgggatgcagcaataactgtgcccttccctgcacttgaccgcctcaccacctagcaatagacctgcaggcataatggagggtggtgagtgctgcgcagtaactgctctggaaactgagaagaaggtgccatgagtccccctcccttgcccccaaggaggagggaggattaaaaggtcacagagaacagtgtggtagatgagagcagctttcaggctgacagctgtgggcagcaatcctgactctcacacttgcctgacatgaggccttaagggggctgcttaccttctgtgaccctcagtttcttcctctgtaaaaaggagaccatcacctccagtttggtatgtagaggttatgcaaggaaaatgtttagcactgcgcttagcacacagaagccaggggatatttcataaatgaggtgtcattcgagtctgacctttagtgtggtttgagttttccaggcagggaagggtagatgaagattccatccagagggaaggaagaggtgggaaaataagcagggtttgtggagagcagcttgtaaagtttgtcagggcagtcactgacctgcagcaagaccgtctgccacagttgtgaaggccactgctaaccaggacaaagggggagcatgggaggtctgtgagcagagcggtggcatgaccagatctgtgtcgagagagagatctggggctgggtgcagtggctcatgcctgtaatcccagtgctttgggaggccaaggccagaggtttacttgagcctaagaatttgaagttgcagtgagctatgatcataccactgcaccaggtggtagagcaagaccctgtctctaaaaggaaagagagatctagggacagtgtgggggcaagagtagggccattgccatgggtcaaggtaggacaggcagggtttgctgaccagttggacttgagaggtcagggagaaaaaaagaatagctgtctctccttaagataagttcagacaaaggatgggtgcccttaatcagggtggggaaggcaagatgcgaattagtttggcaagaggaggagcttggtgttgggctttctgagtgagtggtgcttagaggaggctaggagacaaggctgggcttgcctcactccctgtcgcccccacccagcagaaggaaggtcaacagaaggaagccccttctctctacttggctacacatccgcatcattctcttcccaccgcagaccagctttctctatgtttccctacacatcgtagggagatagttgcctccagcccctccaaacttgcatctcaaggactactagccacagacgcagaatgatcagccacctctgattcctggtcccacatatctgggagagaggatctgcctggcccagctctagtcaaatgtctactcccatcaactgtggaagggaggaagggagttgggagggagagaatccacctggcccaatgtgggtcatatgtctcccacggaggctagtgggggagaaagatgcaggatggtggtttaggggatactggggaggagactctcagaaaagaaaacaattaggcaggcaccccaaaggagttcgctcctgcaggatttcatcgttgttagtgctgctgctgcctgaattgcaggctgttgtatcataccagctagctatgctgcatacaaactgcccccaaattgaatggcttttcacaaccattacatctgacaaatttctgggtcagggatccaggaagggtttggcggggtgattcttccgtcccacatgacattgagtgaggtcacttagtggcatttacctggtggctaagctggtcttcagagttcaagacagcttcattctcatgcctggcaccttggtagggacagctggaaggctggattcagtcaagtccttcttcctctccatgttgactcagggcctctccatgtggttcttccagcagatggtctgactttttatgtggtggcttaggctgaaagagagcgctgccagttgtcttaaatgctagcccacagctggcatagcatcatttattctgttggtaaaagcagtcatatgccagctcaggttcaagagaggggaaatagaccctgcttctcaatgagaggagtggcaaagccttagtggctgtcttttatctgtcacatacatgatgttcgaaatatgggcaaaatcttttctttttttttttttttttgtggcagtcccactctgtcactcaggctggagtgcagtagcatgatcttgactcactgcaacctccacctcttgggttcaagagattctcctacctcagtctcctgagtagctgggattacaggtgcctgccaccaagcctggctaagttttgtattttttgtagagacggggtttcaccatgttggccaggctggtctcgaactccaggcctcaagcgatctgcctgccttggcctcccaaagtgctgggattacaggtgtgagccaccgtgtcttttccctaaaagtcactattacaaacaaaaattcgcctaactagaagttttgttctattttaaagtagatgaaacctcatctctctcccatagtgtcatagataaaatcacagttgaactcctttggggaagaggaggcaaacagaaaatgttggtgcagcatttatgtcagagtgtgcagtctgttgaggcagtgttgtaatgtgataaggggcttggtggaggggatttctttagggaaaaaaatttttttttctcaaaaggctaactatgacttttgagacttataaagtctcaaaagactttataagaggttaaaagggcaattgaaatgtaggattattttaaagacctacgtatttctagaacttcaactacagacctcttgttaactctgattcccatgtctacaacctaagaatgatacattatgtttagtgaatagtgattcggtatcacactgacagtacggtgcagtaacccaaagacctgttaattgatggtctaaactccagcctcatatttgacttatacgggaggtcttaatgtttccggcttattgccatattccatatgtaatttcctccattcctttcaaggggaaagccactgagtgttacccagctgccactgctgaccggttgcccacttcactgagggcctttgaagacagcggttggcggggacagtgttgaagtcctcttccctttacagaaccgtggctcttgaatgtccttctagagtagctcttggcattgctacctatggtcatttgctgctgccttgaggtccggagccaaaagtggttgttcccaaaagtgttgcataaacgtgaatcgtgacatggtactgaaagctgagcagagcagctggccatgccgccgcattcacagcaccacacaagcctgaaggtctgcatgctttatgcttgcaagatggccagcaccttcactaggcaaagagtagtaggtccctactaggtggcaggccctgggcaaagggacaaagataaataaacaacagccctcacctagtctgtttcttttttttttttgacagagtctcactctgtcacccaggctggagtgcagtggtgcagtcttggctcactgcaacctccgcctcccgggttcaagcaattctcctgcctcagcctcctgtgtagctaggattataggtgtgcgccaccatgcctggctaatttttgtatttttagtagagacagggtttcaccatattggccaggctagtcttgagctcctggcctcaagtgatccacccaccttggcctcccaaactactaggattacaggtgtgagccaccatgcctggcctcaacaacagagccctcacctagtcttgaagacctttaggaaaatcagcttcagcaaagccctgaaggtgagcaggacttggcctgtgccaccagcccctggccccacctacgcatgcactgtggtgctactgtttacctaaatcagaaagcccttatcgtgtcagcaagtgtcttttccagagctgagctccaggctccctgctgatgtgctcagccagaccagcccctcatctgcctctgaccctgtgcagctcctggcggccttcaagaaagcccatctgctggcatctcaggcatcttctcatgcttggcggcagcaggccctggctctgacacaaaatccacaatgagggccccaagctaaccagaccgctcttcaaattctgaaatggatcctaatcagctttcccaaagctgagatgttagcagacactgggagccataatttaaactttatgtgcgaggattacagtagccagccaaaccaccatgcaggaagaaaactttgaaatatgaaatgcttttaaaggaagaaaagtccaaatgagtcccctctcctttcctgcagctcctgactgggttggaagatgcctgggcctggcatctcttcaagacaatcataaaggcctgtttaggaggagaaagttaaattgctcagaggtgcaggagggataacaactttgtgtgtgactggcacctttaagaaataccttcagcttatataagccagcctggtttctgtggaaagaatgaagatgatggggtgtttctccttttgaagaaagacaccccccttcccttatttagggctccaagctcttccctccctgtctttctctctgcttccctctcaccctcctcccctccccagctctgtccttgtttgtttgcagtttgccaaaacatacaggccaccactcagtgaaggagagagaccatatcctccctcactgctgtcaaccaaggaccctctctctcccatttgacccttttgcaaaccgagatggtttggagcaaagggaagtgagactgcttggccagccctatggccatgtcttcccaggaggcccaggacctacttgctcaagtggcaaagagacaggctgcagaatgtgtttgccagccctctgaaaagggctgcctcaaaccctctatcagctggggctgttccaagagcctgctgctttaggactggctttgggctcatggtttttatttgagagcattacttctgacctaaggcagaaacacttagaaaacaaatctgtgaaatggctcagagaatgtgtaaggtttggcaacccctccagaggtcactgggttatcaccttcccttcaaactgggctgggagggcatccttgcttctcctccaaagaaaaaaaatgaacagacacatgcccatgtgcttgcacacacacccttcacactgcctcaattagaaccatgtgccaatgacattcagtgggggcttgtttatgcttgggagtaaatattgggctgatgttgcactgtcgacatctcgagacagagacatgctatgtaaatagtcaagtaactgaagagaactataaacatgaagtcttgagttagtccaaaaaaggaatttgtcccaggtcctcagaatcactgtctaggaagcaacccaaaggccgcggagtgggtaggatcccccaagagaccagatgtcatggtgttgtccagctggtccctctcaccctgcagggggctggggaggaagaggctgctgctgcagggtggataccccagaactcagtcaggcctcatgcctcacgcagcacccatctaagtaaggctgtttggggcaatctgttgtttccctaggagttttctggttgcttttggatacatggttatatgagaaaattgtgtatgtctgttacgagggttcagggagctgctctttggagctgcaggaccagcagacacaaaaaccagaaagcacactgttccttcggcttccagccaagcaaagcttggcttgagtcacctcctctagggtttctatgtttcttctgctacagatagaacagttaacagagccgcttgcccctcaaatggtgaagcaagcactggaaggttccagaaaaaatgcagaaaaacattgactccattggcttggaagtgagtgtggggctgctgggcatccagcttagcccatcattaatcatttcccagcaccttcagggtgggctcagctggcaacaaaaacagagatttgcccagtgtttctcaaagctctccccaaggcacccatgcgtgctcacatgagcgggtgtgtatgtctgaaggaggcctacttaaccttgggatgtgctaatttcccaagtgtagggggactttgggtcctggcagtaatggaataggtaggactggctatgaagtactatagcaggctgaaggggctcgtgggtttcctggcatgtgtatgaagagttacagatttagaccatgtatctcttaagcaaaggaactacaggtgctccttgacttatcatattttaagtcagaaatgcatttaataccccaataaacccatcataaagtcaaaaaactgttaagtcgaggtatggtaacttggggattatttgtacttgttagatcatcaaattcagagtcactatctttagtttagtgtttatctttagtctttagtttttatattttatctttagccattatctttagttgaagtcattatctttacttaaggggatgacaaaaaccttgctaaatttagtttttcacttcctcattcctgattgacattctattagaaaatgttagctaggaagacctgttctttatttattgacttgcatttattgagaactgttgggaataatattgtgcctctagggcatttagaagataacatgcttttttctggttcttgcaaattactttcggtgacttgttctcatgggttgcttattttgagtttttatttttagagaactgatattttttctgttcttgatgaggtaatcaggcagtctctatgttacatgagttaagagtcctagacttacttagcaagtcctcaattctgacacttattataagacatctgatccagagctgcatgttcaactccatcaagccttgcctactttcctcatcggtaaaattgaccttaaaatcccacagttcaaaagactataaaagttaaataagtgaacataactgcatgtgttttgtgaattcaaagacctcataatcttttaaaatattattaaattctgttttatttgtttctttcaaaaattaacagatttttaaaaattgaaaattgaattttcaaaaaatttctcaaaaatctttgagaaaaattgagatgggacaaagactctgtgccttgttcccccttagtgtgagtcctgagtacccagctgtgtggcccacagtctagagccttgaattcactttggggaaaacagaaaaagctgtcatgatgtttcagggctggaagaggtctgagaatcccattgatctcttaggcagagacgaagacactatggctcgaagccagaaaataaccttcccaggctgggcgcggtggctcacacctgtaatcccagcactttgggaggccaaggcaggcggatcatctgaggtcaggagttcaagatcagcctggccaacatggtgaaaccccatctctaccaaaatataaaaattagccaggcctggtggtgcagacctgtaattccagctacttgggaggctgaggcaggagaatcgcttgaacccgagaggtggaggttgcagtgagccaagatcgtgccactgcactccagcctggcaacagagcgagactccatcccccacccccccaaaaaagaaacaatattagtttgacagagccaccactagactatagggtacctttgtgcaaactataatagtaaatagcaccgcttcctaaagactctttacttccatctgtcagaaaaaattcagaaaactctgattttatgagaacaagacactctactgccatctgttggaaaacagttataataaacttatacacatacatgatatctgtgatgtgagtggtatcccccagccccttaaatgcagtgtagcacctgcactactgtacctacaactccctagccatgagagtgcattatgttttaagaaatggtcttcagactctaaaaaaaggaagacatacatcagtggtagctctgatctcccatccaagagattacgcataggctgtgttaggaacaggactggagaccctgcagtgttagagtggggcatagagcttgcaaggctgtttcagccaggggtgggtgggggtgattttcaggcctaatgctgacaccactccactgagagaaagaagcttgcttccgggtgcctgcaagagatgacagtgccttcaccttgttgttagcaagaattgcatacataaaaacttgagcacatgaaagccacatgtaagagtgagttcaggtgctctaaatcctttccagattgttaacacactgtctatgtcaaatccttacactagcatagtgatgagaaagtgagccagcttttgctcttagagatgaacaagagaagtctggttcaggccgggcgcggtggctcacgcctgtaatcccagcgctttgggaagccaaggcaggcggatcacttgatgtcaggagtttgagaccagcctggccaacaagatgaaaccccgtctctactaaaaatatgaaaattagctgggcagggtggtacacgcctgcagtcccagctactcgagaggctgaggcaggagaatcacttgaacctgggaggcagaggttgcagtgagccgagatggcgccattgcactccagcctgggtgacagagtgagactctgtctcaaaaaaaaaaaaaaaagtgaaaagtccagttcagcaaggcacactaactgatgctgtttaaatctagagccctatcagctgtctgtctgattcattaagtcagcaaaaaaaatattgagtctgtaccagttaacttatgctacttgacaaaccaccccagtattcagcggcttaaaagcaatatccatctatgcaggtcacagttctgtgggttggctatttggactgagctcagtggggcagtttgagctcagcgagacttacatgtgcctctgcgggcagctgggagttggctagtctgggagggcttcaaaaaaaactggtctcttagcaggttagacataggcatttgtgtggaagcagggcagggttctgagaaagtaattggaagtgtgcacagccccttggggactgtgtaacagacacaacatctcctccctctcatccaattgtcaaagctagtctcagtggagaatcaaggctgggaaaatagactccacctcacgatgggaagagctggagagtcacatggtaaagggtgtggagggtatgtgggcatctttgcaatttatcgctggtaccaaggacaggtgagatgctgagtactggggattgaaagcacaaagcctgccttcaaagagtcctaagacaaatgcaggagataataagggggcagactgttaagtttctgcttgatagtgccatggtagggaaatgtgacttctctggaattacaactgagtgacctgggattattgacacattacaacatcagcagccaaaggtatgtgctagagaatcctatttccctgttacatccttccacagtttcatgattacattctccttcatggcatgtgaccagccacatctggccatgttttcttagccaaccacatctttatcgcaaaagaatgacatttcaagcagtagcttcttagatttccattcagtcttggtccgtttttctggccttctgtgggtgtgctgtggggatgatgtctatgactttttcttaattatccagaaaattctggccaagcaccttttcttgcagaggggagaaggtgaagaggtttcaggagagaaaagtatatgtgtgggggcgtcagaacatggcattctgatgaatgtggtcttatgctgggaagaaacctccagggctgaaatcaccaggaactcaatatctgtttacaaaactggccttgaggattgaagctcagaacacaagactcttgccagttgttctaagaaagcttctgctctttcccagtcattcaaactgcaccaccttatcgacttcccctcacggtgaatgctcaggatctccttggcaacgtgggtgaagatacctgctggctctcttgacagttctcgtctttggcttggccaataaaccccctttagggaagtagaaagatggtggcaacagacagctcctcagctccacctgccttcccttcttcaggggagcttatgaccatcagggtggctgtgatgcttccctggatgtttggctcacagtgaagaagcatgaggacaaatacacagacaacaaaaacatttgatgtgcccatgacagctgggtttgcttcacgatttgtgtaggacacgtcttatatgtgcatgcactgttggcagcagactgcagagagtcttaagggttttccaatatgacttgggaattgcaagctgatgataccatggtaccacaacctgcagtgtggcaagcctaccagcaccaggtcaagtgtgtgtctctgtttgatttcctctattcaaggggattgaaacaatgatttgagggcaagtcatttatttggaaggtgatctcaggaaaaactgttggagagcagggaaggaagccaataaaagatttgtcatcaagctggttacctctgcaggcaagctccatggggaaactggtagaacgtacacctcagggttatcccacccaaggagagagggagctggggtatttgtacacccgatacagtcagccttgtttaaaggaagatgcagagaggaatgtctgacctcataaacagagcccaccaatgttagtgagccaaggacgagagatgccgagtctctcagagcatgggaggaaaggtaagctttgggctacaaacgttgcttcactgtttggtggtgatgactatgtgagaaaaactagacacttgtcttaccatatgtgaaaagttgtaagaccaaatgtaacatcaaagggcagggtcttttcagaactaagctagaggaaattgccatcctgggtcaggatgaaacgcccgttctaagtgagaatgtgctgctgactgtggtgcacagacagcacaaattccatgggtttgagagaaagatgtaaatgacagcaaggtagaatgcagacctgcagacgctttaaacagcctctcacgtgagagcagtatttattaaattattccacagatggctaagatctctcaagatactaggtttatcaaaagccaaataagcttggggaatgtcaggtccctggtttttttccccaccggaattaatggtaatggatcctttactttccactgtacattaagactctctaaaaaaaaaaaaaaaaaaaaaaaaaagccacacttcccaaacttatttgaccatgaaaccttttttttttttttttttttttttttgagatggagtctcactctgtcgcccaggctggagtgcagtggtggcacgatctcggctcactgcaacctccgcctcccaggttcaagcgattctcgtgccccagcctcccaagtagctgggattacaggcacacaccaccatgcccagctaatttttgtatttttagtagagacagggtttcaccatgttggccaggctgctctcaaactcctgacctcaagtgatctgcctgtctcagcctcccaaagtgctgggattacaggcgtgagccactgcgcccagccatgaaacctttttttactcccaaacacctttgaacagctctcagtaactggtattccccagcacacagtctggaaaacactacaccagatgcattttagaaggaacaaacagcttacgtaatatcacccgcaggaagtccatgcattttgaaaaatgtctccacaggatgtttttcttgccagtgttttctctaatccgaggggtcctccaagcctccccagccctgtgagtgcaggtcacacctacccagggacagactgccttggggtcacaatggctgattcttcagcacttctaactcagcttctctttctttctgcctttcagatgggcttctttcgccgaaggtacaaagaaattatcgaagctgagaagaaccggaaagagaatgaagacagttgggactgggtccagaaaaaccagtgagctgccacaccagtcacatgacctgatcactagcctgtcatccttggtctttgtatcttccatatttggaagaaaaaaatcttctccagatttttcggaggccccactgatgctgttctcttcttcattctatcaagcccaggtgccagcctgaggcagccacttcggccaggtcacacgaccggggccagcaccacttcctttaaagatgaactctgaactttggagagtgagctacagagccgagcaatatttatggatgcaacacgcatggtcaaccctcaggggaaaactgttacctaaagtatttttataaatataagccttttatactgattatgtcttttatatttgtatcgatgttttattatttctattaaatagttatataattcactcaagcactgatatctggcctaaaatcttggaagtacatgtccatgaatacaaattttaaaggatgaaaatcttaccgtactttggaacttgctgtttaaaaagacagatgaaataagttgaagaaacctcatgtaatgaatccaccaggctggcagtggtgcatataaactgtgggtgtggcaagaccccgaagacatttcacatctttatcgcctcgatcaagtgtggagtcacatgctaatgtgtgctaaagaactgtaagtgttttttcatatgtacttttcattggaagattcccaacaagaatttggatggaaaacctgatccctagcaagaagtctgctctgtatcacctttatatagcagacatgtcaccctgcttctacacagatgatggatgaaagcttggagcaatgccatgtggtcatctggtaaacctcagaatggcgtctcatcctggacatcctgcatcagagttcacacaccacaaggactaaatccttgtcccctaagcaaagaattgggtctgaatgctgtgagggattgcctttttgtggtaattttcattgagagatcttcatttcccctaccaccctggctgtcccagctagtggtgattgcagattccttcccagagaggacatttaaccgttttaaaaaaaatgtcttagattgggttcccaagaagcagtccctgaaacaaggatttgtgtgcaagtaacttattaaggaagtattcccaggggataccagtaagagagtgggggaagcaggacaaggaaggagacaaagccaggcaaatgtttgtcatttcagggagagctccatgaagtttagcctcagcctgatcaggggaactccggaggaaaagttaggcctcagaggtgtcccaacctgaatcaaggggctggctgcacccagaggagatgtaaacgttttattctcaattcctgctggcgtaatggctccagtagctcaggacagtcctctaaaggacaaccacagatgcatcctcagccaggggagacacagggaaatgatgcaaaagaaatgatgcaaaggatctgagcagaacactgcccctccccaccccctgaatgtgtgagtgctgagttacggccttcagtatccaagctctctgtttgacagtagatatattgtcagatgcactgtgctgcttagttttgagtgcagtgtgattttctgaaagggcaatgagatgatggatgtagcatgctcagcactgacctggcccatagtgatcactcaataactgttaacagctatggctgctattcctactgatggataaccatctaataagacagaaaacatggggctaagagcagggtctaacggagtcttaatggcttattacagcctgccaaagtgccagctacatacacatggcatccagtgcggatgaaacaatctataaaaccaagggtctttcttatagcaccttttttactggaagctaacacgttgggagtccgtgaacattgtcaaaaagacatcaaactcaacttctgggaagacagatttttaatacacatacttggctaatactcacaaacatatctaaagttttggcaaaattatgagggtgatgggtgggtactaacctggcatggagcaggtgtgtcttttggtttcttatgcagttgactctgctgcagggagattacagatgtaacctcatgcttctcttcctggtgaacatgggaatagaccaaaaaaatcaagggtcaatggcatgaactaagctgatcctggaaatcagggatgttgcatctaactgtgggatggaggcacagaggtagctacagggagcaggatgaggcaaagaaagcagctgtcactcagagttcgcttatgagttttatcaaaagcagcaagaaaagcagtcttgggtgggttttatcacttattaacagccatttatgaggcccctgctgtgtgtcaggcactgtgcaaggtgctggaggttccccagagaacacttcagggacattttgcctcagggtggcaaaatgcagtggcatgtggactttttgaatgggatgccatttgcagctttcctttgatggactcttgttcataatgccatgttttctttaatgaatcatttaggattcttaggtgatatttctggaacagcaccatcaacagctttggccacatgcacttagagcaactaacttgcctcctgccggggtgtaggtgcgttggtgacagtgtagaagggtgattcgcaggcccatgttctgcccaccagcaaagccccactggagaagggtagactcctgtgggcagtctcagagctgggacctatttgcttctgcttgattctgcgtgggtggacccacatgagcagctgtatacccaggaggtcactaagactttataaaggcaggttttaagaaaaccagccttggcatcaccaccagcagatactgaaagcctccccaggaacctgtctggggaaggatgatgcctctgctggtctgatcgtgctgagtagcaggtgggctacggggactggggagttaagcattttgtgcagtgatagagaagtcaagcatatcgttagcgctctctcaacttgggcagttcacaagctccttcccagctcagaagccctctctatgctctcaggggaagcagatggggtggatcagtacatctgtgttacccttccagaatattatttgaaaattctacagtatgttctactttctccccttcctgcttccatggtttcactgtggaatcctataagatattctcctgagcagtattatttcagtttccttcagcttttagttgaatcttcaatgtggttttaaccaactgttcagagaactgaaatggtttttaaatatgaaaaaggacctttgtaaaaatggagtaaaacagtgccccttttttaaaaaaagttttgcttatgcttaatttacataggactcaggagagtttggaacatcctccaagtgggccatagagctgtcacaaagaagaggccatgatgtttagaaacaaggggacactagcaggaggggcagggtccactggcttagtggcaactgacaggcatccattccgaataactcagcactgaggtttcctcaggcagttctttaggaaaactgtcagcatcatgggtactcagaggtatggtagaccttgtagaagatccactaggaagtcctccttcaccaaatcatgtagctactgcccttgagccaaaggcaatgaggtttaaaacaaaaacccaacagcactcctgggaacatcctgttttccatgcggaagcatagcagatccccagacgatccgtgtgctgtatgctacctgttgaaccctagcatggtggctttttaaaaggttatttatgacttttatttttgggtaaggcattatggccaggtgcatgcagttatgtctgggttacgtgtgaaacgtacatctggtgaactgtatacttggctcaaacttctcaaaatttagaggtgctggaaaggattgtcacttggagcctttagtagacaaaaggcagaaagtgagcatcatttcagaaatgctttagtatgcacacttttagctgatattttgatatatagaataataatatacacagtggagaatattcaaagagtggctgaagggagaatacagagccagtagggccaaaatgaaacttctaggatgtcttctgaattttcagcacatggggggaataagtgaacaaatttcccaacatcgtgcaatgctttatagcacaatgatctagatttcagactgtgttaaggttttttctttgttgatgttgttgttttaattctaatgtgcacggtgtgactggcagagtgagtttaaaagctttacgagtgattaattgcttggcaggcacccacgctatctgcatttccagaactttactgatgcatccatgtacatttccactgaggaattttggtgggtggggggaggttgtgctgcctcacaatgtcacgtgtattaaagtctaagcagtcacttctgattcacttgcactgtttgggaaatgtcaggtttacaaaaacatacatgtttggaataaaaaatggctgcaaacaattcagaagttcaatctgtaatttacttgctaataagaactttttaaagtgttgaagctagggtttcaatgtaatacaacatgagcattaaagagaacatcaaggtccatctaattcacatgaacaacccacctgatgtggctgaactgtctgcagtccttggcctccacacaagaggtaccacctcctctctgcatcaccctgactcccctggcccagggctacacctaggttcttgatcttgagataaatgtgcccaaattaaatggtatggattccttattatcagtagacttctttcacatgtgcctgccagttactaagcatttttccagaagcattttgataacattcttacacatttacaaatattgtattctcttaggttttcactctccttcatctgtctattaatagttatgttcttgttcatattccacatgctgttcatttatgtgtttttttttccctagacaagactgttaccagataggggttccaatccagacaccaagagcaagttcttggatcttgggctatcaagaattcgaggctagtccctaaactgaaagcaagtttattaagaaagtaaaggaataaaagaatggctattccatagacagaacaggaccagggctgctggttgcccatttttattgttacttcttgattatatgctaaacgaggggtggattatgcatgagttttcagggaaaggagtggacaattcccggaactgagggttcctcccctttctagaccatatacggtaacttcctgacgttgccatggcatctgcaaactgtcaagacaccggtgggagtgtcttttaacatgataatgcattataattagcacataatgagcagtgaggggaaccagaagttactcttgtagccatgttggttttggtgggttttggctggcttctttataacagcctgttttaacaaggtttttatgacctgtatcttgtgccaaccccctgtctcatcctgtgacaggatgcctaacctcctgggaatgcagcgcagtagctctcagccttattttacccagcccctattcaagatggagttgctctggttcaaacgcctctgacaagaccaataaagatctatgtattttcttggtgtttttcaagagtaagcctttggctgtaccaatcaagtctactgggttttgctttctatttcgttactgcttttagatttattaaaatttcttctattgcctgatggttaaaattcatacacatagacaccacacagtataaaagagttatgaaaaaatatacaccaatgggttaagaatgattgtctttaggtaagtgagattgtcaggcttttgctttgttttattttgtttttatttgaatattcgttttctacagtgagcatgtattttgtaacaatgaaacatatgcagattacttgtaaataaaattatatctgggagactataaattgctaagccaaaagagatgccacattgtaggtctggaaagagatttgttgcagcaaagagcattgatgagcctgacacttatgacaatggtccagtgagtaatttcaagcattttaattccagtgcttcctggcttaacaaacctgccaccattactaatgctaattaaataggtttctctgaggttgcccaacctgttttcctaagccaggaaatggactcgacaaactcaaaagaatcaaaagatacaaatttaagaggaagaaaaatcactaattagtgaagtctgcttcctattcaatcaggagttttacagctcaccagattacctctcatccttaaagtctgtctggtcctcaggttactgtttagtaacagaattgatgtaagaattacttagagctcaggctgcactatcagaccgactggcagctatccatcagcaaagccacctgtccctaagatcatgtccgttcactctatgtatacatgcaactaaagtgtgtataatgagatattgccatccctgagctgaaatctaaggctgcctgctgccaaatctctgctttgcttcaaagtccaaattattttatattttattttaaatcagttttttaatcctaaaaattaaacctcaataaagggataactactatcctttgaagacaaccaattggtattttaaaaagttggcatttaaaaaagaatctccaggaaatgtttcttctagaagatgactgattaggaaaaaatgaaattatctccaattccacatctactctgaacccaccttatcaggagaatatttggctccatataatagaaaactccgaattaataaggccttaaacatgataaaagtgtgttcctctctcccaaaaaaagaagcagaagctctggtacagcagctccatgggcatcaggaatccagctcctgtctttctcagcaccctcaaggttgcctcatggtctgagatgactaccagggaactagctatcatgtccacattccaagccaaaaatagaagaggacaaaatgacatatgccccctcccttttaactattcttcctagaagttccatataacgctggccagaaattaattatgtatgtagatatacccacccactaaggaggctggggaatgcattattaaggaataagaggagggtaagtgttaagagacaactaccagttgccacaccctccactgagaaaatattcagactatagctgccttgagctctaaacttgtacgcttcaaatccttaagtctggctggatttaagcaagaggcaaacctttatttgggctggagtcagggatggggtggatgcatggagctggttaatcatattcatgtccatacaaagccctttcttcttttatgtaacttttctcctttgtgtccccaccctcactcacattcccctctctcccagaggaaccaagtctaataaatacatgcccttaaacatggatgtacatcatattattttttatgtttcacttaaatggtattgagcacacactgttttatttttccaggttgtattgatgttgctgtgtttacatttggttcattgtttctggctacagcattacattctacattatgttttcagcacatttcacttctccagcccctctgaaggaagcctttgctgctttcactgcctgctgcagtgaacactcacatggccctttatgggtggagctagaatctcatggtatctatcatatatatgacatctgaaggtggttggttacgttctcatttcgttgctagattctctctaaaatgaccacagactggacactcccagcaacagtgtatattcccacatccttgcccaaaatggaattatctgacctaaaatgttagaattacttatctttttctgatgaaactgaacattctatcattatgcactgatccttttttatctttagtaatactttcttatcttaaagtctattttgattagtatttacacaacatatctttttccatccttttattataatctttctatatccatgtgctttggatgtgtcatttgtaaacatcatacagctgaatgttaaaaatccgttctaacacaatctttatcattttactggaacatttattttatttacatttattgttattaatgaaataattggatttatttctatcatcttttgtgttttcttttgtccacctttttatacttttctctcctttctcttctttgttttcacattccattcttcccctccattattcacttttattctttatgcagataacagatactttaaaactttaagccttacaatagccaggcacagtggctcatgcctgtaatcccagcactttgggaggccgaggtgggagaattgcttgagcccaggggttcaagaccagcctgagcaacacagagagacccccatgtctacaaaaaaaattttagctgggtgtggtggtgcacacccatagttccagctacttgggaggctgaagtgggaggattgcttgagcccaggaggtcaaggctgcagtgagctgtggttgtaccactgtactctatctagcctgagcaagagtgagaccctgtctcaaaaaaaaaaaaaaaaaaaagacttatacaatatcttacttatttaacatatcacaatctagagttagtcactagtcactatcttttaatgtattttaattttatattttaaccacataaatcattgtttttgctgttttctttaatgaatgccagtctagatttgcccctatacttgccaccttcttggctcttaattgcttcttgcatctcagatattttctcctggcatcattttccttgtgcctagtacatcctttagaatttccttcagtaagaatctgctgatggcaaatgtttccattttgttttatctgaagctgtctttaattgcccgtattcttgactctttgctggtacagaattctacatcagcagttactttcagtggatgaatataacatttcattttcctcttgttcctgttgttactataaagaagtcagcagtcagcccatttgtcactcctttaaagggatcctgtcttttctcttaggtttctgtgaagattttctctttgtttttgtgtgctgcagttttcctctgaagagttatatggcatttatgcttaccttttctgcttgcaatttgctgtacgtctgtggtttgaggtctttcatcagttctcttcatctctttaaatattatctctgctccattctctttcctctcgctttatccttcttgcctctttatctaccactcctagttccatcccatcatccctctgtgcagcattctggactatctcttctagcccatttctgtattcactatcttttcaacggtgtcaaatctgctttgagacttgtttgttaagatttgggtttcaattattatattcttatatccaaaggcttttagttctccctcaaatatgatgggcacttctctgtattttcttgtttattgcatataatttcaaatttatttctttaaacataaaaatcatagtttccattttgtgtctggtaagtgcaatgaagtttttatggctctgtttctgctttctaggatttttcccctgatgatcgtcactcttggtgcttggtttccttgtgcaactagtggtttgttggtttgtttattgttagctgcttattttccttgcaaaattacttgtggtaattctttgaggtccaggatgaaatatgttctatagagagcctttgctttcacctctgccaggcaccagtctggggccataccttgaggttttatggaccacccaaataacatgaatttgaacaacacagtcatatgaaggccagcttgtggttgccacttctcagcatccctgtcaactcctgtgatctgctctgcaccatggcaactttcctcaaagttttccttggtcctccaggagtactagtaggaatagcgtttctccatgtggttgaatcttatgttgaggttgcagcccttggagatgctgctttatgggtccctgaacccttcgaggccatgaaaaccaaacttcacttttgtaaggcttgccacatgctcaggactaaaatgattgaagccctccacttatctctctgcctcgcagacttcattccaactttggcttgataatttcatactttcgctatctttttgatacatttaagaatatgtcgttcaaaatattttattcttcatttttagtgttttgttgtggtggttgttgggagaattggtctacttctcttcctggatcagaagtctagatatctgctttccatgtatctagtttcctcatctctctctctctctctctctttctctctctctctccctctctctctctctctctctgtgtataacatttttattataaaacttttcaagcgtacagaaaagttgaaagaattctacaatgaacacctaaatattcaccatctagattctaccatcaaaattttactatattgggtttatcacatatctacctatccaggccaggtgcagtggctcacacctataatcccagcactttgggaggcagatcacctgaggcccggagtttgaggccaacatggagaaaccccatctctactaaaacaaaaattagccaggcatggtggtgcatgcctgtaatcccagcactttgggaggctgaggcgggtggatcatgaggtcaggaattcaagaccagcctggccaacatggagaaaccccatctctagtaaaaatacaaaaattagctgagtgtggtggcaggcgcctgtaatcccagctactcaggaggctgaggcaggagaattgcttgaactgggaggtggaggctgcagtgagctgacacaggacagcttaatgaaaaagaacaagcagctcaaattctacatttttggtttaaggtaagtttgtgcaacaagatactgtctatgatggggctaaaagaatctttatcagccgggcgcggtggctcacgcctgtaatcccagcacattgggaggccgaggcgggcagattgcctgaggtcaggagtttgagaccagtctggccaacatggtgaaaccctgtctctactaaaaatacaaaaaaattagccaggagtggtggcatgtgcctgtaatcccagctacttgggaggctgaggcaggggaattccttgaaccagggaggtgaaggttgcagtgagccaagatcgtgccactgtactccagcctgggtgacac

SEQ ID NO: 5 - DNA, 4576 bp, Homo sapiens
ccgcccggcccgggacccgctcgcgcagacttctcgggcggactgaggacgccgccgctcggggccgcccctgtgctcgccttcagcgcccgctcagcccgccgtccgcgccccggtggcgggcccgacgcccgcattccgcccgcgggccccgcggcccgcgcgctcggcgccctgctcgccgggcagaggggaaggcggcggccggctggggatgggcggcccggctgcgccgaggggcgccgggaggctccgcgcgctgctgctggcgctggtggtcgcggggatccccgcgggcgcctacaacctcgacccgcagcgccccgtgcacttccagggccccgctgactcgttcttcggctacgcagttctggagcatttccacgacaacacgcgctgggtccttgtgggcgcaccaaaggcagattccaaatacagcccttcagtgaagtctcctggggctgtgtttaagtgccgtgttcacaccaaccctgaccggagatgcaccgaactggacatggctcgagggaagaatcggggcacgtcctgcggaaagacctgccgggaagaccgcgatgatgagtggatgggggtgagcctggcccgacagcccaaggctgatggccgtgtgttggcctgtgctcatcgctggaagaacatctactatgaagccgaccacatcctaccccatggcttctgctacatcatcccctccaacctccaggccaaaggcaggacgctgatcccttgctatgaagagtataagaagaagtacggagaggaacacggctcctgccaggctgggatagcgggcttcttcaccgaggagctggtggtgatgggtgctccagggtcattttattgggctggaaccatcaaagtgctgaaccttacggacaacacctatttaaaactgaacgacgaagtgatcatgaacaggcggtacacctacctgggctacgcagtgaccgctggccacttctctcacccgtccaccattgatgtggtaggaggtgccccacaggacaaaggcatcggcaaggtttatattttcagagctgaccgaagatcaggcaccttaattaagatctttcaagcatcaggtaaaaagatgggctcttacttcggctcctccttgtgcgcagttgacctgaatggggacggcctctctgacctgctggtgggggcccccatgttttctgagatcagggatgagggacaggtcactgtctacatcaacagaggaaatggagccctcgaggagcagctggctctgactggggatggtgcctacaatgcgcactttggagagagcattgccagcctggacgatctggacaatgatgggttcccagatgtggccattggtgcacccaaggaggatgacttcgcaggggcggtctatatctatcatggtgatgccggtgggatagtccctcagtactcaatgaaactgtctgggcagaagataaatccagtgctccggatgtttggtcagtccatatcgggaggcattgatatggatggaaatggctatcctgatgtcactgttggagccttcatgtccgacagcgtggttcttctcagagcaaggcctgtcattacggtggatgtctccatcttcctcccgggctccatcaacatcacagcgcctcagtgtcacgacggacagcagcctgtgaactgcctgaacgtcaccacctgcttcagcttccatggcaaacacgttccaggagagattggcctgaattatgttctgatggctgacgtggccaaaaaggagaagggccagatgcccagggtctactttgtgctgctgggagagaccatgggtcaggtcacagagaagctgcagctgacttacatggaggagacgtgtcgtcactatgtggcccatgtgaagcggagggtgcaggacgtcatcagcccgatcgtgtttgaagcagcctacagcctcagtgagcatgtgactggagaggaggagagggaactgccgcctctgacaccagttctccgctggaaaaagggacaaaagattgcccaaaagaatcagactgtttttgaaaggaattgccgttcagaggactgtgccgcagacctgcagcttcagggtaaactgctgctctccagtatggatgagaaaaccctgtatctagctttgggggctgtgaagaacatctccctaaacatctctatctccaacctcggagatgatgcctatgatgccaacgtgtccttcaatgtttcccgggagctcttcttcatcaacatgtggcagaaggaggagatgggcatctcctgtgagctgctggaatcggacttcctcaaatgcagcgtgggatttcctttcatgaggtcaaagtcaaagtatgaattcagcgtgatctttgatacaagccacctgtctggggaagaggaagttctcagcttcattgttactgctcagagtggcaacacggagcgctctgaatccctgcatgacaacaccctcgtgctgatggtgccactgatgcacgaggtggacacgtccatcaccggaatcatgtctccaacctcctttgtatatggcgagtccgtggacgcagccaacttcattcagctggatgacctggagtgtcactttcagcccatcaatatcacccttcaggtctacaacactggcccaagcacccttccagggtcatctgtcagcatctctttccctaatcgactctcatctggtggtgcagagatgtttcatgtccaggaaatggtggtgggccaagagaagggaaactgctctttccagaaaaacccaactccctgcatcatccctcaagaacaagaaaatatcttccacacaatatttgcttttttcacaaagtctggaagaaaagtcttggactgtgaaaaaccaggaatttcttgcctaacagcacactgtaactttagtgctcttgctaaagaagaaagtcgtactatagacatttacatgctgctgaacacagaaatactgaaaaaggacagttcgtctgtcatccagttcatgtcccgcgccaaggtgaaggtggatcctgccctaagggtggtggaaatagctcatgggaacccagaagaggtgacggtggtcttcgaggccctgcacaatctggagccccgtggctacgtcgtggggtggatcatcgccatcagtttgttggtgggaatcctcatcttcctgctgctggccgtgctgctctggaagatgggcttctttcgccgaaggtacaaagaaattatcgaagctgagaagaaccggaaagagaatgaagacagttgggactgggtccagaaaaaccagtgagctgccacaccagtcacatgacctgatcactagcctgtcatccttggtctttgtatcttccatatttggaagaaaaaaatcttctccagatttttcggaggccccactgatgctgttctcttcttcattctatcaagcccaggtgccagcctgaggcagccacttcggccaggtcacacgaccggggccagcaccacttcctttaaagatgaactctgaactttggagagtgagctacagagccgagcaatatttatggatgcaacacgcatggtcaaccctcaggggaaaactgttacctaaagtatttttataaatataagccttttatactgattatgtcttttatatttgtatcgatgttttattatttctattaaatagttatataattcactcaagcactgatatctggcctaaaatcttggaagtacatgtccatgaatacaaattttaaaggatgaaaatcttaccgtactttggaacttgctgtttaaaaagacagatgaaataagttgaagaaacctcatgtaatgaatccaccaggctggcagtggtgcatataaactgtgggtgtggcaagaccccgaagacatttcacatctttatcgcctcgatcaagtgtggagtcacatgctaatgtgtgctaaagaactgtaagtgttttttcatatgtacttttcattggaagattcccaacaagaatttggatggaaaacctgatccctagcaagaagtctgctctgtatcacctttatatagcagacatgtcaccctgcttctacacagatgatggatgaaagcttggagcaatgccatgtggtcatctggtaaacctcagaatggcgtctcatcctggacatcctgcatcagagttcacacaccacaaggactaaatccttgtcccctaagcaaagaattgggtctgaatgctgtgagggattgcctttttgtggtaattttcattgagagatcttcatttcccctaccaccctggctgtcccagctagtggtgattgcagattccttcccagagaggacatttaaccgttttaaaaaaaatgtcttagattgggttcccaagaagcagtccctgaaacaaggatttgtgtgcaagtaacttattaaggaagtattcccaggggataccagtaagagagtgggggaagcaggacaaggaaggagacaaagccaggcaaatgtttgtcatttcagggagagctccatgaagtttagcctcagcctgatcagggg

SEQ ID NO: 6 - protein, 1029 aa, Homo sapiens
MGGPAAPRGAGRLRALLLALVVAGIPAGAYNLDPQRPVHFQGPADSFFGYAVLEHFHDNTRWVLVGAPKADSKYSPSVKSPGAVFKCRVHTNPDRRCTELDMRKNRGTSCGKTCREDRDDEWMGVSLARQPKADGRVLACAHRWKNIYYEADHILPHGFCYIIPSNLQAKGRTLIPCYEEYKKKYGEEHGSCQAGIAGFFTEELVVMGAPGSFYWAGTIKVLNLTDNTYLKLNDEVIMNRRYTYLGYAVTAGHFSHPSTIDVVGGAPQDKGIGKVYIFRADRRSGTLIKIFQASGKKMGSYFGSSLCAVDLNGDGLSDLLVGAPMFSEIRDEGQVTVYINRGNGALEEQLALTGDGAYNAHFGESIASLDDLDNDGFPDVAIGAPKEDDFAGAVYIYHGDAGGIVPQYSMKLSGQKINPVLRMFGQSISGGIDMDGNGYPDVTVGAFMSDSVVLLRARPVITVDVSIFLPGSINITAPQCHDGQQPVNCLNVTTCFSFHGKHVPGEIQYVLMADVAKKEKGQMPRVYFVLLGETMGQVTEKLQLTYMEETCRHYVAHVKRRVQDVISPIVFEAAYSLSEHVTGEEERELPPLTPVLRWKKGQKIAQKNQTVFERNCRSEDCAADLQLQGKLLLSSMDEKTLYLALGAVKNISLNISISNLGDDAYDANVSFNVSRELFFINMWQKEEMGISCELLESDFLKCSVGFPFMRSKSKYEFSVIFDTSHLSGEEEVLSFIVTAQSGNTERSESLHDNTLVLMVPLMHEVDTSITGIMSPTSFVYGESVDAANFIQLDDLECHFQPINITLQVYNTGPSTLPGSSVSISFPNRLSSGGAEMFHVQEMVVGQEKGNCSFQKNPTPCIIPQEQENIFHTIFAFFTKSGRKVLDCEKPGISCLTAHCNFSAKEESRTIDIYMLLNTEILKKDSSSVIQFMSRAKVKVDPALRVVEIAHGNPEEVTVVFEALHNLEPRGYVVGWIIAISLLVGILIFLLLAVLLWKMGFFRRRYKEIIEAEKNRKENEDSWDWVQKNQ

SEQ ID NO: 7 - DNA, 4432 bp, Homo sapiens
gcgggccccgcggcccgcgcgctcggcgccctgctcgccgggcagaggggaaggcggcggccggctggggatgggcggcccggctgcgccgaggggcgccgggaggctccgcgcgctgctgctggcgctggtggtcgcggggatccccgcgggcgcctacaacctcgacccgcagcgccccgtgcacttccagggccccgctgactcgttcttcggctacgcagttctggagcatttccacgacaacacgcgctgggtccttgtgggcgcaccaaaggcagattccaaatacagcccttcagtgaagtctcctggggctgtgtttaagtgccgtgttcacaccaaccctgaccggagatgcaccgaactggacatggctcgagggaagaatcggggcacgtcctgcggaaagacctgccgggaagaccgcgatgatgagtggatgggggtgagcctggcccgacagcccaaggctgatggccgtgtgttggcctgtgctcatcgctggaagaacatctactatgaagccgaccacatcctaccccatggcttctgctacatcatcccctccaacctccaggccaaaggcaggacgctgatcccttgctatgaagagtataagaagaagtacggagaggaacacggctcctgccaggctgggatagcgggcttcttcaccgaggagctggtggtgatgggtgctccagggtcattttattgggctggaaccatcaaagtgctgaaccttacggacaacacctatttaaaactgaacgacgaagtgatcatgaacaggcggtacacctacctgggctacgcagtgaccgctggccacttctctcacccgtccaccattgatgtggtaggaggtgccccacaggacaaaggcatcggcaaggtttatattttcagagctgaccgaagatcaggcaccttaattaagatctttcaagcatcaggtaaaaagatgggctcttacttcggctcctccttgtgcgcagttgacctgaatggggacggcctctctgacctgctggtgggggcccccatgttttctgagatcagggatgagggacaggtcactgtctacatcaacagaggaaatggagccctcgaggagcagctggctctgactggggatggtgcctacaatgcgcactttggagagagcattgccagcctggacgatctggacaatgatgggttcccagatgtggccattggtgcacccaaggaggatgacttcgcaggggcggtctatatctatcatggtgatgccggtgggatagtccctcagtactcaatgaaactgtctgggcagaagataaatccagtgctccggatgtttggtcagtccatatcgggaggcattgatatggatggaaatggctatcctgatgtcactgttggagccttcatgtccgacagcgtggttcttctcagagcaaggcctgtcattacggtggatgtctccatcttcctcccgggctccatcaacatcacagcgcctcagtgtcacgacggacagcagcctgtgaactgcctgaacgtcaccacctgcttcagcttccatggcaaacacgttccaggagagattggcctgaattatgttctgatggctgacgtggccaaaaaggagaagggccagatgcccagggtctactttgtgctgctgggagagaccatgggtcaggtcacagagaagctgcagctgacttacatggaggagacgtgtcgtcactatgtggcccatgtgaagcggagggtgcaggacgtcatcagcccgatcgtgtttgaagcagcctacagcctcagtgagcatgtgactggagaggaggagagggaactgccgcctctgacaccagttctccgctggaaaaagggacaaaagattgcccaaaagaatcagactgtttttgaaaggaattgccgttcagaggactgtgccgcagacctgcagcttcagggtaaactgctgctctccagtatggatgagaaaaccctgtatctagctttgggggctgtgaagaacatctccctaaacatctctatctccaacctcggagatgatgcctatgatgccaacgtgtccttcaatgtttcccgggagctcttcttcatcaacatgtggcagaaggaggagatgggcatctcctgtgagctgctggaatcggacttcctcaaatgcagcgtgggatttcctttcatgaggtcaaagtcaaagtatgaattcagcgtgatctttgatacaagccacctgtctggggaagaggaagttctcagcttcattgttactgctcagagtggcaacacggagcgctctgaatccctgcatgacaacaccctcgtgctgatggtgccactgatgcacgaggtggacacgtccatcaccggaatcatgtctccaacctcctttgtatatggcgagtccgtggacgcagccaacttcattcagctggatgacctggagtgtcactttcagcccatcaatatcacccttcaggtctacaacactggcccaagcacccttccagggtcatctgtcagcatctctttccctaatcgactctcatctggtggtgcagagatgtttcatgtccaggaaatggtggtgggccaagagaagggaaactgctctttccagaaaaacccaactccctgcatcatccctcaagaacaagaaaatatcttccacacaatatttgcttttttcacaaagtctggaagaaaagtcttggactgtgaaaaaccaggaatttcttgcctaacagcacactgtaactttagtgctcttgctaaagaagaaagtcgtactatagacatttacatgctgctgaacacagaaatactgaaaaaggacagttcgtctgtcatccagttcatgtcccgcgccaaggtgaaggtggatcctgccctaagggtggtggaaatagctcatgggaacccagaagaggtgacggtggtcttcgaggccctgcacaatctggagccccgtggctacgtcgtggggtggatcatcgccatcagtttgttggtgggaatcctcatcttcctgctgctggccgtgctgctctggaagatgggcttctttcgccgaaggtacaaagaaattatcgaagctgagaagaaccggaaagagaatgaagacagttgggactgggtccagaaaaaccagtgagctgccacaccagtcacatgacctgatcactagcctgtcatccttggtctttgtatcttccatatttggaagaaaaaaatcttctccagatttttcggaggccccactgatgctgttctcttcttcattctatcaagcccaggtgccagcctgaggcagccacttcggccaggtcacacgaccggggccagcaccacttcctttaaagatgaactctgaactttggagagtgagctacagagccgagcaatatttatggatgcaacacgcatggtcaaccctcaggggaaaactgttacctaaagtatttttataaatataagccttttatactgattatgtcttttatatttgtatcgatgttttattatttctattaaatagttatataattcactcaagcactgatatctggcctaaaatcttggaagtacatgtccatgaatacaaattttaaaggatgaaaatcttaccgtactttggaacttgctgtttaaaaagacagatgaaataagttgaagaaacctcatgtaatgaatccaccaggctggcagtggtgcatataaactgtgggtgtggcaagaccccgaagacatttcacatctttatcgcctcgatcaagtgtggagtcacatgctaatgtgtgctaaagaactgtaagtgttttttcatatgtacttttcattggaagattcccaacaagaatttggatggaaaacctgatccctagcaagaagtctgctctgtatcacctttatatagcagacatgtcaccctgcttctacacagatgatggatgaaagcttggagcaatgccatgtggtcatctggtaaacctcagaatggcgtctcatcctggacatcctgcatcagagttcacacaccacaaggactaaatccttgtcccctaagcaaagaattgggtctgaatgctgtgagggattgcctttttgtggtaattttcattgagagatcttcatttcccctaccaccctggctgtcccagctagtggtgattgcagattccttcccagagaggacatttaaccgttttaaaaaaaatgtcttagattgggttcccaagaagcagtccctgaaacaaggatttgtgtgcaagtaacttattaaggaagtattcccaggggataccagtaagagagtgggggaagcaggacaaggaaggagacaaagccaggcaaatgtttgtcatttcagggagagctccatgaagtttagcctcagcctgatcagggg

SEQ ID NO: 8 - protein, 1029 aa, Homo sapiens; identical to SEQ ID NO: 6

SEQ ID NO: 9 - DNA, 23889 bp, Mus musculus
tgtccttattaccagttggggcatcttctggatatatgtccaggagaggtattatgggatcctctggtagtactatgtccaattttctgaggaaccaccagactgatttccagagtggttgtacaagcttgcaatcccaccaacaatggatgaaaaaagtgttcctctttctccacatcctcgccagcatctgctgtcacctgaatttttgatcttagccattctgactgttgtgaggtggaatctcagggttgttttgatttgcatttccctgatgattaaggatattgaacattttttcaggtgcttctcagccattcggtattcctcagttgaaaattctttgtttagctctgtaccccaatttgcaaaacacatgaaactcaagaagaaggaaggccaaagtgtggatacttctttccttcttagaatggggaaaaaagtgcccatggaaggagttacagagacaaagtttggagctaagatgaaaggatggaccatccagagactatcccacctggggatccatcccataatcagccaccaaacccagacactattgcatatgccagcaagattttgctgacaggacccggatatagcgctcttgcgtgagtttatgccaatgcctggcaaatacagaaatggatgctcatagccatctactggtggaacacagggcccccaatggaggagctagagaaagtacccaaggagctaaaggggtctgcaacgctataggaggaacaatgatatgaactaacaagtacccctcagagctgtgtctctggttttatatgtagcagaggatggcctagtcagccatcaatgggagaagaggcccttggtattgtgaagatcatatgccccagtacaggggaatgccagggccaggaagcaggagtgggtgggttggggagcagggtataggggactttggggataacatttgaaatgtaaatgaagaaaatatctaatgaaaaaaagaaaaaaagaattatcataagttttaaaggagaattcaatgcactttgctctgcctcatttaatgcaaaatttagagagcatgaattttacagatagatttgaaccaaatagccagtccaccatccatgatttaacaacacacaaaatgtctcactgtaacatctacaatactgtcttattttaaaatggaacaaaagtctagacaaatagaatcataaatcatcagagtgcacttctccttaagccacacttaatatccaaataaaaataactacaaaatattttcagttagcatgacatagtgtgcagggttgttcacatgcccattcatccatccatcaatcaatactatgtgatacacatcacacaccattgacatatgaccttatctttatctccagagagcagatgggcaaggacatgagacacgtccaagatttgctacaaaacgtagaactggacagacacttggatatctcggtcatcttccctttgtgcctaacttgaataagtcaaaggtcttctgataaccacagcctattccttctgaaggacgtatttacccatttgtagagatgatttcattagacaaattccagattcaaaaacagaccttcatgcctgggaatttagaaggtgaaagacttcccacatagctacggatatgtgccatgctttgtcttcaagaacagttcagtgagatgactcagtggatcctcttatgcccagtatccttggtaactagacatcccactggcatgagcagaaacacaaaattcttaactcaaatataaggggcactcagcaagtgaaaagtctagctctgtaaactggagtcattgaatattcattaccattcatatttcatggcactgtaaatctcataaaaacaaaaagctgttcaagagttttgggtcttgaaagaggtcactgcaggattgaggatcataagactcattgttctaggaatggaaactacttaatgatcacactacagggtcatttatccacagtctctgggggagttcatctctggctatccatcatctttgcttcccaccaaacctgataagctgagtttaatccctggatgctgcatgatataaagcaagaactgactccctgcaagttgtcctctgacctccacactcaggctgtggcatgtgtgcatgtgcatatacacaacaaacaaacaaacaaatgcaaattctgtgattattctttatcattttattcctttaaactacaaaatacattgtgaagtttcccagtcattttcaatgtatagcagagacataaagacatggagagatggctcagcagttaagagcactgactgatcttccagaggtcctgagttcaattcccagcaaccacatggtgactcacaaccgtctctaatgggatctattaagtctcccggttctggacacatattcacatgcacatgtgcacatacaccaaatactgttgccaaatataaaaatttgactttctgagaatttttactgatagcttcttggttaaaaaaacaaaaacaaaaacaaaccaaaaaatacaaaaaaaatgaatcatagggtcttttgtacaaaaataatcttttgtttagttaacaaatacccactgtgttcctacatgtgaagctgctaggcaagctgactacttcccaggagcctgggctccagaagggaacacgtccacttgtgcctatacaagagcagtgtggtaggtaggttcatgataacggtaacattgtgggccacaggagttcaggaaggacacctaactcagatgcaggtctccccaattgagtcctggaaatgaggaaccaactgaaaagattgttgtgggtacatccaggacaagggtgggatttcccatgtgaaaggaaatcatacaagtgaaaatccagtgcaatgcaagcaaagggggctgcgggcatcaaaagcaacacacttagctagagtgtaggatcctttattcagacaccaggacacggctgtggctttgggtctaaagctaacaccaagaatagctcaggtccctggggagggtgagtagagacagggtatgggggtactaagaattaggttctgggaggccaagtctaaatggggctgcatatgttggaaccattcagaatcctcccagtctaagtttacatgtttaggacagtttgaaagtcattagggaaaggatcaaggatggaacttgggaaaatgtttcaatagcaccattgatgggttactgcattgtccaaagacactttagttttgagtataccaggctgacacagcagaacctttgctgaaaattaacctgtgtggaaagaacattggccgcagacttgggctgaagccctgtggactgtcacactaagccctttgcattaactcatttgttgaaacatttaaagccccttctatgcaccacaaactatgctagaggctgggaacagaaggacaaagtataccccttcaagggactcagagtgtgaagaatagcatcgtaaacatgctgaagacacactatcaaaagcaatgttaaaacaaagttccaaatcagggtggccgtggagaaagtctgctctagggacagacaaagagaggctgtctaaagagaatggcaccagaatggaaccctgcagggcaaacagctggtgaagaagcagggtcaggtcttcaggacagacagacctgcaggtgcaagggcagagaatggtggttcattcagagagcagcgtgataagcacataggatgaagatgagaaggaagggggaggtttccatagtaaccagtggctggaccacaaagaggcttgtatgttatgttaaagcacttgcatgcggtaggagacggagagaagtctacagtaactatagacttctggcccaggggactatggggaaggggtcccattaatcaacatgagaaagcagaaccgagagggaacagagagcagcaggtgggagaagctgggagaagagtgaagtgttacaggaggtctaggaacacaggccaggaatggagagtgcttttttttttttattacgtattttcctcaattacatttccaatgctatcccaaaagtcccccataccctctccccccaccacttccctacccacccattcccatttttttggccctggcgttcccctgtactggggcatataaagattgtgtgtccaatgggcctctctttccagttatggccgactaggccatcttttgatacatatgcagctagagtcaagagctctggggtactggtttgttcataatgttgttccacctatagggttgcagatccctttagctccttgggtactttctctagctcctccattgggagccctgtgatccatccaatagctgactgtgagcatccacttctgtgtttgctaggccccggcatagtctcacaagagacagctctatctgggtcctttcagcaaaatcttgctagtgtatgcaatggtgtcagcgtttggaagctgattatggggtggatccctggatatggcagtctctagatggtccattcttttgtcacagctccaaactttgtctctgtaactccttccatgggtgttttgttcccaattctaagaaggggcacagtgtccacactttggtcttcattcttctagattttcatgcgtttagcaaattgtatcttatatcttgggtatcctaagttttgggctattatccacttatcagtgagtacatattatgtgagttcctttgtgaatgtgttacctcactcaggatgatgccctccaggtccatccatttgcctaggaatttcataaattcattctttttaatagctgagtagtactccattgtgtagatgtaccacattttctgtatccattcctctgttgaggggcatctgggttctttccagcttctggctattataaataaggctgctatgaacatagtggagcatgtgtccttattaccatttggaacatcttctggatatatgcccaggagaggtattgcgggatcctccggtagtactatgtccaattttctaaggaactgcctgactgatttccagagtggttgtacaagcttgcaatcccaccaacaatggaggagtgttcctctttctccacatccttgccagcatctgctgtcaactgaatttttgatcttagccattctgactgttgtgaggtggaatctcagggttgttttgatttggagagtgctttttaaggacccacacacagacaatcaaggaaaccatgctggaggtcagaggcccagagacaaaggaagcagcgctgggacaaggctcaagagcaggttcatgggggaaataggtactcaaggaataaaaacactgagatgtgggcagaagacaagaatggagaacctgagaatcagatggaggcaggggcattaccttagtcacaagctatggagaggcaagtgagctcacaggctttgcccatcggatctaacacatggaggtggctggcaaattcaacaagagtggatcacatggaatggtaggaagaatctgagaggccctggtagaggagccgtggagaacacatacagggtgttagaagcatggctaagagagcaaaagaatgcagggacatgtgagaggtgtggggtcaaagggtatttccagggcaggatgcaggggcagactgcatactgcaacaccatataaacctactgtcatactctgtggctgtgaacggaaggaagagaacgtgtgtctaattttcagtctttccattacaactttgatgttttctatctgtcgtccctgtacttggatgctctccagtacctggtaggcttcacactcatttccgttttgtgattagacctaaaaagcgggcctttttcaagtggtgatgagaggcccagcactgacacccagaaattctcagccaccatcagagaatgagcttgtgggggcgagggaggaaaattgcaagaggaaaatgggaggggtggaggagggggaggagagagagagaaagggggagtgagagagagcagttgtgatgaattagaggggtgagggagagacaagaatgggagcagagaaggaaagggaggaagagagatcagagaagcaagagggagacaaagaaaagaggctatggcacagctcagtgcgggagcttgtgcaaggctcccaattcagtccttggtactgcaaaacatgcttgtttttaagtaaatgtcagggtctgaaaatcgctaaaggaagactcagatagaacgcaaaaacagagagcatttattctgcagaaacaaccagcatgtgggggtcaaccattttatgaaatggggaccccaaacaaaggcacgcaagccttcttatagggaaccaggggaactctctagagggactgggaaatccaaaatctcattggtgggtgctagggtgtcacaagtggtctggagtcaatggcctgcattcctatgtcataaatgtttaaccattggctgagatagggctatccagtgcagatggcccattctaagatattttcccattcttgtggctattcctgggctgttctttggaagggggttttatatcttgttctggattttatggtctgttcctagacctggtgtcttatgacattgtttctgggacttatggtctgttcatggagctggtgcctgtggccttctttttaaaatcagatctgatccttaaatggagaaaaatagggtttatgttgtcctttcaaaataagttctctcatggtttgaattatataaggaaaaggataagagaatgggaggagacaagaaatacttttaaagatgggagaaagatgtctgagaggaggaggatgggaaagaaagggagagaatagaagagaggtgggctaggtcatagtaaactggggagctgtctggaccagtgttgctgctttctaaaggcacataacatgagactcttgctcgggcatgtgtctgcctgaactgtgtacagaagggaggctgagggagactgacaggtgctcatggggcaaaaggcagcggtgggaacaaagctataacatcagacccaagagagcatctccccacaccaaggagcttcatccctcgtgggcaggggcaagcagtcccttctgggaaccagaaccgagtaggagtccctagacactgaggctgagggcgagtggactgtgagagagtaaaccttgccaaggagccacgttttgggagcagggcagttacagattttcgagagtcaaatgctctgcagtgcacgcaaaaggaaggagctgagttctgtctgtgaaagcaagggtaggtgaaaggagagaagtgattttataaagttgtcctctgactggatacatagtctatggcacaaatgcccactccatcacacacacacacacaaacaattaattcagaataggaaaaaatggacctcagattagaacagagaaataaatggatactagattaaatagggcctgtgaggacctggagatatggtcagtggttaagagcactggctgctcttccagaggacctgggttcaattcccagcatccacatggcagctcacaactgtctaaaactcctgttccagagatgtgacaccctcacatagacatactaaacagcaatgtacatgaaattaaaacaatttaagcccacaaaccatgaacagttacttaaatgtatacaaagattttaaatgtgaacatctggcaaccatctttatgtttttaaaggatcattctggattttttttttaaatcatgacagatattatctggctaacgatgtgtttgaattacttggaagtgcactgatttcctgctttgagaagctcaggggacagattcctcaagaaagagatggatggttggctcaaactaacataaaacacaaaacaggaacgtataaaatcaaattggagatgagtatccactgtgaagttctctcaactttcccgatgttggcagatgttagagtaacgccctgggaagttttaccgttttgactgttgcatggatattgccttggagggaaccagggagcctggttggagtctctgagcactacccctgctgcaggaagaacaggagcttaagccaacaacacctcacattagattgaaccatccagagtgagaggcacgctgccctctgccagagctacaaacttgcaagggagtttaattattcagggggtaaggaggatacttgagaagaagagttcctgtcaggccttggcactggctgcagacttcagataccctggggtgtcctagcttttttgttttttgtttgtcttcaaatgcattgctttggatgacctgataacccaaacggtgggaagacaggacaggcatcaccatccagcatccctgtcacttcaggtcaccccattcactgcccctccctcccccttcagaatgcctttaactgcctgcccctcttcccctggtctttaatctgttgctgttttcggctgcttgagtggctccatccacagccagccctgatttagcagccttcaatcggaaaacagatttctctggaagactgggacaaaataaggcaaaatgagctctgttcaagggcctcacagcacttctctagggacagatgcttggcctggagctctctgcaatcacccctcccccactgcacctgcatccatgctggctgcaattttgacacaattcctatagctctgtcctggaggtggctaagagagtcctccttatctctctccctccttgtggaggacatttttccattccagtaatgactcgtgtgactcatttttggattcttgctcttgccacatccacagtcattttaaatttaatgttcagttccaaaacgcttacttgtcaagacttgttgctccctgggtgtctatacaggacagacgtgagtacctgcctctgctgtccctgtggacaccgatacaaaagagaccctcgaagcagaaatgcctttccatttggcctctggcttcaggaaatgagtctcagctctgttgaagaccagacatgcaagttgggctgataaccattactgctctgttccggaaaagccaacacacccccacccccaaagtctgactgtgacgtttaatttttttaaagatctggatagtttctacccctcagtcctgggggcatccccctcacctggttcataagcattaaatatggagtcaaacaagcctttctcagattctagctccatcaacctctgtccgagcctcagtatcccctacaaaagagagtgctcatttggggtattcttgcaggcagtaagccagactgtgtaccagtgccctagcctccagccccgtgactagtcctcgtggatgttcagtactccatacccacgcatggaaactgctattttccctgcacaaaatcaatgtgctttgtacattgactggcagctgaacaccgtgtgctgtactttgtcttccttggtggaaatcacaaggaatgtttttatttatttactactttttgtatgaaatttcagtgatttttggctacttttcctttggagacagaacataaaagacaagcaaagttatgggcatcacctccaatgggacctttggagcagcgatcagaccaggcacagggtgcaaatgcaggctgcccctggtggccctgaggggcggcttttgtttcagctttgattgttgcttaaattcttggctggccaagctgcctgtctgtgcacctgcgtgctgctaagctagacccggatgctgtgggaggattctgttactcagaggccccaggggtctgagcagaggaagggacccgaggaagcttctgagaacaaaagatgaaggactgttaagacatccctgggctgtgaacttttcatgatccctctcaccccacccccaccccccaccccgccggacagattctgccaacagctctcattacagagcaacagactgatagaatctaagttatttccaagttctcacaggttagaagcagtgctgagagttgaacttgccacccacttcagggatctctggtaccacaaggtcttgtttctctctctctcttggaggcaggctactcaggtctagctactggcggctctccacacctgtagctcatagaagctgaaggctgataaaagggcagtgggtggagcgccctcagcccgctcacctctttggcatcaggaggagcaacaggagggccctgccttgaaggtacatctgaagacaatgctgagggggctggtgtctttcctctcttcatcttaccttcccggtctttcagaatagttgttctttgtgcaaacttggagctggctctgtggaagaacagtcttgggtttggagttcaggatgggttctgcagaagagtctgggtctctaagtcacatctcagacatcctgaggtagactactactccggctaaactgctgatgtgtagggcaggctcccagcaagcctaggtgacgtaagacccatgaagtcctggcagtgaggactgactggagccctcctgaagccgggtttgcccttgttctagcagaggggcgatctctctgtccagcctctccaccaccgccccccattgccagtacaacccagaagagaactggaaatgtatcagcaaacaccaaggtacaagccagccttcgtgttcctgtgctaggatgagggcttaaaggtggaagtctcctcagcccctagccctgagaggccagcaggggtcttaggctgtctgttacagcctgacacatagggtgtctctgagatagactggggttggttgaaatgagctaaggaaagctcattggttgaagggtcagggtggggatgaactactctgaggagctggtgtggacccttcctagggaatagaactagggttggcatgtgatggataaagctggctttgacatcccaccccaccatgttcttttgccataaggagaatctgtttactgggaattggttacttggccaagaggctggctgtgggctgggattaaagctctaaacttcgaatccatattattaccaaactagcaaactgtatctaagtgagcagcttagatccattccttgcctggcctcctcttcagagctgctgtttgtttgtttgtttgtttttctttttcttctcttttcccctgttggtcagtttgctttctacattcctgcaatggtttgtaatgagtgccagatccaagtcttactctacattctgtgatgctgctctacacagaaggttctaggagcagccagaatatttcagcaacctaaggaagccttggagcccctcctccctcttcagtgcctggtggttggcaggagtggggtgggtgttaccttcctggtctttcagaagactaggttctctttaccatgggcttctctctgtggcaggtcatggcacagtggtggcagatcctcttggggttgtgggcagtcctacccaccttggcaggggacaaactgctcagcgtctgcatgaattccaagcgccacaagcaagaacctggcccagaagacgaactctaccaggaggtacagagcagcgctggcccaggggctagggcagcttcttaggattatttgagaagaaatacagaccaggtggtctctgtaccccaccacccctaatcatttagatccttaatttggggtccatctagggctttgccactaagctgttctggccgcttgggaaacaggtcatgtggtgatcccagaggctatgctagctaaccgtgggtcagagcaagcctccctgccaacatgcgctggcgagacagaccttaatttgtctccttgtcagtttcctaaaggctgtgggaggaggaacattccaacgagaagctcctcccacccgtgataaccacccaggttcctgaatctttctatttgctttcctggatttattgccccacccccaccccctggagcagacacctggaagctatactttgtggcaagaaggcagaggggagggaggtcaatggtcaggtgcgcctcattcttcagatactagagttcctcctctagagaggtgctcatatcccctctcctgacgcccttctgcccccacctcagtgcaggccttgggaggacaatgcctgctgcacacgttccacaagttgggaagcccaccttgaggagcccttgctctttaacttcagcatgatgcactgtggactgctgaccccggcctgtcgcaagcacttcatccaggccatctgcttccatgagtgttcccccaacctggggccttggatccagccggtgaggacataggagacaggaggcagactcatgcaacacccttccattcaatcctaggctggcatctacaggaggcaagtaggaacaggagatgctgcccctctagggataagagcagagccagaggtctctgctggagacagggatgaaaaggaagctaaaatgcctctgtccctgcatgataacatgacagacactgtctgatgagggccagtaggataaggcagggtggaatgagatgaatctgagtgtgaattctatctcctgtacttactaactgtaaggcctgggaccaatgagctgctctgcctcacggttctcatttatccaataattgatgatgatgatgatgatgccgatgatgatgcctagggctgagagatagcttagtcagtgaagtgcttatcactatgcatgaggaccttagttcaatccttatttaaaaaaaaaaaaaaagccagatgtggaggtatgttgctataatcccagcactgcagaggcagagacaggtgggtcccaggagcttgcttgccagccagcctagcctgcttggtcaggtctaggccaaagagaaaatccgaaccaatgtggatggtgcctgaagaccaatacttgaggttgttccctgggctctgcagagagaggcatgggtgctagcatgcgtgcacgcacacacattcgcctgcatttacagaatgtaaacacgtgcacgcggagagaagaaataatacttacattgtaaagaattaaaatatgcccctctcttctgcatccaggtggtcccaaacgggcaggaagagcagcgggtttggggcgtgccgctgtgccaggaggattgtgaggactggtggcgagcctgccactcatctttgacttgtaaatccaactggctccatggctgggactggagtgagggtgagtggattaactacgcacttgtggccctcagactgggtgaggctgcacggggctcagaagggaagggacagtggaaagttaggagcccgttctcaatccccacagagaagaaacactgccccgcacatgagccctgcctccctttttcgtatcacttccccaccccggatgacctgtgtgagaagatctggaacaacacattcaaggccagtcccgagcgcaggaacagtgggcggtgtctgcagaagtggtttgagcccacccttagcaaccccaacgtggaagtggccctccactttgccggctctgccttagccccacagctctcttacaccctcccagccttctctctgtgcctgttgttccatccctgatccctgcttccctctccaacccacatttcctgatccttctgggccatggccatctccatcctcaggctattcatgttgggggcaggctggcacctgaatttctcatgcctcccagggtcccctccatgcttggctccatctccactggtctggatggcagctggtacccagcagtctacggtgcctcatttctcctgcctttacaaatgggcactactataggactccggcgcttcttctgtccacagccatctcttttgtgacagagacaatgctgacagccaagcgacatgtcctatcatggtaccttcaataaaaggctaggaaactctactctccatgtgtcattctggtctagtcccatgagcaccaatccaagatgcatcgagagagctgccttgccttcattaagattttaatttccttgactattaaggggtatgagaattgttaatatttatttgtcatttggaatgtttttctcttatacactgtgtgtgtgtgtgtgtgtgtgtgtgtgtcccttcctttcttctctccccttctcttttcttgagaaagactctcatgaatcccaggttggccctggaactcaaggatgaccttaaacctcatcttcttccgtccaccttccagttctgggcttatccacatatgccatcgcccctggtctcgggctgtgctagggagctaacctgctaggcaagtaccctaacaactgaaccatatccacagtcatgacgtgctggtcttgaattttggacccttgacttctaagctgcttttttctactttctaatacacccaaccccccacccccgtgttgagaactgaccctggtcttatgcttgctaggcgcatgttttaccactcagctaaatccccaaagcctttccactgctctgtaactcttgacaattcttttgatcttcatgtcaagattgctttgattttcttttccactgagagaaatgaggtgttggaccagatgatttaatttacaaacaaagaaggggggacccagggagccccacttgctagatcacatccaaaagcctgaaacagaagtatagcattagcttgtagaagggccactgcctcaagtattccctatgagtagatccacggtgttgatctgtgtgctaggaacctcccagagtcagaagctaacccctcccaatgctagatgatggcttccctgtcacactttcttgtgacaagaggacacagcaggtattttctcaagaatgctgattctctcttgacacgaactctgtctctgtcgcaaagccaagtgtggtgctcagaatctggagcaggggacagctgtcagaaataacaaggacaaactcctgtataggatatctagaagaaaagggccagctagatgggtcctgaaagagtttcagagaagcaaggcttgaatttcagtggagaacaaaaaaatatgttctcaaagccctttgagacacagagaccccaaagaacagagctgcccatggcttataaatgaactaatacatacaccttcaaaattacctacaggaagccagacatggtgacacacaccatggagtctgaggcagaaggctgactaagtttgaagctagccaacatataatacagggacactcccacccccatctttctcttcagaatggagaaccatggagaaactgagggtgtcttgctcatgcagtcaagactttaatgattttaaagtgttataagtgtaaaactcaccaaagtagagttagaactgaggtgaagaaaacaagactagttctgttaagcagtcaggttctatcaaccactggatgcacaggaaggtctctaagtatgtaacaggtcaggttttccattggagtctcgtgaaagcactgatgcatagcctttatcttcacttttcagactagaacatggccaagatatgtttgaaaccagcaaaatctaactcccatctccagcagaccccaaagttccatgtgactgcacatccttagcctacacacccagtctttggcaactctcatctcaagctgaccctcatgtccagcttatcccagctacaaccaacccccatttccagctagcccccatctccagctgacccaccgctccagttgaccctccccccagctccagctgaccttcgtgtccagctgacccaccccatctccagctgttccccagctccagtgcttgtactgaacagcctggcccagggtggaatgaggcagaactgtagtcaataaggaaggaagcaagggtgagatgaggctggtaaagctgggagagctcgtatggctagagagactgattcctgcccctctccactttgggatagagaagtgggaggttttactagagagaagtgaactgttgactctcagattgtctggataagcactaacacacatgggcctaaggacttctgacgcctagctcaaagctccagccagcaccgtcttctactccaagaccatggctgagaggaacccacccctaaccatttatccacacaaagttaactcttaacctggtttttcttttctgctatacagactatctttctacactgtgtcctgatagtttcttgaattcatcttccaatctttttaatttcagcaatccatttttaattatttccaggagaggtttcccattcccttgtttgtcaccgcctgctgctctgggttttgaggctgtaatatcttcttaagtctcaccgaagatctaattaaatttttttttcaaaagctgtccctagtctctgaaagatgcacatcccccaaggttgctctgttctgctctctgatgttttctgtactccgctggttttccaagtctggtgacttcggcttatccgtctacacttaagaatgagggctgggtgtgttttatagagctggtttggttttgtgaatgcttgtttatatgctgctgggaatttctagatgtgggatggggctgtccactggaagactctgcttagtaagagtgtggaggtaaatgaggaccacttaagtgggccccagggaaggccgattagtcaggacatgctttgtttgaaggctgtccctattacaacttgcattttggcagagaatcaaaggcagagaaggaaggcttttggtctgccctgaaatctgtgctattggcagaggatgctggaaatgaggtagtttgggtcccatatgactgggtaaaataatatttgttttcttccacttggtcccatttggaatcatagattgaaaaactaggatagtggctggagagatgactccatttcacacaatcatggtggccagagttcgtattctatcacctacatgacaagccaggagcccaaaagcatctttggccctagctcagaggaatccagaacccctttctggcctgcttatcttctcacacgtatacatacccacacacttgtgttcatacctcctgcccatccacacaaatcattcaaaactaaggaagctaacagctgctcttctagttcttgctatctgtgtgtcaggaatgaagatattctaaagaaacactgtgcctatctttgtctatcagactacttgataagataaactttccctaggagtattaggctaggagaaggaacaggctggagcctgggaccaaccggaggaggaatatgttgtttcctggaaagagatgtcacacagttctgacaccttagcagatcatcttcagggaagactgcatctgagacaagtatgggtgggactccttgagcataatcatgcatacttcttgctctctgtttaaacctggacttcaagtcaagatgaagggtgcatttggtgcagaggtgttactggacccctgtgcccttcttccaacatagagatgcacactgagtacatttctctgggcttttcactacagctcgtctccttaaatggcttattgaggaaacagacagaattcctgtccttgaaaattgatattttaataaaagtagtgcaacaatgtaagaaaacaataaaaaagagacttcaagaactatagacaagacatctgttaggaaagggagcacaggggactctgggagggagaagaagagccaaaatagaagaaatggatatggtaaagacacctggagaactatttggttttctggggtgtatacttggggtagatgaggagtgctagcggagatgaagcaagggaacagaagacaggcagaagagcccaaggctgagcacaggttagtgggacaaccattctttgcctatggagacaaagacagaaaccatttaaatgcatgtgtagaatgaactgcttcagatataaaatgctggctcagttagcaccaagcttcggccatctgctgagattagatgctcaaacctctggaacctcaggggctttctggccacactgtggggtctgggcagctgatcctcatggctagctttccaagttcacagcccaggatgcttatctctcctccaccatatgggaggatgaacttttcagaggaccaaactccaccaaagagtgagattcaaaacccagagaggattcttttccggctaagaacacattatatgaatcctaaaagttggcagcagcaacagaaaagcccctctgagctttgcatctgcccacagcaatgaaggctatgtcagagcactctggaacagctgctgattgtgaagctgatgggctcaggccctctgcctgcttcatgcagaatgaactagtacttagcaggctgtgattacttccattcagtggtgagctttgggaggaaggagcaatttttcctaagctagaatccggtgctatagcaaaaagctgcaggaagccgggtctctgaaggggctcattgctcaaatagcttagttcagctaatcctttgtgggcataaatcatgtgtagcctccttccctcggagccctcagagcatcacaacagcacaggaagttgtggggtgccgtgggttcgttaattcattagtaagtaatctctaagttcagaacccattccccagctcggggaagctgagattatttcccaacatatctgtttttagtgtgacagttttaatcagccctctttcagtagcacagagcatgcaccatgaattgttatcaaacagagctctggatgctgaagagctgagtctgatcaagtcgaaagaaaatgggagtgtctggtggttggttagctgttagcaggcttggggggggggtgacctggggtggatcacacccttatgctcaaaggaatggagcagaaaaaaataataattgctagtccgaggaatggatcttgagtcttatctctggtcctaggaagaggtgtgacaccctgaatggccctaaaagtcactaatgggaaactctctaagctgtctccaggagccctgcacacagccgtggccaacctcttgtctcaacattacacaacactgtcacctacaaagttcacactcaggcagaatacccgagtttggttcccatcatcacctcaggcaacttccagcaatgccctcttctggccttctcaggtactgcactcacatgtacagaaccacatacatatacacatagttaaaaataaaaacaaactatttttaaaaagccactcgatcaggttataaaataaaaggctaataaacatcataatgttttaagtaagtttcagagtttgtgtttggccacattcatagctgtctctaggtacatgaagcccatgaggtacaggttggatgtgcctgctagcaggaggctttcttattaaatacgagacacggtgtttctttatataacactcaatctagactgtcaaatactgggacaaagcctttcgggaaaaccatggggcagtggtctctctggctactgtctactctctccccttggaagtctgctctattctgcaacagagttgccttgtcaagtggaatacagagatgctgatgacaaatcatgggtccctaaaacaatgatgtggggaagtagatgtcacagtgtctctctcctatctgctctcaaaaggctagcagcaagaggcaccttctacaccactgagcttcaccaacagtctcagagcactgctaaggaaatgtagccatttcttcccacacccatctcagattctgcatcctgagcctacaccagtgtgtggtgagtctactccatgctgggaagtttcatgcttagcatttctgctactctgcacaccttctgttttagaaaatggcacaccatccaaagtacttgtcaagactgcagaagaggataggaggtgataagaggacaagcaaaccagacgatgcacaggtcagagccactggcccatgcaataaggggcaggtgtttctctttttatcctgcaagtaatgctaatagcatgtcaggaagtgggggccaccatgccacttcctcttcaacaggaccactgtcccaaaaacacacccttctcaccatcttgcctataatgaagtcactttgtcagccaactagatgaactttgctaagcacccgatgcctgtctcctcgcctcccctgggtggggatggagaactaaaatccatctttactgcctgagaggcctcacattggccatcaactcgataggatctagaatcacccaagagacacacctctgggcatgcctaggagccaccctgaatgtcgatgtcaccatccaaggtatggtctcagactaaagaataaaaaggagaaatggagctgccgtcacttcctctcctcctgcctgtggtgcgatgtgaccacgcagtgaccatgcagaaggcaaaggtcacggtgcacacagataaacgcaaacatgccgctgctctctccaaagggagaagatacttggctcttctcctggaatgctcggagtaaaatggagtttacagttctctgctccctgttgaaccaggctctacccatatcacccagaacactatgtttgtttatctctgatcttttcctcctaaatcttgattgttgcttctaggccatagaagccaaccctatggatgatggcacttcacaacagcctaagtgacctctgtgttatcttagggccaggccaatcctgacacccactggcactgtgtttacctcagtcatgctccctagacctttattgtgagcactgtttctgagtccacagaacacatctttatgaaagagctacaaatgtaaacatgccttaagctttgctgtactcaaaggactgaggtaactgttatcaggaaacttccagaattgtgctgtgcttaaatatggctaaaataaactggtaccagactctccaagatttgtcccaacataagtacctaatttgggctgaactgagtttcattcttgtcccttagtggctcatttccctgctattcagaggcctgaagggaaccctcatgtgaccaagagactcactcctgccccatatattccccaccatgatagactgcacccttgaaccttgagccaaaatgaaccctctctccttaacttgcttttatcagatgttttgtctcagcaacaggaaagtaacagatacacaccccaaagtcacaccgagggaagatgagagatgtttgttaattaatggaccactgatctgctttgtctgtggaacagaatgaagttcattatccagaccttgaggtgtatccaaccccttcatagtcctcttcctgagcccagatgcccctgcctgagcctcccttagggtaacccctccctcatgccaggctgggccttgtggggtcacgcttgtcatctatggcttgacaactgattttaccacgtatggctctgctaggaaatgtgatggcagccttgagagagcagaatgctggagatgacagagggagtaaggttctactctaagctgcccatgatgccagcagcatggaggagccgagtcatctgtatctcaccggggagcaatcggaggttaatttcttctctggggctgtttcttagaaaggtggttacagacagcactctgcttacagcctagtgttgtctgccactgcctgccacaggagactgtcatagtttcactctgaatccatgtgtcagggttcagcaaaaaggatgggtttctttattccacagcccccttctcttttctctctgaaggctcatagggctctgtctctaaaacgatcaacaagaagctatccgacgctgtgggtagaaacagaaggcatccccaaccccgggggcaaatgagagcaagaaggctgttggctcagatgttgccatggcaaggctaccagccagcattccttgccaattggcagagatgcagagtcaggtagaagtggaaggactcatcatttaaagaagaagaggaagctgtggggattgctttagcatgctcaggtgggagtttgctgtggaagctgagggcagggtgatgaactgtggggcgtcttctgtgatagatctggctttctgggtgggggctgaatgggaacaaagagtaaggaagccaacatcactgaccaaggcatcaccaacctgcaactggaagtacaaagctgtacttcttgctaggttgcggctgatttcttgcggtttgggggtggggaacagtcaaatcatagataactctaggtaacaaagtatcagcaactgttagtggcttctgattttcatcagtccacaccttccctgggtcagaaatcagagtgtggtttagctgatcctcaggttcagggtctctaacaagaatgtaggattaccaggttctgtagtcatcgtgatgatgaaaatggagattgaaatgtgccaggcagcttagaagaaagggccccatgtccttggttctctctccagccagaggtaatgaaaagaaactctgatttctctcttcctggataagcacccttgctggtgctctaagtaggggtgtgactgacactctagcccagatgctaatcccttctggatctctagattttccccaggtatatcccatttcctaaatgattttagagctaattctatggaggtcagaatgttatcatagcagtagagactcaccaggagagagccatagtggccactcggttaccataacagtggattttcatcaaggaagaacgtggtggactctcaatggtgagggcagggccattcttccttccatacttgtttatgattccataaccataaaataacctctttgctcttccagtaatccctgactcgttggcacttaccatgttttaaactcaagctgtcagacagggcaaatgattttctttctggaggtccataaagtaagagagaacaaagcaaggtaattatataagcaacattaagagctgtttggccttgggtgaactgagaggtgagtagagaaaggcacagcatgctttcctattgcaaagcctttgtgctcagaagcagatttatgtaaattaacctctgtctacaaactatcaacacacattagcatgcattgtaaccacagcctcagaggctggtattgtggtccccattagtgaatggagagttaccaagctaaggtccctaagttgcagagcctcacttcagagcgtgcgaggtgcctacatatgtgtgcttctcttccccagaggcacggaaagcatttaatggttagaacaatagacttatagaaagtaccaatcagcacagtttcaaatgaacaacagcaaatcagccaacagtagctccgataaaccgagggcttagagtcccagatcaacccaggttctctgggttttctccatctctcagaacaatatcatgctggccagtaagcagtattgcccactggcttccaggtctcagttcttcagtctatgggtaagaaatcacagtccagaatggttaagtgacctggcaaaagtgtctcaggtaggtggccattgaattttgaaccaagaatcctaacttatggccttttctgctcctgaatgactattgtccaggcagtctgctctgtgcctgggtttttaatggccttggtggtagaaatgacacttcctgcaattatacagagaaagaaaagatggctcaagtcagaggtgacagagcctcccaaagtcccacgggatgctgatatcgccatggatatctaacttccaaaatgcaggctgatgttttatatcaagatgcgctgaatgaaatatctgtctcctccttagcttgaagcctgccgtagagatcctaaaaactcttggaatttcctgatgaatgctttcttcgtgctttaaagtggttactggtagctcccaagctagtgttaggatggggcatgagaaggtccag

SEQ ID NO: 10 - DNA, 1270 bp, Mus musculus
gcagtgctgagagttgaacttgccacccacttcagggatctctggtaccacaaggtcttgtttctctctctctcttggaggcaggctactcaggtctagctactggcggctctccacacctgtagctcatagaagctgaaggctgataaaagggcagtgggtggagcgccctcagcccgctcacctctttggcatcaggaggagcaacaggagggccctgccttgaaggtcatggcacagtggtggcagatcctcttggggttgtgggcagtcctacccaccttggcaggggacaaactgctcagcgtctgcatgaattccaagcgccacaagcaagaacctggcccagaagacgaactctaccaggagtgcaggccttgggaggacaatgcctgctgcacacgttccacaagttgggaagcccaccttgaggagcccttgctctttaacttcagcatgatgcactgtggactgctgaccccggcctgtcgcaagcacttcatccaggccatctgcttccatgagtgttcccccaacctggggccttggatccagccggtggtcccaaacgggcaggaagagcagcgggtttggggcgtgccgctgtgccaggaggattgtgaggactggtggcgagcctgccactcatctttgacttgtaaatccaactggctccatggctgggactggagtgaggagaagaaacactgccccgcacatgagccctgcctccctttttcgtatcacttccccaccccggatgacctgtgtgagaagatctggaacaacacattcaaggccagtcccgagcgcaggaacagtgggcggtgtctgcagaagtggtttgagcccacccttagcaaccccaacgtggaagtggccctccactttgccggctctgccttagccccacagctctcttacaccctcccagccttctctctgtgcctgttgttccatccctgatccctgcttccctctccaacccacatttcctgatccttctgggccatggccatctccatcctcaggctattcatgttgggggcaggctggcacctgaatttctcatgcctcccagggtcccctccatgcttggctccatctccactggtctggatggcagctggtacccagcagtctacggtgcctcatttctcctgcctttacaaatgggcactactataggactccggcgcttcttctgtccacagccatctcttttgtgacagagacaatgctgacagccaagcgacatgtcctatcatgg

SEQ ID NO: 11 - protein, 271 aa, Mus musculus
KLKADKRAVGGAPSARSPLWHQEEQQEGPALKVMAQWWQILLGLWAVLPTLAGDKLLSVCMNSKRHKQEPGPEDELYQECRPWEDNACCTRSTSWEAHLEEPLLFNFSMMHCGLLTPACRKHFIQAICFHECSPNLGPWIQPVVPNGQEEQRVWGVPLCQEDCEDWWRACHSSLTCKSNWLHGWDWSEEKKHCPAHEPCLPFSYHFPTPDDLCEKIWNNTFKDERRNSGRCLQKWFEPTLSNPNVEVHFAGSAPQLSYTLPAFSLCLLFHP

SEQ ID NO: 12 - DNA, 22047 bp, Homo sapiens
cagagccagtgcttgagaaatcttagttgccttccccttattcatggaatgggtaaggcacagctctgagaacaaccatcctcatatcctaggtttcttcacttcacccaaagagaccatttatccttcagtagaaataatcccagaacacttcctccagattcaaagaaaacaccatgccaagggatttggcagataaaggaggagataaaggctttccacatttctatgaatgaatgcaatgctttgtctttaaggaaaatacagcaagaggcctcaatgtttcctcttaagccccagtttgcatggcaaccagacattccacacactttgatcataaaacggaagcatcaactcaaatgtgaaaagacacttagcaacttaaaatctattatagtttcataaattggagtctttgaatattcccaactattaacatttttcagagatttaagtcttaaataaacttaaagcaattcaagagcttcacataatggtacatctcactggtctataataaaggtatctgaagaatcacaaaatttacttttctagaaatggcaactgcttaatgattgtattgcaaggcaatttacccacagcctcctggaaaattgattttcctctctctgtcttttcatttgtaagcacaagggcataaagagccaaatatttgccaccttgaaactatatactttccattattttctgtctataaaaactataaaatacattgcggaccttccagctcttctgcgagatttctcagatattttcaatgtaagacaaagactaaaacaaatccaaaaacatgcatatttgttttctctaggctatgaagtataacccaactgattccgttcttcaaacttgaaattgtgtacttgactaagaaaaaaacaaaaaacaattcaccaactgcatttgccaagcctcatggtttatagagctgtggggagtcaggaagatgagcccagcaagacacaggacatctagtgataagagaggtgaataaagagaagaaaaacaatcattttctacaaagtagaaattgaaacgcctgcaaatcacatatgtacatgaccatctaaatatgaccatacacagaaactcagatttccaagaatttttcctggtatgcttcttggcaaaaatgaatcataggagaaatcttttttttttttaaccaaaaaacaatcccttgttcatttaacaaatacctactgagtgcctatcatgtacccagaactgtggttataggtgtaagactgacagacacagtctctactggtctaggagcttacagccgcccagtggggaacacatgagtcagcaggcatctctggaatagtgtggcaagtgacatgatggaggtaacccaaaagctatgagagagagtacctggaaggacacctaacccagatttgggcttccttggatatagatatcttcaaattgaggtctagaaaataacaagttagctaaaggaagatactacatgttttgaggatgacgggggaggtcccatgtgaaatggaacagcatgtacaaaagcctggagcaacagtgatcatagagagttcaaagtattgaagatagttccgtttagctggactttcccacactaggaaggataggattgtggatacaattctaatgctgccaccaacactggcttacatccttggaaagtgaaggggagagatggggggaggacacagccacactgagagtcatgctttgggcagccttgcctgcagggggccactgaaccatacgtattatacccatgtaaaattgtcccagtctaaaagaacatatgtaggggtgtttcaaggtcctttgagaggagctactgataagtttgcacctattcaaatacttatctttttaagcatactaggttggcaggaggggcatccactgaaaattggactgtgaggaaagagcatggcctgtggagtcagaaacactgagttctaccccaggttcaggccctgtgggttgtcacacctgacacatcccattcactcactcactcattcatgtgttcaaatattgagaggcccttctatgtaccataaactggcaggagcaggtgacagaaggtgatatggttcggctgtgtccccacccaaaatctcatcttgaattataatccccataatccctatgtgtcaaaggcagggccaggtggaggtaattagatcatgggagtggtttcacccatgctgttctcatggtagtgagtctcacaagacctgatggttttatacgcgtctggcatttcccttgcttgcactcacttggtcctgaaaccctatgaagaagatgcctgcttctcctttgctttccaccatgattgtaagtttcctgaggcttccccagccatgcggaattgtgagtcaattaaacctctttcctttataaattacccagtctcaggtatttcttcatagcagtgtgagaacagactaatacagaaggataaagcaaagtcctcactcttaaggaactcaagagtctaaggagggaggggcaagcaaatatgcagaagattgcatcaccctgtattaaatacgatgctgaaaagaagcattgaatgccatgagagtccacagaggaaggggcaaaagcaggctgtcttgtgatgaaggtgcctgagcagagcccgagatgatgagcagcctggcggagaagcagggaaaggtcatccccagcagatggagctgcagatgaaaaggaacagagcagtggtggctcattcagagagcagggagtagctcagtgtggctggcctgaagggtgaggatgggatggggggtgagaagtttctgttgtaacccatgtcagatgatgaagagcctcgaatgaccatgttaaagtatttgcatgaggtggcagaggaagaggggtccaggatagctccaggcagggtgactggagggaaggggtgccattagccagcatagaaaagcagattgaatgaggagctaaaacaggtaagtgtaaggtgcctgtgagaaattcaagtgcaataccactggaagtatgtagatatgtaattctacaggtcgggactgtatagagatttaagagtacccacatatagatgatcactaaagccatgttgggggtgagattgcccagagagagagtgtgtaccgtaagaagagaagaggtccaaccaagaacagagccccagaaagcacttaaagggcagaaggcggaaatggaacctatcaaagggaccaacaaggaactagttgagacgcaggaggaaagtcctgagaatcaagaagacatgactttcaagaaggccagggggattgagtactttggtcaaaggcagctgaagggtcaggtaggatacagatggaccttacccactggattggataatttagaagttgctgctgaatatggccagagtggattccagggaacggtggtggagccaggcagcagggagggataatgagcataaggagacacagaggagccaccatgaacatacacaggttttatacaaaacatggctaggaagaaaagacagtttggtagctgacgtggaacttagggtcaaaggacagttccaggacgggacgttgggtggattgaaaatatatgaagaggccgggtgtggtggctcacacctgtaatcccagcactttgggaggccaaggcaggtggatcacttgaggtcgggagtccgagaccagcctggccaacatggtgaaaccccgtctctactaaaaatacaaaaattagccaggcttggtggcacgtgcctgtaatcccagctactggggaggctgaggcaggagaattgcttgaacccaggaggcggaggttgcagtgagctgagattgcgccattgcactctagtctgggtgacaaagcaagactccgtctcaaaaaaaaagaagaaaagaaagaaaatgtatggagaacagtgcaaattgtaaaactgcatgcaaaccttagttactagttaataatgctctctgatatacccagcagcagcctggtttgaatgtgacaatgtgacataagtgtaatggtgagcaagggagccatcagcccgagaaggaaaatatggagagtaaagacatttgttctttctcccctgtctgtaattttcagttaattccttgtccatagaacactggtgttttgctctctgttctccccttccttggactctcttcaacagttgatgagcttcacattcatttcccttgtggtgattagacctaaaaagtggccttcttcaagtggcaatgagaggccccagcattaacgctctgaaatatcacggaaattatcagaaaatgaagaggctctggttggaaaatctgggagtgaggaagaaaactgagagaggaaaggcagggaggggaggggtgggagaaaaggctgagaggagaggtcactataaactaaaaggaggaagaatagaggagggaaggaaaagaaagaggggataggaaggaagagaggagaggggagggagggagaggagagagagaagggaagagatgggaagaaggatggggagagggagaaaggagaggtcaccttaagttggagagaaaaggataggtgagcacatgataaaggagaagagagagaggaaaggaaggaaggcaggagaaagggagagatgggataggtcaggttaaactagggaggtgtctgaattagtattccaggaagagatgctgggtggattgaaaatgtatcaagaacaattgcatattgtaaaactgcatacaaacctcagttacgagctattacactcagcagcaggaaagaagagaggcagaaaagagagatgggatacgtcaggttaaactagagaagggtctgagttaaaactatgtttttaagaaatgcagtttgggccaggcatggtggctcacacctgtaatcccggcactttgggaagccgaggcaggtggatcactggagatcaggagtttgagactagcctggccaacatggtgaaaccccatctctactaaaaatacaaaaagttagctgggcatggtggtgtgcacctgtaatcccagctactcgggagggaggctgaggtgggagaatcgctggaacccgggaggcagaggttgcagtgagccgagattgtgttactgcattccagcctaggcgacagagtgagagtctgtctcaaaaaaaaaaaagaaagaaagaaaagaaaagaaatgcagttttattctactcgggtatttctcctcattgcagacaacaaattgcagagtatgcactctgggccagggactgtgtttgaccctgtgactattactgtctttctggagctgcttacagaagaggcaatgtcgagcctgtctgcaggcattcatttccaagggcaggaggtatgtgcaatgactgcagcagcataagctccaagagacatctcaccagcccatgacggccatacaagcttccctgacaggaagccttcagttctgagagctgaggggtatgtatccctagacacagaggctgggctatgacagaacagccctggaagtggggcccctgcaagcggcaggacaatgacaggccgtcaggcctcaggagtgcccagagcatcaatgagagcaagtacaacagattaagatctaaaagtaaataaaaaccacatttaaaagggctggtgtgccatgttaaggacctgggacttaccttaaggtctagaaaggttttaaacatgggagcatcataattgtctttacatttttaaaagatcattctgaaaaacaaagactgcaaacaaatgttgaaccctagttaatgatatgcatgtttgaattacttaggaagacatcagtttactgatatctgcaatttactttgaaatacataaaaaataataagactgatacctgaatagagagaaggatggttggctaaatatataataaagaaaatataataaaatggtaatggtgaaatctaagtggtgggcatatgagagagagttcactataaaattatctcaactttatgtttgaaaactttcataattaaaatactgataaaagaaacgaaataattatatgaaaaatatacctgcattcttatgtttattacagcactattcacaatagtaaagatttggaatcaacctaagtgttcattaacagatgaatggataaagtaaatgtggtaaaatatatacaatgatacactattcatccatataaaagaatgaaatcgtatcttttgcagtaacatggatggaactgaagccactatcttaagtaaaacaactcaaacaaaaagtcaaatactgcattttctcacttaaaagtggaagctaaataatgtgtacacatggacatagagcatggaataatagatgttggagactcagaagggcgggagggggtgaggtataagaaattacataatgagtacaatgtacaaagcacagacttcaccactgtgcaatatatccatgtaaccaaactgcacttatacccttaaatttatacaaatttaaaaaaattctgagaaattagatcattatggctgctacttgattaaagctctggaaaagggtgggagagctagttaggaggttgttgcagtaactgaggcaagagccgatcatggtccagacagtaagtaagggatgtgaattcaagagatatttagaaagttaaatcaacagcttcggcgattggatagacatagagtgaagaataaattaatatccctatttacctccctagacagaaaccaattaagagtttacatgaggatggtcaatcaggtttggggtgagaagaattcatgagacccagtaagaactctgaatcactgaagtccccttcggctggcctctgacatcagattctcaccaggagactcctggctctagctcttcactttcgtagtctgttctcaaattcagtgggggagtgacctcaggatgggagaggggaaggaagtcatcactgcccagcatctccagtggccccaaaccagagccaaggctgggttgcttcacctactgccctgccctccttgtcctccctcagagcccgctgaaggctgctgtacctcttcttttggaaacgcaagtgttggttttgttgtgtgtgtgtgtgttttagaataaaaattgtcttgaatcagccacttcaaattgcttcatctacagtcagctttgatttatctgctttcagtcagaaaacagattgctatggaaggctcagtcacaataaggcaaaaatgagctttgctcaagggtctcaagctgcatctcccgagagcagatgctggccggcctgatggttctctgaaaggcagcctcactcactgggtaattccttcctccctccctccctccctccctccacctgcatatgcgctggctgcaattttagctcatttcctacagctttgtcctggagactgttatcaagcaagccgcccttcgtccttcttcacaccctatgaaggacagttgtcagaggacctatttccatttcaataattactcttgtgattcatgtctggattctcggctctggcacctccacagccattttaaactgaaccttaaaccccaaatctcttaccttatcaatgcttggagcttcctgaatattcatgaggaactgaacagaacatgacagcctgcttctccctctgtcaggctatagagatgctattaccatttggtatctgaccctaaggaggagactccaggctctgcttaacgtggggacatgggagactgggttgataactgtcactgttctagaataaagccaacacacgcctcccaatacatgcacaacctcattatggcatttaacgttaaaaaaaaaaaaaaaagcagacctcacttgagacccaggcacccaggcagtatctactcttttagtcccggaggtttctccctcacctggtccttaagcattagatagggagtcgagaatacctgaaattatatcccagctctgctactcaccgctgagcctcagttccccacagctaaaacaaggagggtgttcatattggaggtctttttgagacctcagatcctgtagacagtaccaggccagtgcctggctccttgtttgtgctcagcattcagtggctgtgattacccaggtgtggagaatgtcattttccaacattagtatatgctttacacatcagttgtagctgaacaccacagaatgtattttattccattaaaaaaacgcttttagtgttttgttttcatttcctttgtatcaataaaacttcagtgatttcagctacttctctttcagagagagaaagagaggacatattataaaaacaaagaaatatgctccttttccagcatttttatcatctttgggactctcccaagaatcctatccaagtttccaatctctccttagctgaaaaggatagtcttgcaaatatgatcactgctgagaacacttgtagaatatttcacaggacaacgattcctgtatgctaagggaggctgcttggcgggttatggagggactttctttgttttgtttgctttggctttgtttgtatgtttaaattcttgggtccccaaggccacacttcatctctgcatcctgtgtcctcggtctgtgctccagcagggaccatagttcctgtgggctgtgcgaggacactgtcagaaaagccaccaggtgactgagctgatgcttggctaacagtgaaggggcaggtagagctacggaacagaacataggaggggcgtgtggagagaggataaaagaataaaatttaaaaccattaagacttcctctatcccaggcacaatgccaaggtttttgttcatgaactttctctttatttttccaatcccataataaaaacttcctttacagagagagaaactgacagagaatttgagtcattttctccagggcagccagctagtaagtagcagagctgacagccgaacccggtaacttattgtagagccccggatcttgcctacgatggggtctgtttctctgaggaagcaaacttcctcggaacccacaggcctgcagagctgggtgagacagatgctgtttaatgagagccacgtggagttctcctcctgcacctggacctagtagaaatcagactgggtaataaatgggtgggacatggaactcccctcagcctcatagtctcagggggaggagggagcaggagcacctgaaggctcctgccttgaaagtgagtatgaagagagtgctggaaggggcagcatctttcctccttttacctaacagatctgattctttaaaaatattcaaggccatggctgagcttgaaactggttgtctggagagagaacagccttagatttggacttcaggttgggctctgaagaggggggctgggctcttcttccccaggatgtttgaggctcttagaccagggtaggctagaagtttccagtttcaccatgatgggtccaggtcaggctcctgccagacctgggggactgggggagccatgggctcctgggctatgaaggtgaggggccctgtgtcctaagaggttgggtgcttgaggcctggggcccctctgccttttgctttgttttgtctctctttccactacctctcattaccactactacccagaacagagttggaaataggaagggccctcctcctcattcctgtgatggggatcaggctttggatgtagaaggctcctcctatctgactcatgcctcggcatgcccctggctctgcagggccagcaaggcctccagcactgtgtcaggcctccaaggattattctacctgccctgacattctgtgatgctgcctccaaaagaaggtcctaggagcagccagagtgttgcaattatttgagggagattgaagcccatccccctttcccagtgcctgctatgatgaagggggtggagtggggtgtcatttccatcaagtgtgcagcatgggtctctctgtagcaggccatggcatgctggtggccgctcctgctagagctgtggacagtcatgcccacctgggctggggacgagctgctcaacatctgcatgaatgccaaacaccacaagagagtgcccagcccagaagacaagctctatgaggaggtacagaggccagacctgggtatgggatggggaagatcagggaagggacacaaatgccaagatggtctccgaacctcatcaaccctgatcatttggttcctggggttaggagttaagcaaaggcaactagatggaaagagactatgcctttttgagaccataagagccaagcgattcaaagttcccatttctgagctgctctagccactgggaaagcagggaccgctggtgatcccagagatccattgttgactcggcacagatgaaaacaagccttcctgccaacaggtcctggggcaacatatgacttatgtgacccctccccaagctcctaaaggcaatttccagggatatgggaggaagaacacagctggcatttggcctatgagaccctcccacccaatgcaaccccagattcccctgggtctctctggggctcttctacctgctttgccctaaaaggcttctgctgcctctcaggagctgagagcccagaagttgtgtttctagaggactgtagcagcctgtggcagggggtcattgtgcaggtgcctctgccctttgggtaaatattgagagattatcagggttcctcttatgtaggggcttactagctaaaggcatcccacttgctcaggcctcctaagggacattttcatttcaccacctttcttccctagacacttgccgatccttgccccttttgcctgggccttttgtttcttcctctgccttcagtgcatcccctggaaggacaatgcctgctgcaccctcacgacaagctgggaagcccatctggatgtatccccactctacaacttcagcctgtttcactgtggactgctgatgcctggctgtcggaagcacttcatccaggctatctgcttctatgagtgctccccaaacctggggccctggatccagccagtgggaagcctggggtgggaggtaggaagcagatctgtgccatgccctgttattatattaacagccagagctttcacccgatcttatgctgatgccgccaggatgctagtaggaacaggaggtgttatttccctatggacaagagcagagccagaggcccctgctggagaatcacatgggggagactgttctgacaacagtgggatgaggggctatcaccacaggaggcttggtggagttgacagacctgagcttcagtctcatgttctgtccctaccagctgtatagcccaggacaaactattaaatctcttagcctcattggtattatttgtaaaataacacttagaggctttatggaagatgatgtacatatggtacctggtacaaataccactgtagctattagtagtcttcacatctctgctattaatgttctaatctctggctatgactgcacccaggtggccccgagtgggcagggagagcgagttgtgaatgtgccgctgtgccaggaggactgtgaggagtggtgggaagactgtcgcatgtcttacacatgcaaatccaactggcgtggtggctgggactggagtcagggtgagtggtgctgacaaggccttggtcgggaagaggccccttggtggtccccacaagggtgcaggtgcaaaggctagcaatgagggagtaggaggtaagctgtccctcctccatcccctgcagggaagaaccgctgccccaaaggggcccagtgcctccctttctcccattacttccccaccccagctgacctgtgtgagaagacttggagcaattccttcaaagccagccctgagcgacggaacagtgggcggtgtctccagaagtggtttgagcctgctcagggcaaccccaatgtggccgtggcccgcctcttcgccagctctgccccatcctgggaactgtcctacaccatcatggtctgctccctgttcctgccgttcctttcctgagagcccttcttctcccactcacattcctgcatgtccaccaactgtgggtcaggccaggccatggcctacctccttcctcaggccctcccctaaaagcagtggcatgggctagggactgcagtcccacccagtctagcccatgccactgcttttaggggagggcctgaggaaggaagtgcccctgaggcttcagcggctggtgcctgcaacctgcacatttggtccgagaccccctccactgctctgctctatcttagctggcctaggaggcagctgggggctggaagtgccaaggtgactggccacctcctgccttgagggatgggagctttcaaggggctcaaggactttcccatccagtgcacgcctacccctttctgtgacagagctgatggtggcagacctggcctcccatcctccgacggtgtcttcaataaatcggcactcaacctctcctctgcttgacttcctgtgtcttagctttatgtgcagggacccaacatgcacacagagggagccagtttgcccactgcactgaagtctcaaagttaggttgttacttgcctaacaattattaacttcttaatatctgccacacatcctcacaatacctctctgatgggagtactttcaatgcccctttttttttcaataagtgacaccacacaaaggacccaaagccagggcgagagggatggggccacccagcacatcagctctattttggctgccaaaattgaagcagctacctcgactgccttcagggttccctcttccttttaacccattcattttacccccagaatcacagcacactggtctaacattttggaaacccgagttctaatctgacctttttgctttctatatgacttttggcaactcctgtgatcttcattaagactgccttaatttctctctctgctgaaaggaatgagttagttggatttaacttatgaaaaagaagtaagaaaaaggaaaaagctagcaaccttgtttgccaggagatagtgtgtgcttctcagatagcatactatctgagaagacctcaagaatgaagtattagaactgaactggggatggggccctgacctcgcaccccagctgtaagtagacaagcagctgacctgcccacccagcactttccggagcctggagccgggcagcttcccagcagtagatgatgctttccccacaaccttttctttgacaaagagaaagttctagcatggctgcacttgatttgactggcttttctaacaactgtccattcttgccagactccagccagccctgctcattgcttaaactcggcctccattccttctgcactcgcctcacaggcccatccacagagcagatcttgtctcaggggaggcactggagtcacaaaacctacaaagagcgtccttccaagtgctgccctcggtgtctagagtagtagacagatgacagctgcagtggggacaaagctgttcataggaagtctgaaagaaaggggctgggtgggggtctctgagaaggcctcacaaaggggtgaggctggaaccccaaaaaaggagagcagctgagaacagaagggaagtgctagtcaaaacccagtggaggccccaaagtatgagccagacaaagcaggaccttcaattgctcttaaattaataaattgtggcttaaaaagtacatataaatgtatcaaaaatctcttaaagagcttaagaaatttaaaatctcttgaaaactgaggtgtctgtgggtgtgtggttgataataaagctgagaggttaatgccctttttaaagtgtttttaaatataacgaattgccaaaagaaggttaaaactggaatggacaaaacaagagtaatctggaagccctaataatttgatacttattgatcacttaccatgcacccaggatctctgggaagtacataatatatgttagctcatttgatcctcacaaaagccttattatccttgttgtattataatatcattttttactattctcatttttcagattgggacataaatataagtagaaaccagctaagtctgaacccacggttccagctcacaggcttacactgaacagcctgatctgtagttgagttgaactgatgtggatttgggagtggtgggagagagggagggatagctggtggcaagtcacagtcaggaaagagactgagttctaccccttcatgtgattaggagtcataacccacaggtcacactgacagtttaaaagtaaaaaggcttccaagttaactcacctggggtaggtcttgtgattcatggtgacatcctttccttgagaaagaatcttattatgagttcccaaattgttgacatactgattaatgtgtagcctaccgacattgaaaagggtgattttttttttttttttttttttgagacagagtccagaagactcccaactttgttagtgtgtcttcctgggtcattattcacatttggcttccaataaacctttacaaattatttctgcttccaataaacctttacaaattgttacaaatagccttaattttgatcaacaggaggagtgatgggttttaagcaaaggagtagaactgtcagatttgcagttagattgtgtgttttaatcagagtgatccatgcacatggctcacaaacatcggccaagggatttctaatgcaaagcaagagagcagctgccagctcactcatccatcaggttcctaccctgggagcaccccttctaaccatttttgggtttagctataaaaaagtgacaaaatgtgacttaccttttctgccacacattcagactatctttttgctctctgttctgtttgagtttctcaacttaatcctccaatctttttaattctggcagttcacttttaatttccaagagactttttttttttccacagcctgctgttttttgtttcatggatgtaatatcttctcaaatgtcactgaagatctaattagaatgtttttaagcttgttttgagtctctgaatgacctgtttcctccaaggtcaatctgttctgttttctttatcgtctcctacgtgctgctcgttctctctgagtctggtggctttggctgtctatctttggctgtcatatttaagaatgaggagccgagttgattttatagcaagctagtataggtttcctccatggttttatataaggatcttcatttcagtgctgctatttgtaacaatttgtaaaggtttactggtatgtgagaagagcttgttgagagaaagaccttgcttcagagtgtgaaaattaatgaagagcactcaaataagaacaagcaaaggctatttgttcagagcttacaagggagtcagccaccatcacttgcattttgccagagactcaaggcagggaggagagtgggaaagttttagagtggataaaagggaagccttcggctgggcatggtggctcacgcctgtaatcccagcactttgggaggctgaggtgagcagatcacaaggtcaggagattgagtccatcctggccaacatagtgaaaccctgtctctactaaaaatacaaaaaaattagctgggcatggtggcgggtgcctattatcccagctacttgggaggctgaggcaggagaatcgcttgaactcgggaggcagaggttgcagtgagctgagattgcaccaatgcactcgagcttgggcgacagtgcgagactccatctcaaaaaaaaaaaaaaaaatgggaaggctttaggtctgctaggctcagaggctgtgggcaggggcaagctgtaggcaggctaactagaaatgggcatcctatgtgtttggttcagggaacatacttagctttttctgattggtcctaagttggaaatggagccaaaaatgagaaagctggctattaataaattcttggccatgttgggtcaattgtgatagggattattctttggcttcctggactgtatcttcctgaaggtaagatcccttaccaagtgcagttagtaggttggcttcttgggctacttgtgggtcagaatcctgttttatatacagctagccattgttcatttgtagattcagtctttcaatcccagggataaaaattagggaacctaacagttattaatcaactcctggctgtttggggctactgcagggctgattgtttggctttctgggctaattgctagagagacagtactgatgtcctacgagtctgacttgcaagatagtaggatggcttctgggctggttactatagataatgggttagagttctattgttatatgtggtctgaccattgtccatctcgagaccaagttagcaggagctatatagctatattggggtatggagcctttgcatgccagaatagggatggttctctctgggatgctaacaaccatatgtgaaatttcagcactatccaattagctgggtgtggtgccatgcacctttagtcccagctacttgaggggctgaggcaggaggactgcttgaacctgggaggttggggctacagtgagccaagattgcaccactgcactccagcctggtgacagagtgagaccctatcttaaaaaacaaaaacaaaacccaacttcagcactatccagaatttaattttttagagaaggttcttctaccccaggggctaaagttgggttgcctgagcactagatttgggcagaggacacgtgggccaggggcatgtagagactttcttgctctgcccccaacacctgccaactctgagcccagatcctctcagagtttctgcgtgatgaatcagctccttcgtccactacagctgccacctccaatttctctggcctccttgtttcctttgatgtgccctcatgtgctttctgtcttctaaatatttgttgaaatctcttgttcactgatggtttccttcacatgctcttgaaaaaggaacatggaaataatctttttagtggaatcccaggtattcattccactctctgtaaccagaagctgtagatttattaaagactcaacggttgtttaaacagtagattagaagaaagccaaatggaagacaaggaggataaggacaatatgtagaatgaatgtgcaggaaagaaagaaaatcagaaggcaggtgctagaaacctaattgtgagcaactttctaggaggcatgaagccaagccacagtagaggcagtggacacaagaggggcagattcaggaactattagaagatagaatcaatagaagcttagagcatatttttgcataaagtgccacaaaataggtataagacattagggacagagaactatcacaaagaaaccaacagccttggataactgcactctgatgcttccatttataagaggaactttccccactttggattgtactaggtcttggtagcagggagctactggagggtgttccttctcctggaggcaacccagtcacttttgatgatgtgggaacatcaaaccctattcaagtccttcctcagggacaatgggaagtcctggggggcaaatgaaaaacaaaacaaaatggccctcttttatgctgcccttgctttaagattctttctgagtaactttcctcagtgaggtcccttaccaagcgcaggagttgctgcagcctgacagtcatgcacagagatcttgttcctagaccacctctgctgcctgatggaggagcactgagcacccctgccattcctctcccaccccacccctactgaactcctccacaaaaaggactgcttccttagttgcttcccaatgtcctgttgctttgtctgttggaagacccagaaatgaagattattttggtgttccaggctggtgttggaagctaagctacaagtgggagctaagctacaaggatacaaaggcatacaaatgatacaatggactttggagactagggggtaaggagaaaaggtcagatcactttccccagctccagcccttgagatagcttgagtgtccactcccttcttgcatccccaggggacacttttcctgccaacaacaccagtcgccctttttttgtattccctcctactcggttttccttacatccatcctcagatttactctcccacagaatcagaaaccatgttcaatagtgcttttgccacaaaaaactaaatagaaacatctggagggccgggcgcggtggctcatgcctgtaatcctagcactttgggaggccaaggcaggcggatcacctgaggtcgggagttcaagaccagcctgaccaacatggagaaatctcgtctctactaaaaatacaaaattagctgggcatggtggcacatgcctgtaatcccagctactagtgaggctgaggcaggagaatcgcttgaacctgggaggcagaggttgtggtgagccgagatcgcaccattgcactccagcctgggcaacaagagtgaaactccatctcaaaaaaaaaaaaaaaagaaagaaacatctggaggaggaaagaggatttcccagtgaggaggagctgatgatgggctctgagatgctggcaggatgtcagcgaggagttgtccatcagccaattgacccacagtgcaggaaagagatgtgggctgcagataagaatcctggactcactttcctagaagtgtggaagtagatgagttctctaaggaaaataaagagagaaaaaggaaaagcttgtggagagtctctctgactcacctacagtcaaggaagtgacagggaatggagctagtaaagacacagggatgcagaagctgggtagaaagaggatggaagggagctgcacctctgaggggcaatgtcaaattcgaagttgcccgcttcatattaattaactcataattactgcgttcttactctatgctggaaaatgctggtcctgggaattgaaagattgaatatacaaatgagcaatgaccaggcaatgtataaagcaggactctgacccacaacctgtaacagccagcccaggaagccaacttactatccacagtatccattccaggaagccaaaggatagcccctataacgattgacccaaaatgatcaggaattgattaataacttccagctttcctatttcagctcctgcttttaacttagggccaactggggaaagctaaatatgccccctcaccaatcacatggaatgccctgcttctagttagctgctgatatagtctggacatttgtctccagccaagcaagtctcatgttgaactgtaatccccaatgctggaggtggagcctggtgggaggtgtttagagcatggaggcagatccctcatgacttggtgctgtcttcgtgataatggattctcatgagatttggtcatttgaaagtgtgtggcacctctgcccctccacccacaattcccttccttctatttttgccacataatgtgcttgttccccctttgttttctgccttgactggaagtttcctgaagcctccccagaagtagatgctgcaatgcttcctgtacagcctgcagaactgtgacccagttaaacctattatatatatattttatatataagccagtctcaggtatttctttatagcaatgcaagaacggactaatacaactgcctacagcttgcccctgctcacagcctttgatctgagcagatctgaagcctcctcttttatttactctaaaactttcccactcccctgcttgccttgagtctctggcaaaatgtaagtgatggtggctgactctcttgcaagctctgcttgttctcatatgggtggtctccatttatttccacaagatagaatagcaaagaagacaaacatcattcctgcccacaaggagcttatactatgataagaaatacattaaaaaatataagcagatggttaaaattaaaggaactacaaataagatgattcttaggaaagaagcatacaaggacccagagagagttgaagaagtggataatttagataaggtggatatattaaaggaataggaaaccatcagtgaacaagagatttcaacaaatatttagaagacaggaagcacatgagggcacatcaaaggaaacaaggaggccagagaaattggaggtggcagctgtagtggacgaaggagctgattcatcacgcagaaactctgagaggatctggtttccttcacatgctcttgataaaggaacatggaaataagcccaggttggtccccttccccctcccttactctaggactccaaaatagccacagcaaggcattaaataatagttgttgctatggttttattattaagtaagaggtatgacaccacccagttcttaacccatttcctagcccaaggacgttcagaggtaagataaaaacatttgtcttacacatgacttaataactacacaaaaaaaaccttaaaaattgatggtgtgtgaaaataatgagtacaatagtaattttggtgaatattttcatagttttgatgaggtgagttttctaaaggcagtagctataaagtaaaagattaatatatttactaatatttttaaaacacaagaaagaaaaaggaaaggttttttttaaaacactctaaataaaattcaaagacagataaaaataggaagaaatatttgcaacatatacatacagatgttaatatttttagtacaataaaagtttttaaaatataagcaaaggatttgtataggtaattcacatttagaataaactttaaactcctgactagaactctgaccttagctcctaagacttttgctcctacttaccactctccagtgacctgggatttcttctcattctcaaacaaactaggctcatttatacctcagaacatttgtacttgcttgttttctattcctttgatgcttttgcccatctcattgcatacctagctctttctcataatttgggttttagttcaaatatcacatcttcagagaagccttctgcaattactcaagtcaccattccaagtcatactccatgtcaccttgtcttattttttatagcttatatcaccatcgaaaattgtgtgtatgtgtatctgcactgtctccctcacctcactcttagaaagcaggctccatgaggggagaacctcacctgtcttatttactgctgtatccccagtatatggaacatttcctggcacatagtagcggctcaacaaatatttgttaaatgattaaatgaatgaataaagaaaaatgagaaaatataatcaataaacattaacaaaaattttgtttcatgagtagttaaataaatgcaaattaaaataatgagaacctttttaaaactaattagattggcaatgattaaaaaatagtataaggatcaacaaaattgatagaccactagcaaaactaataaaaaaagagagaagaatgaaatagacgcaataaaaaatgacaaaggggatatcaccaccaatcccacggaaatacaaactaccgtcagataatactacaaacacctctacgcaaataaactaggaaatctagaagaaatggataaattccttgacacatacactctcccaagactaaaccaggaagaagttgaatctctgaatagaccaataacaggatctgaaattgtggcaataatcaatagcttaccaaccagagtccaggaccagatggattcacagccgaattctaccagaggtacaaggaggaactggtaccattctttctgaaattattccaatcaatagaaaaagagggaatcctccctaactcattttatgaggccagcatcatcctgataccaaagccgggcagagacacaaccaaaaaggagaattttagaccaatatccttgatgaacattgatgcaaaaatcctcaataaaatactggcaaactgaatccagcagcacatcaaaaagcttatccaccatgatcaagtgggcttcatccctgggatgcaaggctggttcaacatacacaaatcaataaatgtaatccagcatataaacagaacc

SEQ ID NO: 13 - DNA, 723 bp, Homo sapiens
atggcatgctggtggccgctcctgctagagctgtggacagtcatgcccacctgggctggggacgagctgctcaacatctgcatgaatgccaaacaccacaagagagtgcccagcccagaagacaagctctatgaggagtgcatcccctggaaggacaatgcctgctgcaccctcacgacaagctgggaagcccatctggatgtatccccactctacaacttcagcctgtttcactgtggactgctgatgcctggctgtcggaagcacttcatccaggctatctgcttctatgagtgctccccaaacctggggccctggatccagccagtggccccgagtgggcagggagagcgagttgtgaatgtgccgctgtgccaggaggactgtgaggagtggtgggaagactgtcgcatgtcttacacatgcaaatccaactggcgtggtggctgggactggagtcaggggaagaaccgctgccccaaaggggcccagtgcctccctttctcccattacttccccaccccagctgacctgtgtgagaagacttggagcaattccttcaaagccagccctgagcgacggaacagtgggcggtgtctccagaagtggtttgagcctgctcagggcaaccccaatgtggccgtggcccgcctcttcgccagctctgccccatcctgggaactgtcctacaccatcatggtctgctccctgttcctgccgttc

SEQ ID NO: 14 - protein, 239 aa, Homo sapiens
MACWWPLLLELWTVMPTWAGDELLNICMNAKHHKRVPSPEDKLYEECIPWKDNACCTLTTSWEAHLDVSPLYNFSLFHCGLLMPGCRKHFIQAICFYECSPNLGPWIQPVAPSGQGERVVNVPLCQEDCEEWWEDCRMSYTCKSNWRGGWDWSQGKNRCPKGAQCLPFSHYFPTPADLCEKTWSNSFKDERRNSGRCLQKWFEPAQGNPNVAVARLFASSAPSWELSYTIMVCSLFLPF

SEQ ID NO: 15 - DNA, 105077 bp, Mus musculus
  misc_feature (1)...(105077): n = A,T,C or G
cctctgtgcgtctgtatgctgcatgctgtgggtatcagtggaagccagaagaaggcattggatcccagaagcacaggtagctgtgaattgcctgatgtagggtttggcccaaaccaaatgtgggtcctctgaagagcagcggtgctcataactgctgagtgatctctccagcccctaggactgccttcttaaacaccccaggacatagagcactgttctcaggaaactgaatatttagtctttctccttttcaaaagatgactgtcttgcatctgtgttatttaccagtattattgaattcctgatgtttcaactccattgttggttcgctgcttcttttccccttcttcaataggcaacaacatttaggcatgtgaagggttaagcacacttgcatgtcattctggaaatataatcggcatctatcatattactgttatgggaaaatatgctccgagttccaaataattaacttgcaagtgaactttgaaactgtcagccaggctcatgtatatttgggggaggttttgccaaagtctttgcactcttttacggggagaggcagcatgccagccaaatcagcccagacagccctggcgatcatggggtaacagatgtctcagaaaaatcaccccatccaaaggttctgctaggctttgcactcaaggttgggattcttagaaatcccagacctgtgctgatacacccccctgtgtacaaggagaggcattgtgatccaaggttttttccttaccagagagaccaagacaaaattcttcagagttcttcacctggaccacggcatggctgaaagtggcagccagcatgggcactcagcccagcagccctgcgacgcggagcagagaaagcttggggatcagccaatctaatgccgggaagtcactcttgacatgacaagcagcgtggcgtctagcctacccgcagcctctagggcctctccagtattttagcaaagggaggaatctcacaaagggaagagctgggtgtactaaggaggtgatctaaggctgttaggttacaaacaaaacaaaagaggatatgctgagattgtgattcgggaacggggactgtcttagtcagggtttctattcctgcacaaacatcatgaccaagaagcaagttggggaggaaagggtttattcagcttacatttccatactgctgttgatcaccaaaggatgcaggactggaactcaagcaggtcagaaagcaggagctgatgcagaaccatggaaagatgttctttactggcttgcttcctccggcttgctcagcctgctctcttatagaacccaagactaccagcccagagatggtcccacccacaaggggcctttcccccttgatcactagttgagaaaatgccttacagctggatcttgtggaggcatttccccaactgaagctcctttctctgtgataactccagcctgtgtcaaattgacacacaaaaccagccagtacagggaccgatcaaatgctcaatgtttgaggctgggagcaaggatgttctctagactatacttgggactaacactggcttttttgattttttggctccaggtgatgctatgtaaccgagtagggctccttaagtcaaaccagagaggatgtgattggcaatctgttttcagtctttccattgctgtaaaatacctcctaagactacgtgataaaccaggctacgtgataaaccagtggcacacacctgtagtgacaattttgaaatatcggttgctttttaaaaaaaaaaaaaccacagaaacactataagaatgtgttttccttttaatcccaggtgtaggatgtggggctgcttcagactgtccacagcaactccgatgcttcatgctctagcaggggcgtgaatttgccagctgcagacagtttttgcaattgtgtgacatttggaaacctagggacttttcagagggtatataaatgttagggccccgagagcaggtagtgggttggtggttggttgctgctgttagaggtttaagaagtcatgtgtgaagaagaaaaggaggaggaggaggaggaggaggaggaggaggagnnnnnnnnnnnnnnnnnnnnnnnnnnnnnnnnnnnnnnnnnnnnnnnnnnnnnnnnnnnnnnnnnnnnnnnnnnnnnnnnnnnnnnnnnnnnnnnnnnnnnnnnnnnnnnnnnnnnnnnnnnnnnnnnnnnnnnnnnnnnnnnnnnnnnnnnnnnnnnnnnnnnnnngaggaggaggaggaggaggaggaggaggaagagaaggagaagaaagaatataaatatcctgatgttgaagatcaaacttgccccaaatcagcaggaagtagtctaacgataacactgccttttttcctttttctctcctatctagtgtttggggattgaaagggtggagaagggaggaagaaagaagaacccacaaagtagcaaaagacagccacatgcacccttaatcccagcactcaggaggcagagccaggtggatttttgtgagtttgaagacagcttggtttatatagtgaggcatataccccccaccactatcaggggataaaaaaggactggatgattgaaattttttcatttagcttgtggttttggggatctaagacagtggcattgacatgggcttctggtgagggtcctgtgacatatgtacgtgttgacaaagtagagtgggagtgggaacgggaatgtgccacaaagcttttgtgggagacagagctagagggcaagcagcgagctttacgcagcctgctttcgttcctgtgatatgaccccctcatagaagtggagacccatgatctaattacctcttcatggtcccacaacctctcaacagtatgccactggcagccaattttcaaggaatcacattcaatccatagccagcacatcccaatgttttggcctttaaaagtcttctgaagccaagtttcaatcagctcttgagaaacagaatcttctagattggccaggggacctgtacttgttttggttttatgagacagggtttctctatgtagccctggcgctgactctgtagaccaggctggctttgaacttagagatcagcctgcctctgcctctgaatgctgggattaaaggtgttcgccaccaccacccattgaacctatacttttaactgtgtctgcagtagctcatgcatagtcagtttaagactctctagctagtataagcaacctcattttgcagaagttggggtccagagggttcttagagcatcacttaagtatcaacgtctggatgggaagctggaatttctgcctctgggcccattgcacattggaggctggtcagtacacggaagtatagagaatagttcgtgaggcataggttctttccactcatcagaccactaacacttgcaacctcacttgagggtggcttctactgtagcccacatttataaagaggaacctcgggccacaaaggataaatagctgagaatggaggctcacactcgaaatccttgcacttggggcataagaactgcttcaagttcgaggttaacgtggaccacgtagtgagttccaggaagtctgggatacagagtaagaacctatctcaaaacaaaacaaaacaaaacagcttgacaaagagttaggtgttaataaacgtggacctgggcacctgcgttatcttttagaagcactgttctctatcaggaatgaaagaagcaagctcagttttgtggagaatggagaatgttctctcaaaaaaaccagacttgccctctgggataatccagccatcagagctcccggaggcaaacctactcacttctgtaacgctaggtggcgcaccccaggttctgagcacccacctgtgggcgaagcctttggggactacccactctctaccctggtctcaagatattacagtctccgtgtgttggaagacagatggcagccagtgtaagctattcctagtctcatctccggggatccttgtctgtgtaggagggtaatcactgaggaaggctgactttcgggagaactgttcggcacacacgtcgagcttcgcttaggctgagctgtgtgaggtaggaggctctctgctcttttcacaggacacttactagcccattgaagagcagtccgcactaacagtggaggggtgggaggtaggggtgggggtggggcttagttctgtgtctgcttatctttaaacaaaatgcttggcccccaactttctttcatgtgacaggatgacttcagaagacaaccctgtatgtttttccttaaaactcgaactttttgctgttttaatttataattgatcctttttgattgtaacggtctgtggatctggaagacgcaaacttacagaatctcttggtcataccttacccaataataaattttgttccccacagcatttgatttaaacactgggtctgtggggcaggcaagcttgcaacctcagctactcaggagcctcaggcgattctagatcagagtgggtaacctagtacccctgactcaaaatcaaaaggggtctgtgggtatatatcagtggtagagtacttgcctagtgtgtgggtggtgctattcagtccccaggattgccaaagcaacaatgaagaacacgctaattttcaactttggctgttgatacggtttagtgggcaagggggtttgctgccagtccccatgacctgagtgtgacatccagaacacacacggtagaggagaaaaatggctcctatacgttgttcttcgatctccacacatgcacacaaaataataaacgtttaaaagaattagaaatcaggaaggattctaggaaagtctagagttcctgactctcttgaagtaggaaattcagggaccgggatccttcacgtccagtggttgtccttggttgagactcttaggctctgtcttcagtgtgccccatcccaactatcctcgttactgttttttttcatctggctccatctgtgttgagctctctgatggagatgaaggggtcttccaaggctccaaagtaccagccttgttccagaccaattcaggagaggactggaagttgaattgtaaagcgttgtgaagcaagccactaatgtgcagatgggggtggggcggtggatggattgggtggaggctgggctgnnnnnnnnnnnnnnnnnnnnnnnnnnnnnnnnnnnnnnnnnnnnnnnnnnnnnnnnnnnnnnnnnnnnnnnnnnnnnnnnnnnnnnnnnnnnnnnnnnnnnnnnnnnnnnnnnnnnnnnnnnnnnnnnnnnnnnnnnnnnnnnnnnnnnttggtggtggcggcacagggtggatttcctgactggtcttctggcccttcctttctgttgatgtctttgcttccctaaagaccctgcccagctcagtcttgaacctgcggctgagcccctggaggggccaccgggttccgactcacactaacttcatctcatggcttctgagtctgggagacaaaggaattcttttaattgtgcctttctctccctgtctagcagttagcaccattctctgcatagccctagatatgggacgtagaaagaacccagggctgggaatctgctatggtggtgcaggccaaaggctgaaagagaaagccaccggctgcatctgggaagatggagaagggaaaacctgggaacagacaagggattatggagtgaaaagggtcaagattggaggcccagggagatgacccaggaaactgagttttgagaaggggtacagcagcttgatagggccagagagctctaaagctggctgatatggaaggttccttgatctctctctctctctctctccctccttccctctcttctctctctctctctctctctctctctctctctcccctccctcccccatctctctcctctccatgttcagttctttagagagtgcaattgagaggctcccagactccagccatccgttacagctttcacatgtactacccttagccaagctctgacgctcacctaactcacctgcatcatgtcagaggcctctgcctgtcatctcccttcctcttctgttcccatggctaacctttctcagtagcccatgacctgaagtgcttcccagaccgcaaggtcttagggtctgtgttctctctgggcttctcagatcccactcctcccaattcttcttcatgctatgttagaaatacttttaatttcagaacaggttagctggcctagcacatgctgtctcctccagctgggactcttccttcagaccttgccattttctcctcctccctgactctaaaacaggtttctgttctaatacctctctgagaaatcctccttcaccatcccacctagaatagaactcctctccccacctcacccactagacacacacacacacacacacacacacacacacactattccgtcaccttactttctttagaacacatgtcattgtgttatatatttacttgtttcattgtctgtgtttctcacaagaaggtactaagagaacagagacattgcttcacacatcgatgtttaggaaataaacacagagatccagtagggaagagctgagagacaccaggaccactgttgtcttggggtaaagagggaatatgtaacatacaagagatttttaaaaatacaatactttaaatatgtgataaatattcaatttgatatgataggcaatatttatagttcaattacatatgcagatcaaattccaaaagttgtttggggatacaggataattacggggcagactgccttcaagaaatttacagccatgggggaggggaaaggacagataaagacttcacagttatctgggcctccactgtggcaagatcttcattgtcttgtacaatagaggtattgaattggggggggggggatgagtgagttatcagtatattcattttgtgtatggatatgtgtccatctaaatgcccaagtgtggaaaacccagaggacaacaacctcaggcatggtccctcaagtatcagacacatttttcttctgttttgtttttaacatggattctgagaaccaaactcaggccctcacgattccatggcaggcgctttagcaaacaagccatcttcccagcccatcaacgcattctttcagtacagtggtctgctgtcactccgtccaataggatgaaaacactttgtaagcccctctctgagctctgaaatccactggtggcgtctttggacatggctgtcagtcagataaagggcttggacccctcaaactccaaccttcatccttccgtctctgaatcctgatctcagacactgagcctctctcacacccacctagacattccatggagcccaccccctgattgccagggcctctctgttcccatagctgcctgtgtggttacttctatttcctggatttttcagccatgatccaccacaacatctttaatattccgggaaaactctcccacccaccctccaatcctaggtcaagtgctttttctaaaatggagctctgattgctacaggtccttactcaaaccattcaggggctttctcctgggcgtaagcttaaagcccagccctccccccccttccgattttttgttataactcttcctgtcagtctttcctccagtctagttagggtcccacagggctttttctcataggtactgaatctttcttctctgggcatataaagttatgtttccagggcctatcattgtcctctgtacccctcctcccttgttccgtggttttatactccgttttctctaggacaaggcttcctgggccttacccagcccagcacttcaccccaggaacacagtgttggaatgggttcattccacaccatttatgtatggcctactgttagtgttcccaagtagatcacaagtctgcaagggcagtacgatccaacctgctcctgtaacgagtcgtttttagctccttgtgtttgataatattgagtaagtatggtgccacttgcatggatagcactgttaagaaactaatgacagttcatttgtaactgagtgcttttgacatatgaggcattccgctaagtgctttacaagaatgacgtggacacctcacacaaccctattaagcagagcttatttactctttgtgacagatgagcagactgaggcacagagaggttaagcaacacagaagctaaggctatgaacctaggctgtctctggggtccagattatgctagagtgaagcacaatgtggaggtttgttatagaaatagactcaagtctccagcgaagcgttttgctattgtttaccgggcgaaagacgcgtccccgggagcctgggctttgggaggggcccttggggcgcgaaccccaggttaactttccatcagctcatcccaggtggtccgcagctgcgtgcgggtgcagccagagagcgccggggcggtgggcggggcgttccgggggcgtgtccccgtgaggccaccgccttcgcccttgctcgcctcgcggggagctgcgggccaggccggagctggagggcggggcctggggcggggcgggagcaggacggcctgagccgctgcgggaggcgaggaggaagccgtgcgtcttgggaggcgtgcgggacacaggaccggcgagcgttcggttgctgggagctgcggggccccgggcgaggtgagcgcgggcgggcgggcgcggatccgggttgnnnnnnnnnnnnnnnnnnnnnnnnnnnnnnnnnnnnnnnnnnnnnnnnnnnnnnnnnnnnnnnnnnnnnnnnnnnnnnnnnnnnnnnnnnnnnnnnnnnnnnnnnnncgccccgggcccaagcccctttctccgtcggagccggatcgcgccgggcgggctcagcttgccgcaagcggagccccgagccccttttcggacccttttctttgccagtgtctcagactcaaccgccggggaggtaaaacaatagcgggccacctgggacgcggcgcgccccggctcccacggtcggcgccccgagtcgcggccccgcgccagccccgtggcgacccgcgctgccgagggtggggctgcctgccgcgccccgctccgtaaaccgtgacgggaaaagcccgcgagtgagagaggcatttggtgaaagtgttttgagaacaatcataattgccctgctctgggcggggaaactgaggcgtggggaacggaaggtaagatttgtacaaggtcaggatgcacacatgggctgccctcgcccagggaagggacccaggtggctcggctggccagtcgggtgctttggcctctctcggttttgcggcggttgtgttggccttagataaatgtctgttgtgtttgttttaggaatctgcgggcttttgtgggaccactctcgagctatcaaatgccagcttacttcgtgtgccctgggaggttctggggcaggtgacggtaccgtgacctctcactatggatggagatggactttttgatgaagaaatccgaagtgtctttaccaatccgggtgttttggctgtcttgggttttgacaaaacctgcctggttccctttgggggatccgaatgagcgatctcagacaccttcactgcgaagccaaggacatttctgtataatcagcgcatgaaaggattttctcagactctttcctcccgttttcctcgaggattaatccaccagaatccatagttccggtggagtctgcaaggcatatacaatgtggcagaaaccttgagcgccttcggaattgctctggcccctgccttaggcatagaggactctattgcacacgccacgccactcccctcccctgcccccaactccctccttctgactactctgtctttgactggctctcattttccctgtgaagttctgtttccaaactgttccctggagctataagtggattggcagtaatgagagattaggcggtgggaaaagcacggtgccctgtgcagtgtccttttcctgctgccgctgccgccgacatgaagtgctttttcccagtgttgagctgtctggctgtgctgggtaagtgactgcttatcagttctatagctgtgaaagtttaacccgatctcattgctaattccttgtggttctctcccatcaacacagcattttgggaggcagagggggttagccagagtgtgacagagtggattaaagtaccaagagggtctgtttgtttccgacccatcaagaacggtggcatactggttgtctttaagctgtccagggcctttgggttaaagcccctcacttgcaaggctgtggcttagggttgctgtgtggattgagggcttccagtgtctttacttttgtgtgtgtctgcataggttccagggaagttacaacatattgggaactgtgctttcatgaataatggtgctttttttttgttgttgtttttggaggggaaaggtgggagtgggtgggatgggggctgaagggctgctttgttttccctaagaagtctgtaggctaagtgtgtattgaagacactggttctgtgtctcctcaccaaggaagtccagctcatagtccttgtgggaggtgaagctgaaggcagggtgctgcctggccaggggttgtgttaggatcggttttcatgccctcagagaaagaaggctgaagtccccaagtaggagggagaaaccgtggtctcagaagtgagcccccagtcctctctgcaggccgccatcccctggtctcttcctggtatgatgttgagcaatctccactatgtattttccaatgctctggtttctcctaaactccatagctggcacctggtgccttctcacctcagacctcaagaatggacacacacccccccttctctgcattcagagaagttcctgcagctggtcgctcgcgtctccattctaggtttcttgcacttacaggatttatccgtggaggttgtctctgaattatctgcacccttataaaagttaacaggcatccggaatgaggatggactttagtcttgaattcccatctcagcttcatcttgattcacatgtgagtcccagtaagacatcccaagtctgcatttaagggatgtaaactatcctaaaaaagaaaaaaaagaaaaaaaaaatcttgattgcttcgcaacatgtttgaaactccaaccagtgcgctcattcggaggtgctcacacttaggcacaggttggtatctttaaggcatcttaaaaaaatctttggcaaccacctcagagcagtgaatccaaattccctgggttgtgagttcattagtggcagcccttccctgcccagcacatatgcacaggcacacgtgtgtggctggctgtgcagttagtcggtttgtcctgttgttaggtggcagaatctccatgtctcctgtgtgctcaggtgaaggaagttaggagccaggcttctcttggccagcctctttatgagactatatttatatgtgttgtacagtatttgtcacagtgtctcagcttgaatcagcagttggtgattcatggagattgaaaaggacacaaactgggaaagccccacccccgcaccgcacttcccaggcttggctgtgtgattgagggtggggctccgggcagaaggagccaccaatgggaagacagggaactatgacatttgtgccttttgtttcttttctttctttctttttttccctttttggctgttgaggaaatgtgaggctgcctgctggtctccctgctctcccctctccaggtccctctgtggaggggagctggaaccctggcatacagtgaatgcagtcattttccctctaccccatcccacccaccctagagaggccctggaggaagctaagtctccaggtgactggaaagggttcctggggtagaaggccagatctgtgtgacagtggagagatttggaaccctggacaggcacactaatgcctaccccattctgagcccctctgagggactctcaagctcccggcctatcatctgagagctgagactgcatggtttgggaggcctgccttgtactagtagtcttaacctggaagaagcacagcacgtttagggagagaacaaaaacacactcctgtctggtagccgcctggcatggtctgattcatgtagttagcattcctgctgtgtgatgtgaattaatgcgtagtgtgagtttgaaacagtaataaagaatccaaggttttgaacccatgtggatcacatacctggaataaaactttaaaagttgagtcggtctaagtgctgtggaaagaaggcaggtagaggaaatgaccttccagagactgcaaatccgaggtagaaaatcttgtgaccctgggaggagggccactgggtgaatctgtgagatgtatgtgaccggcaggcttgtgcatttctgctcccttcctctgccagtgtctggagtttggttcaataaaacaggcttttattgcctgtttaggacattgatgattcaagtctttgtccctattctcctgactgctgagtctcctgtcctttggagtcccaggtggctcctccaagcttatccattggctgctacaacctcctcatttccattccaaaggcatcttagacctgggctggtgaacagcagagtcttcactggctggaatggatggagccagaggggcaggagagagagagagagagaaagagagagagagagacagagacagagacagagatcatctgagtatgagctggggtgaatggcacgtgtctgtgcctgggtgaagccatgtgtgtaaatgtgacatggaaagatggcagcagcatgagagaagaaggtaggagctgtgtccctttgaataggaagaaaccactccggaaagatgcatgtaggctgtaaacgcagaaagcatggttcgattttgtgtaccattgaagacacgtactcccagaccagtgcagatgttgcaaacaagacaatctgcagaggagagcctccgatggttagtaggagtttgtgttcttctcagtgaacccacacacttgtttatagagttcgggaagccttgcgtttgaacaggatgggatcaagttatcacttccagtgattaggcagagagcagagggtgcttccacaagagatgggaggaaactttgatgtcttgataggcatggactcagaggcaggatcaaggtgatcaaaggcagaggagaaggaggaagcagatgacagaggagggggtttacatcattgggagtaggtagctgggatgggcagtgtgattaatggatgaaccagcactactgggcctaacactgttgaaaacatgggacgctttgcttcttaagactatctgatgaaggtgctggagaaaggaattcttgccaggactggctcggttgcctcttgtgctagtctgctttccatcactatagcaaaacatctgacagaactaactcagaacaggctcattcgggctctcggttgttgcttttgggcagagcgtcatgatggtggaacagttttgggggaggggcaggcaaaaacaggcaactcctagctgaggaatgaaaaggaggggaaggagctgggctgtactctacttctaagggcctgttctcagtgaccccaagacctcccactaggccctgtctctgaaaggtgccatcttctcccaatatgaccaccccgtgctccaaacctttggatgtataagggtcatttaagatccaaacaatagcatctttagactgtaaaaatggttgagtcacctctctatacccagggctgtgttctgccccctttgctatagtgtccactgcagcagagctgcagttattactatagcagtggtaatatctgctctctgaactccagcccttattatgaaccaagcccatcattcagtctccagagcaaccctaggcaataggcaccttacatttccatccttttatagatgatgatcctgaagtccaagaagattaacttccctaagatggattgctggccaggctaatgtattgcacagtatttgggccccaggctccttctggcttgtttcctgtgcatggcatttattcctagtattacctcagggtccaaaatggccattctggctccagccatcgggagggaagaaaggattaatgaaggattcatgatgaaatttgtatattaaggataacttcctggaaggtatgtgcatttctgcttatattctcattggcttgaacttgaacataatggctatacttaactgcaaggacggctgggaagcatgttcattctaagtgctagggctatgcttataacatggggttgtattgctttaaagggagtgcaggttttgcctgacaaatatcggcctctactatagtcatgagcttgtaagtggcagagtagagtattgaagccaggactgtcatcaaatcctgcattcttttcttaaacaagcagtaccttctgtgaatgaggcccaggctctggccaataaggagccttattgggaagacaagagctagacgaaccaacagttgttgccgaggaagcaacataagctagcatataattacaaggagcatttgtgacgtttgaagtgagtcctgtgtttatagggtgttctgagccaacacttccagtacagtggctttctgtagaaagtgcttaaggatggtgtctgtacaccagccccagaactgtcttgtgcctgccaccaagtaagtaggggtacagttaattgtggtcagtgggttcgcaaggtaaatatgcacgcttttgtttggttagctttgcaatgctagggatagattccagggcctgggacacccaaggtgctttgagtaccacagagctatgttcccagccctcgcaaagtaaataccgttttcccattagctgacatgctcacactgaggaaattcaaagttgagggagagaggaagtaattttgctctagaaagagatggaagttggcagggtctggatttgaacccatgtgttttggactgcggctctcaagcctacaatctaccaaacatggctgctggctcttttctgttctataagaatcctttgggcagtcccacccgaccccaaggaaatcagttatattttaaagagagctatcgaaatatttaaaaagaactgtgatatagtagcatgcctgctattaaactaacaacccctaacagcgggtctaatatgcatcagtgttggtatggtgacagtgtttggtattttgggggtgtatctacttcactgagtttgaaagtatgtgatttgtacttggagaaaccactgattctagaaacattagaaaactggggcaatcaaagggattgttaaagttcacttagaggctagtgtgaataaagatacgatttgccccacttcaggtttacatacactctgaattctccctgcaggctggcagggcacaaaagcaagcccagcagagctatgtagtgctggttgagggagacgcctggataatctaattcctaaatgttggctttgcagtttcaggaaatttagatcacctgcatatgaatgcctccttgattttcaaagcctctctaatgcagggccttttccccgtgtttagagtgggcacggtgtggagggtggacaggagagagcagttaacaataccgaatgatgggggtgacagtttaggggctgatgacccagagacctgaggttgaagtggaagcttccagtctgggttggatgaagctaggaggaggatggttgtagcttggaatgaatttgggatttggacgcagaatccagagcccagcctgctctcactgagggggaggagggagccaggtgagaaccaggctcctcccaggcatccctcctgggcatcactcccaggcccaccggtttagcttcctttgggagttcagcatttgccacaagcagacacctgtttctttgtggcttcacagtgagacacagcaattcctcataaaacgttgatttttcaatttaaggaaatttaggacacctgcgtgtgaatgcccccctgattttcagagaaatgaaagttacataaaaatcaagcgtgtagttgttgaaaatcacatgttgccaaattccctcaccaagaaccctttattaagtgactaattgtgaatcacagaggcaggtacttaacagagatcttagcagaggaccccctttaccccaaagtggagcttgttttccttaactctgccttcagaagggcaaaactcacaagctagagatgtattatacagtttagtctccaagcaattgtccacctagtctctcgtacaatttgcatccgtaattatagtagcaggagagaatgatgagcctgggaccctgcaagatcctaaatcaaagattgaattatattaactctacctggcttgaaggtggtcaggtacattctaaaaaagctttctaataggttttataataatgagagttcaggcgaagtttctggccagccctttaattaagctcaccggatagtgtcttctccagcatccaggcgaggcttcgctgagcatgcccagtcctctaggacgtgataatccaaggcactggttctcaaccttcctaacgctgtgaccgtttattaaacagtccctcgtgtcatgctgaccccgtatccataaacttattttcattgccagttcatagctgtaactttgctgttattatgacttgtaatgtaaatatctgatgtacaggatatctgacatgtgacccagacaggtctccactcacaggttgagaaccactgttcgaaggccaccagagaaatggtaaattgattggcaaatagactggccaatcctgacatcacacactcttagagggtgggtgtcttgtgttgggggtggggaagcaaggctggtgtggttgcaggagcagcaaagagacttttttcaggagaggaagatgctagagaaagctggtctttgttctgtctggaaaagttttctgaaacagcttacatggtagacatttcaggggagggacatttctggcaggatggtgggaacttgcaagagggcagggaagactgtcagagagccaggtcctggtggtgccagttagtaagaactggagcagacggtcggtatggaaggaaactgggttttggggtcaaagataggtggaagagaccagaaagttgtcagtgggaatcctagtggatcactgagagaagtggtcagggagttatttccaaggtggtcgccagaggtagaggagtccagaggtagaagggaaggtacctgcctgcccctgagcccgagttctatgttcatcaccggataatcagagtaaaagcagccacagaactgggaattcaaagaaggtagtgtcttgtcttgccccacttgcctgcaggtgctcatataaatgagcactctttactgaaatgggaaaaaaaaaatcccaaagtgatcctggctctgtgttctttcagtggggaatctctgatgctgtgtccagggctggcttaggttggtcttattttgcatacagatcagtgtttgcctatagcatcattatctgagacttcagagtgctgtgcactgccactgcctgtgtgtggtgacctctgttctctgcaggacctgagtctagaacaggcttccaaactccgtatttctcaagggtcctgttttctgtcattccttcattcctgagagctgcccattctgaaatcttttttcgcagagataatgtctattcagtaataattagtgtacctttcttatgtgataatcagtagggtagctcactttctttttcttttcttttcttttcttttttttttttttttctttttctgtagaccaggctggcctcgaactcagaaatctgcctgcctctgcctcccaagtgctggaattaaaggtgtgcgccatcattgcctggtggtagctcactttcatatgatcctgctgttaggcctttgctgtgggcagcaagaatggctaaagtctacatgcacctgtatatgggagtgttggcaccttggccctggtcttagagtggcggcactctcaagtattttgaaatcaccttaaaggtggccaatctggcctctaggacctggggtaagtcaatagtgtgaatcccttatgtgtgttactgacctcagttgacttagccaggaagcactttccatggagagagggagaggagctgagttatcacctggtgcttcagttcaggctgctcgtgccctgcccagcccagcccagccccgaggactctcctactgtttgctaaaagacttctagagaatgtacacattgtgtaatcaaatcagcgagtcgactccgtaaatacgcatgactgttctatccgtccaaaggggaggcaaggagagaaagggaaagagactttgagagagtgaaatgtcagtctcttagctaggacccacccacaggaaatgtagagggtttttttgttattgttttgttttttttaaaccagagcacttggtttcaattacaccataatttaaaacagttaataaaatgctgtaggctagagtattgtataaaagtaagaagatgagatactggttttaatttagatgatagcgtatatttactttattattttttaattttgaggcctttgttttttggcagaggtaataagaacctaactctgttgtaagatatataggaagtaggggctgggggctggcccaggggtatagcacctgctttccttgggggtggctgagcgccatccctaacgccgaaagagaaaaaggagaaatagaaattaaaaatgtgcacattgcagtctttgtcccacaccccttattggttttgatatatcttccttatgatagtatatagtctctcaaacacttctgtgtgtatactcaagtgcacatttttctgacataaatggaaccgtacagaacgttctgttccacaacatgattttaaaggggtgatttacctcagttctttttttttcaggcttaattttatagtcatatcagaaatgatttgcttattttatagctagctgaagctgtaatttgtaaagtcattggggaatcatgaactcattcagtagctatacaacggaataatttcgtctccccgtcatcaggcaaccaagagtcagaataaaaacactggccttaaatgttagtgtagttaatgagaataatcgacttgattatcctgaattttttctctgaaaaacacataaatttgacaaattaagtactttcgtgttttactgaccagtttgtcataatgttgaaataatgttagattaaagcgaaatgcgttgagaatttgttaaggagacagcagtaaacactgaggtttgtgtctgactcagtcaaatgttgtttgtttgtgagctggaaaaaaaccctgagttttccatttccacatgactcccccacctcgcagtgaaggcaactggcctccaagctaggggttgtgggtgacccaccccccaccccccctccccacccccgcactaaaggctcaccttcccgccgctgcctgcagtgtggctgtggctatggccggtggaggcggcggtggctgctgctgctgctgctgctgctgctgctgctgctgctgctgctacattctcttctctgcctcagagcctgggttacttctcaggctcactggtatgactttgcagagcctggctcacctttccactgccttaaaaatagctgctgttttggagcactggatggttgtcggattcacatatcctagtggaaacttttaaacatcagagtctgaccttctgtcacccttcccgagaccaccggaggagcccctttctgtttgaatctactttaagactccctgaacccttttatccactcaccccgcagacgtttgagtgtctgctccaagtgttcattgccccctttatctccagtgctacagaaataaagttagcaccatgaagaacattttcagtggtcacctgataagtatttttaatcgttaataaatagggggattaatttaaaacactgatgcaaacagtctctcttttcacctccccacctcccttccttcccctccccctccatctccatccctaatgtaagcctgctctttggctgtcacgttgacatccttacttcctgtttgcttggtgttttttgcccttcagctttttaatggtcatgcattaccaatacccagggcagccatgacagaggacctttagggaaaggatttagaatattgctgaatgttgggagatggaaataatagatatacaggggaaattcttcctgttgaaaatttgcaagtgtcttgagccctgggtatgtaaactcttcctgttgcctgcaggggatgccgtttggatatagggactgactgttgttactcactcctggggatgctgtccagatatgggtattgttatcttggctgggatgctgtctggtgtggggactgactctttttttattaatcattttatttgcttacatttcaaatgtcattccccttcccagtctcctctccatgaaccgcccaccccctcctcctcccatttgcctctaagagggtgctaccctacccaccacccacctcactcctctagcatcccccttctctggggtatcaagcctccataggatcaagctgctcccctcccactgatgccacatgaggcagtcctctgctacatatgtatctggagccatggaccagaccatgtatactctctggttggtggtttagtccctgggaactctgaggggtcctgctgattgatactgttgctcttcctatggggttgcaatccccttcagctccttcagcccttcccctaacttttccatgggggaggggagactgactttttattgactgtcaggagtgccatctttcttgtgggaacgggagtttcccccttgcctcagaattcctaggaaaccaggattaaagagaagtagaaaagaggcatgcattaaatgggagaccgtgcccacacccggctttctccatgtcttagagttttggtggtagggttggttcctcgtctgcatcttccatctctcccagtctgccatgggacttgtgtcagagtggccacaccactgctgggctccacccttgctgggcatacttacagccttggtggcaactctgagaaggcttgcctctgcccttttcctatgttcccgttggactccagggtagccaggggcttctctcttctccaggaatctcttaagtctgaaagttcaagctgtttaaactgtgcctggtggacatggctgtggcccaacataggcagctgctgcccctgagaccctgtgtgccaggtcggctttcttgctgtgagcagggcttgcccgaagcctttctggttttcctcattggctttctttggcagtgggagttctgcaggacagaggcacatacacttgttatgttgttgatggctgggggttgagatattacgcatctgtcccagacttaccaccaaactagacagcctcttttggactctgcttagagatgatttgctggaccgttttgtattgtcttctagtgtttaagaacgaaaacatgtacgctggacagtcttgagggctgtcttgtggtattttgttatgaagaaaaagcaaggtcccattctgaggacccagcctggcttgtcctctgtgcctctctgggaataaactagaacagtggccttatgggaaggagaaggtaaacccagaactaatgtgtccctagacttgaatttacttccgaagaatcctggcagatctcctgtgcagtcctcttaattataggggtaaattatcctagagctgaaggaaaggctggtgggggtcttgagggagaagagggaagggatggaaggagacctggaaaattcccctaacttaaaacctcacaccagataaactgcctttccactcttcgccccaccgtggaggagttttgggcagaacagggcctcatttgggaataaatccagattccatctctgatacctctgtttcaggagaaaggaaaggaatacaggagcctgggattgttgctgaaagtacggttcctatacatgcctccctgcccctgttattcagctcccatcctggagctggtcctgtgcccatcaggaatccgactctggttttcttgtgcatattttcccttctgccagtgcgtaggcattggctttaatcaaggaggcttttactccgtgatctgtggcagggatgactgaagtcacggagaggattttaagtaactaatctcttaagacattcagaacgtaatctccccagcccgtgagcatcctgcctgcatctgggagatttgtaagggctctgcagaggaggatggatagggcttggcattctttggaaaggccgggtgtctttctgtctggcgtcaggtttttgagtgtcactggcacagggacaaggcctgatgttcatttgccatgtcaagagagttcaggatgccccatgaatgtgaccagtgtgcttctaaaccccccatactggtatccaaaacagtaagaagccaaactggagtgaagctcactcatggttctgcagtgtgtgtctggagcgggcttccagagaagatgcagctaagtacacgagaggcccgctgcccacaaatgagattgggttgatcaaacatcagagggcaggatctgacatttccatgtgctttgcttttatggtttggatgtcacttcacacagatgctgtgtgccggaccaaattggatcacggtggctctttaagttgtcgggtattgattttctgtttccacccactttgaatgtgagctcacgttcccactaccgcaggtattctttgaaagaatttggtggccaggaccctgcccgagtgcagccagccccagtcatttctcttggtagaatgattgaatccccaacaattgagactaatgaggaagattagttcaaattagtgaaatgcctgaattaccaaatatttttcaagaaattcaccgttattacttgtaagtaaatattgtaactcagactaggctaatggagtgccaaataaagatccttgggggacccgctataggggagaaggaggaatgatttgcaattagcagacccattgttgatgcaaatggagtttctgtgatactagattgtgcctgagaactgtttgttctcctaagtattttaaatagtccccgtgaaactcccgggtgtgggtagtttatatgctgtggtaagatctgtattgtgaagacgtaactcagccatgtcggcagcatcagagatttcatgttagtgatgcctccagtccttgcctcctaaagattccagtcccttccaaatgcttccatgcacccatatatgtctgtcctgatataatacatttggtgcatgtgtaaagtgttctgtgtgcttggcattgtgcatgcatatggaggggactcagccgtcaatgccaggctctgcagccctagcaggcagtccacaggatgccatttatagatgattggtgcacttgccattgatgacacactgaggctccagtaacccagtatactgtcggtgactttcgtaattaatggtttaacactagactgtacatccttattcttacagagactgtatctgttacttcttgtagtatttcaaggttctggatcttgcctggcacaggggtgatattaagatgaaccatgtgatgttaccagtttcaaaggtcaggaaagaagccaagtatcagccaggccatggggttcaacctagtacttgctcagttaatatgtattgaaggctgactgcatgatccaggcgtgtccaacctttagatattgcaacgtgaccttgtcatttacaaaagcgatgccagaaaatggcgcagtcaagtttaataatgctttgaatgagtttgtgatgttgtgctgggccatactcatgcaggctgtgggctgtgggttgcacaggcctgctggtttacagcttatttcctgcaactctctttagccagggaactgtcagctacagtatttagaaaggatcctctacacctcaagtagctagcatatgtagtctgttgatgcagcttggagaaatgcgggcaagaagagatgctggagagccttgcttcttcctatgtgtttcccatgaagtttttaggtccctttatagccccaagtggggatatgtgtatttgaggtctggggtgctgtcagtagccagagaatctgggagagcatgcaggaagtttgcgctggaaggccgggtagtggttagctggcctgggcagagcaaagagaaggagcttcatccaggacagcactcctgcgcttgtgcgtgttccggcagattggtgtggccacagagctgtgatttgaatcttggctgttcctcaaaggcccaggtgatacaaagattgggtctctagcctttgataatactgggaagccatgggaccttgtagggggcgtggcttaatgggagaaagttaggtctttcggagccatgctcttcttcctgcggttatttcgtagccccatgaggctggccccttggttctacctttgctccctgtgccttgccacgagcctggaggaagcagaaggaccaagcagctatgacatctgaaatctggagctcaaaggagcctttctttcttcacattgattgtctcaaccatctgtcacagttaggagagccacaggtttccacaagatgctcaggtgtttgacggacattcatgttcctccttgtgagcctcctttgagcctggagcttctgtgtggtgagttatgggctggtttggggcccactggtccatcagaggcaagagttgaactgagggaaaaagcccagctgggcctgttggaagcccagcttctggccagggtcccagttcctatctgtggaactgggagttgggcccaggctagagttggatcagagctaccccaaccttctcttatgaaaacgtctctgcatctgttaggatttcatggctgtctttgtggtttctgtacacaaatgtccaattgtaccaccatgctatggtgctcagcattttctgacacacacggggtaattttgagttctgctcaagcccacagttatttgctgagcgtcctcccatgccagcacaggatggggctgcagcatgaggggaaacgcagatgtatgacctggcctctactggtccagggacaactgattgttcatgtaacagctcttctttttgcttctcttcctgctggtggggcctaatttggtttggatgctgcctctgcctgcataccactccaagaaagacgatcctccttcaagctctggagtaagtgctgacccatctaagcaagccacagcagtgtgtccctcagattcgggccaatgaagctggccaacgagacttgagaagtctgctgagggattctgggaaaaacgttttctcacaagaatcataggaaagggaaaagctcctcccactagatgcttggagatgaggcagctgttttgtcaccaggagggaggcaagcttgtcaagatgggcagagaacaaactgcgagggattctggtgcttgactgaggtctgtgagaccgagcggtccagcctccatactttctgttctccgtgtttatcagacgagttgatatttttgactgctcatagttagaggcaacctatatcagacactccctgagtgagcgtgaaatgggatttcttttcataaaacagtgccattcagattgtcatcaaaaagcatattgtttggagcaagtgctcagccctgcagtaagccggaaagagaagcggaaaatgcgctgacggggaacacaggagcgaggagattgcatctggagtggattctgaagaagggttaggatttgtgtggaagaggagggaagggggcatctgaggagggggctagcatgagcagacctgttgagacaggcatggatgtggaaggggcacggactagcggcattaggtcttgatttcatcatcaggattctacagtacctcagatcgagcatgtagacttagacgtttgatttctacatgaagcattctgggccctagggcaggggagaggggagtgagcagggaccctggggtgggaataggattaaggagctgtgaactagactgactggaaggggagggggtcaaagctaagtggccagtggaagcattcatttgtaggggtgagttctgagttgggcggtgtagggaaagagggtggtggtgaaggtaccccaggaagactgtaaaggaatagagcagccattgaacagcggcttggctgctgagggccagtgagatctgcacgctgactctgggggcgtgcgtgtaatgacttggaaaatggcatgcaatggaaatttggaagcggtggattttagggagatggtatttggtttttgccactggggctttgagatccaagtaaagagaccttgaattcagtgaaacaatgaactatactctgaatgagaggccaggagctactgtgacgtgacaaaccatggatctgtagacatgctgacccagggaggacatgcttggcagcggttggtacagggtctgagtggcacgtggtcttcaggctgtggttgttttcctttgctgcctggatttcctcagggctctgcagcaaaggagtggagcttacaggccaactttattttatccttgggagtctcaatgtcttgaacagcaggttttcagcctggcttcaggtcccttcagctatccagggagggaatccttggtcatgagtgacacggctgctgtctccatgggtcagtagaaagtcaagtgccttgcaggggggcactatgtggtgactggtatctgttggtgaccatgataggcttgccaggcagggaaatgtggagctttaggaagaagcactagtcccaacgaggctgaattttcactcacatcttgtatttccctgctttgcaaacatccaaaaggcaccctttgttaaagggtctggagcccagagctacgtgctgtctgtcagcttgcactccacacctagttaaggtgtaacctgtctgctgtctggctctcattactttcctaaaagcacagggccccgtgagtgctggggtgggggaggggggcacttggcatctggttttcatcaggcagcaagcaagtgccccagtgcatgtgggggaatctggctctttaaacaaagccaaggcagagggagcgagcccctctccttctccttcttggctctgggagctcccgttgttgactccagaagcacccaaaggccagggagacagatgcattgcacactggagttgaaaaatggaaagatgggcccaacactgtctgtcttcctaatggagcactgttcctcctgctctcccggaacccagagcatcacaagtgtttgtcaaggccatcttgctccctggcagcaactcgtatgttatgctctgagctctcttgacagcccatgtctaggtttaatccctggaatagggcaatatgatcagcccacctagtctttaagttgtctgtctgtctttctagtcatccacccatccagcattcagcaaacatttagagacagcagcatgacttagggcaaatcactgagccccttttcctagccagtaaatgaggagatgtgagcattgatgagagttagctggcttcctcggggaaagcacttggtcctgccctagttggtggtaggcaccatgagtgttggccaggccagggttgccaccctcctcagctgatgagccacaggttgtcttcagcatgctatggctatttggagcttggacttatgccctagcacatagtctcaagccataaagatgtgacctttgatcatattgctacctcccttggcatttctttcttgtttcagactttgataaggccattgtgaccgcactccagaagtcagggcccatatttggtggccactgagtgcttgccagtctggaatgtgacaggtgagtgtaggcagcgtccaggtggcactgaagcatccttgtcagggcctcattgcctgagtctctgttgcccttcagtgtgcacttgccatttgaacatttctacttctacccttctttgtctttccagcctcctggcagtcgtgtcctttggcatggtggcagggatttcttttgtttgccattctccctgtaccctgaacagggctgatccctcatgtcctcggctgtgtgtgaggctggaaccagcattgccctcctgagtgtagggcagtggtagagcacttagtagaggtgatctggggaaagtccgagattgatcactgggaggtgggtggggtcgctctgccctgagttagaggtgcagtataggcaggaaatgggcaggaaggcaagcccacccgcaggctgtcctggctggtggcggtggcctcaggcatgttctctcagcggtctttcacatctctgctgagctccatcttctgatgacaattcactcacttctgcctctggccatctgggacacctggaatgtgcttcaacactggttccagctctctttcagttaattgaggaaatttgtctccccgtcggtgagccaagcgctgctgtggtcttgatggttaagtcgtgttgtgctaagaggcgtgagctctgctgcttgccgtgtgtgacctcgtgtgtcctcaggttttcaagtttcttgaagtgtctggagctgttctgtgtggggctcatctcccacgaagcctgaataaaaaggcattccactcaaggctagaccaaggagtactctgtttgcattgatgcctgtgggagatgacagaactgctgaagcctgtgtgtcccatgctgcagctgcaggggtcaaacggaacaagggggggacaagctgcaagtcacagcgagttatgaagggaactttgtgctgcacttggggcagggcagggagggcatatgcacaacccctcgttaagggtccaggaaatgaaatgctgaagccagcggttgaccctgagtagaggggtcgggctgttgccaccaaactgctgctttgtgctgtccctgtccctcacaccccaccaagcagcacttctgtgtgtcttctgacttccatgagttcttggtttccccacatctgtggcttccctgagtccagggatttcccaagtccatggcttctgggccacacgttttccaaccagaagcagcgggacatttgtgttgcttccagtttgtggctattaagagggaagctgttgtgacacttgggtatttgagtggacctaggtttttgtttctcttgggtaaatgcctgggggtgtgattgctgccatccagtaactttatgcttaatttgatagggaatatccaggctgttttccaaagtggccataccaacccgcacgttcaccagtcctataaggaaagaacctgaaatctgacttagaacccagagccttgcctgttaacattacagtgtccctggctgatgagtgtccctgtgctgtgagcctcccttttaccatagggtatcagggagagtgttaagtcccagggagccagtcaatggtggagatgtttccttaaggaaacccttaaccagtacagggctgctttccccaaaggccgccccctcccgctggttgctttcatctctgttatggccttggctgtcactaagattcactggtggagttgctcagatgggtacccacttgtactctgtggacactggaacaatctgtgctgtgtggctcacttcccatgtttttgtgggcacctaagatgctggctcctggccagagatgaagttacagacatctgagcgaagaagctatgagatgtgaggacactgccttagcacctctgtagctgtgtgcgtgtgtgcatgcgtgtgcgcgtgcgtgtgcccgtgctgattgctggtgtgcaggctgtgaagggctgtccctgctttatggcccatttcaggcctggctttccctgtccagggctcctcttgactggcaaccagactgtagtttcctgcattgctttcctgctaggtcccttgtgttttgaaagagccaaaaccagacaggggcgctatcaggttacagctccgcttggtgtggagtctgaaaaggagagggaatgtaggaacatgtggttggatttactttcttttttttttttttttttttccttttcttatttgaggcagcacttcctgaggggggccactgataattaggctctctctgattcccgaggccccagtgaagtaaagcacaaatgttgttttctaaaggactgttgttgcggccaggccagtgtgcctgctgtggagctcctcctgcagtctgtgcgtctggaagctgcctcaccaagctaatgcatgtttgagaaagacagaggcaggcaagtgagtgtgcctgcctgctgggatgaagatctgagattgaaagttcttcctggcccctattcctgccagtaccagcaactgtgggttgacctggcctttccagactttgcctttcttaccatggatagaagtcccatttagtctcacaaggggagagagaggatgtgtcacagcagaagcattttaacctatgtgacagtgtgacatctagaggtggccctgtctctgagcatgtgcttattaactggaggcaaaggcagcactcagaaagccacctactgtctcttcctgcgacccattggtccctgtgcctgtccatccaagaggaccgtgtgcccaggattgattttggcaggctggcttccttcttgcctttgagcataggaaggtgtggaaatgccagtggcctggaagtatttgggagaaatagatgtgatgtcacatggaggagaggtttctagatgggtcttgagagcagggacaggaaacctaggttcctgggtcctctcgggagttaggaggggcaaggggaccttgcagaggttgggctcacagttccttttctgtaagatgagagaacaggatcaaatgatctcattgcaccagggagtaaagctacagagaggtgctgcctcctctagcagcctcttgggtgggaagtccctgtgattagtagataattgcttcaggggcagaagtgggggtgggaggactgcccactttgggacagagagggtccaggtagggagatgctgtcagaccacactggacagaggcacccaagaaagatgttgctcagcagttttgcccatagggtcttggtgaacggccctgacgatggccctgctgacatctgttcccagggcgcccaggctctagcacagggaagtgatggacaccactgccgcagaagcccttctgcagagcatccctgagccatgcccactgcatgccagggccctggcttctggacaccagctgatggtttccgtgttccctgttccagtccatgggcttagattccgttagggctttttccttgtgtaccttcttgcctcgttgagccagtatgctacttactgatgcaagaacttttgtttccttccagggcaaatgtcttgaatcccactctggttgttttttagataggatctcactttgtggcccaggatggcctggaattcagtcttcctgcctcagcctctcttcccagtcctggggcactaatgtgactcaccttgctctgctgttctgtttgatgtctcccagctcctgctgggagtcctgaccaactccagctcctggacccctttcattaggcttcagaattctggtgttcttgaccatcattgcagttccatttggaagatgatcgctagacctcttatccttgccaagtgaccccaggcttaccctcctccccagaacacaaccaactcaaatgtccctccccccagatgaagaattttgtatctataaatgtgtgtgtgcatcctcatgtttttccagacttgtgtgcagatgtggaggttagaggacaggtttcgatagtgggttcttcctggccccccggttctgctgctttgccgtatgtttgtgtgtcgctggcctgcgagcttccaggtgcttgtcccgtctctgcctgagtgctgggattgcagctgctccccagcacactgtgggctctggggattgtgcttgggttgctaggctcgtgtggcaagcaatttcacatgtggagacatttctctggcctctgtttcaaataataattcagacaggtgggtttttaaaatgcagaatataaaaacaaattaaatggtctgtatttcaaataaaacattttagtgctaagaatttgagtccttccttccttccttccttccttccttccttccttccttcaggattttactatgtagactatgcttgcttgaacttagagagatctgcctgtgtctgtctctgacagtgtatgtcacagtccctggctttagtgatttttttttaaagaaaagatttatttagttttcaaattcattttacttttaactctgtgtgtgtgtgtgtgtgtgtgtgtatgtgtatgtatgcttgtgcataagagtgcaggtgtccatagaggacagaggtgtcagagttggtagagatgtagttgtgggtttctaatgtggatgctagaaagtgaacttaagaacagcacatgctcttaaccactgagccatctctccagcttcaggggttttataacacctcaaaaccttttgctaagtgtcgccaggttatacagggacactaggaatgtgagtttgctagcgttggtaacttcagagtgaaaacaacacaactcaccaacctctcctggcctccctttcccgccctttagcctcacctgcagacaccacctctacttgtagacatgtctgcctcccgctgccttctctggacagcctgggcaggtatatcacagttctccttcctttactactgtggaaaatgtcaaatgggtaccaaaagataatgaaactccatgtgcctgcttctcacagttgtcacctcgtggctcaacttgctttacatacgcgcccccacccccaatgatgtccaagaaaatacaaggtctgctagtgtattcccatgtactgttcaaaactctcgtctgttaagctgaatgtattaggaatttatttttccacttaaaaattcattttcagagtaacaagaaggtaacctttcaatcccactagatcagtggaaatgtcaaacaatagtttgagttgcggaagacacaagttcagaacactggaatgctgtctggggactataaatcagggcagcagagttgcagagatctgaacggtgcctggtgggggtgagaggtccctcggggacagttagaagactcaagattgcactggaaagtctcgggccagatgaaagttcatcggctggaaaatgagttcactgggcagcacccactgttagtatagcaggctctgacacacagcaattgaaacaaatgctttgacctgtgtcaacaggattactgtagaaaatgcttcctcaagtcaaaaaagaatgatgcagagcggtacctgcagagtgatgccattttttgatggttttaagacatgcaaagctctgccttgtttacgactgtgcagtgaaagtgtaagtgtgcaagactgataactatggctgctctggggcaggcgggactgacagggttggaaaagtggcaaaacagcaacctgagccgaacctacagtgtttttccctcctggagacaaagcttagagcagaggttcccaacctgtgggtcgtaacccctttgggggtcgaatgactctttcacaggggtcagctaagaccgcctgcatatcaggtatatgaagtgttaatgaaataattttatggttggggtcaccagaacatggagtgtattaagggtcgcagcatgaggaagattgagaaccactggcctagagcaaagagagcaaaatgttaggatttggcacaccatggatggcatgggtatttcatgtttatactttgtgaatgtttaaaatcttccctattgaaaaagtaagccaagcatagtggtgcttgtctgtagtcccggctactcagagggtggaggaagaagtttcaggccagtttgggcaacgtagcaaaaccctgactcgaaaataaaggctggtgaggtggcccactgggtaaggctgatcacctagagtctgattcccaggacccagctgattgaaggagtgagctgactcctgtgagtgtcccccgacaccatgttctgtgacatgtgctacgtgcacctacgtacacgcacccacccacatacgtgcataataaagaatttaaaataaatggcttgagatggctgctggatgggtagggtgcatgcgcctatagtagtctcagctattgagggaggctgaggtaggaccgttgtaaatttaagaccaacctgatcaaaataagcaatgtaggggacccttatctccaaaaagggggatggggaagggtcactgtgtcttctggggctactctctagactgaggtcagatagcgcagcatcttttggttttctgatcccgaggaagcgagtttctttatcacccaaggataactcgtggctttgagttcctagaggcccgtgactccaggtatttcctagccgtctgtatcaaggggtggagaaagcagagttacacctcccggtgatctggggaagccttgttgccgggttttcacctttcctcctggagaaggtaggaacaggggaggcagaaggctgagccaggagtgctccaggcttctgcgagacggatctgaaaagcggcttccgtctgtcacctacagttggctcacacctgtctccacacctgtggtttgcacacaagtagggaggatgggtgtggaagaaatgggactgcactgagccttgctgaggatcagtaggctccagacgggtgagaaggaagggttgaatagatgttacccggtagaggatctgatctgtctctagctgctcaccaacaggacttccctggctgtccgcacactctgctgcttcccgtgttcacccacttccagcgtaccccacatcccatcttagcggttgaactgttatcctcagctccacaagggctctgaccgatcatgtagaagggaatggtgctcctggtacctgctcctgggctgcgagacctgtctgctcacttaccccagactctggccaaggtgtctcctgggtgagcttccctcccaccgtacactggcaccagctctgcttttgtcctaaatcccacgcttgtctcctttcctgggacttccctgggaagccacgtgggtggaatggctcaggctgcacatgctccgtgggaccctgggcagatatgccggcccggctggatgtgtggtatctccatgtgtggctgaagtggagttgaatgcagtcacatgtaaagccctcagtggagggcctggcctgtcagagccggttgctgtcttcccggttgttccttcttctgtccccgcttccttctgtagtttgtctcttccttcctcttcctccttgttttttgggttgcccacaaatgacaatatatggaaaaaccagagctatgatttatagatggtgggcttgggggtgatggctttccgctcaccaggtcacagaatagtgtttggagggatcagtggaagtcgggcagcagaggtggagtggggccagaaaaccaagttcatcccagccacctagaggctcaggtggcaggattatctgcagctatatcatgagtttctggccagcctgagctacacgagatactaattaagcctcgagtctctagataagaactttgtacttgatgtttatcccccccacattggacctgcctggtggtgattggtgggctggattgatggagccagtgcagatatctccaaaattcagaaagaccttgaatacagcagagaaagagggtttcagaattctgccttggtgtgtcgagggagtctactcttaactgcattttcctagtaagtttgaaagtgtctagaaagtgtctgtgtctgttggccttcatggtcttaggaattaaatccagagtctcaccatgctagttgagcactctacaccaggccatatgcccagcccttatctgtatggttctaaagcaagaagggcagctgctgttcagattggtagacagtttgggtctactggactcagaatccagatacatactgtgtgcggtggagactgatgggatagtgggggggtggggtgttacttggcaggcatcgcctgtgcaatgaagtccccaaacaacgccgtcttgtgtccctgggtctgctggctccatcctggtcagacctggagagaaacagtacgcagttctgacaacacacagagggccatcgacaggctggagcctgtttgtaagaggtgggaagcagggctggcccgtaagagcagactgtgcccatgatgtcctggagtgttggtaccggtgccagcagcctgttggtggacgcactcagctgctacccactgaatagcttgtcccggatccaagacctcagagccctgttggggctggctcaaaagaggactttcttttctttccctctcttctgctattcccctcccccatcctctctcctccctctttctttcctcttttccccctctcccaccttctactccctcccttcctctcctcttccctcctacccgttcttcccctcttctttccctttcttttccctcctcctttctttccctggctggaacctggcctgggtcttgcatatgctaaccaagctctttaccactgagcaatgtcccctgtcccaaaggaagagcccctcgtctgggctgttgtcagtagagaccttcctttcatggagagatgcctatatagacaggacagtcaagcttgcggctgtgggttggttggggggtggggggatggggtggaggtggggagggtggggnnnnnnnnnnnnnnnnnnnnctgtgcaccctagaaacccatccttcttcgcacttaggctttttggtcaggggacataaaggagattgagggaactctttggtcagtgagggcagctggcaaacttacaagcgtaatcctacccccaaacaatgctttttataaaatttctagataaaatgccctaatttgaaagagtattagctaggatttgagctagcgtgtgaattgcgtggttccatctgctctgtaccatggcccagtagatctgcagcgccatttgtcacactttgttttaaagcctggaagataaatagtcctggatgctgtccagaccctcccatggaatcctgcatttggatcatggaaggggtgggcagtgagaaatcagggctgatcaggggagggtgctgtgttgccagcaacacgtacgtgctgtcccctcgtgggcttgctggtgattgccgtggtgcctggtgccaaggggcagggcagaccccatcctctctaaagcaggatgactactcgttcgtttgttcattcattcattcattcaaccaactgatttttttttttttttgaggtcttattatatgggacattacaccctagggaccggggatctagtgccagtatttctagcctttagatccaacatgccactatatatcacccttattttattagtgacttaagcgcctttcttcacacatagcacttgagctcagaagtctctagcctttgctcttgattgtttgaagccttaatgggaaagaagcgatcatgacatgtggatagcagggtagacttgcgacacagagaaaggtagagctagctgggggagggctccttcccagggactgggctctggggactggacagggtgtggtttgataggttgcctgcagggaggacctgagacaaggagtgctgttgtttgtactgctggtgtactgggcttggggctgcagaagaaaggctggtgattcatcccaaaagcatttctattgggcactgacctcctggggcacagaggggacatgggatgaggtaagataaggctctgtgtgttggtggccttcttcaacacagtgagtaggtgtggggagaaatttcagtgtagtgtggactcacagccctggaggacttcctaggggaggaagtgcaggccgtttcctagcagagtaaacagaagggctttaaattgttaactacccaaagcatggagaacaggccttgtcccaggtgaaggacttcaagtgctttgagttccccatcctgttgtggatgcaggccaaagactccatgggcaggtattcatttaattcttgcaatgatgggtctatggttcaatgcgtccaaaggatgggcattatagtgtttgaagaggagcattcttgatgtgtgagccgttgccttaagtcgtttctggaacactgtgggtgggaaataaaaaaagtctttttttctctgtgtgtgtggggagttggaaagggtgatgttctggaaagtggctgagacagccccaggtgcaggcgcccgggaggtggccaggctgtgacagagggagaaggatggccagggctggctaccaggtgttaggaatgagtagaggtagggcccattcttaagtgaggtcagggaggggagaacttaactgactcccggggggctagaaagagagcaaggggaagccacaaggaaggactgtctgggttgcaggcagagcaagctgaggtagagaatttatctagtgtctagaactgtgtctctaggtcttgagtccagtaagacagaatgagtgatggagcatcccctgcttagaggcagaaggaagaccttcttagttaccttttgttttgttttgttttgttttcaacacagggtttctctgcgtagccctggctgtcctggaactcactctgtagaccaggctgacctcagaaatccacctgcctctgcctcccaagtgctgggattaaggcgtgcgccaccactgccttaagccttagtggctttcatgagctggttctggctcaggttgcagacagatctggggaccctgggaacaggagtccggggctggctcaggcttcttcagagtatggtggacttagagccagaatatgcatggcagctccgggctccagatgagcatcctagaaattgcctgcagaaatcgtatagctgtatatctagacttgaagtcccagcgtgtgacttctgctaggatcctagctcgtcagactgcacggggcccacctctctggctggccaggaatcagtgtctgtcaccagtaagctgtgtgaggaagcgggctcgttgagaagcatacccttggcttaggtggggaaatggcgtgaccaggggagctgcctcattgcatggtagaagtagaggaacctgcaaggcattggccaaggcttggtggtgccaggagacaggaaagcagcagacgacctggggctgagtgggggatggaggaagtcaggaggcatcctgggcacgagccagggtagacgtgggtgtttgatgtgggcaagtgaggcaggctgggtcagccagtgctcttgttttctagggttttctctgcttgctccagccaccccctcaacctctagtttctttcttcccttttcttttcttttcttttcttttcttttcttttcttttcttttctttcttttttgtttttatttttttttgttacccaaagtttttctttattaagcagtattttattagaaaaggtttaaaattatatttgcccgtttttaccctctccctggtttactttagctggaatttttattcatgtatttttgagtaggcaatgcatgcacgcacgtgttcttacctaaaaggagtgtaagaaagctgggtgggggagacacaagccttttaccccatcatgtgggaggcagaggcaggtggatctctctgagattaaggccagccaggttcacagtgttttccaaggagcagcatagtgggaccctgcctcaaaaaaccaaaaccaaaacaaaacaaaaccaaaaaccaaaaaccaaaaccaaaaccaaaatgtaatcaggtctagattaagtccgaacgctccccacatctgggttctgtgtatgccctccaccagtgttaactctttcgtcaactgcccacagctgagctgagcccatcttgagcctttggcttcagcccccctagcatggaagccttgccagggccataggcatcccctccagaccaggctacccatcttcagagaaggcagaggctgcaggctcagggatatctcagctctggattctgcccagccgttcccaaacctgcagttctaagtgttgcggcttctaactccagtcagagccttccacgctgttcttcatctggctctctgtggtttctcagagttgttttgatcccgagaccatgagtctgcacgtccccctcccatcacgtaagggagagtctttttctggcagagaggagtgtgtaagttaggaaacacaggtgctttgaattgcacagttcttggaattaacagtcttggagctcagatgagatttttaaggattatctatgttccttttttttttttttaaaaaaaaataggtatacagagaattcatccctagaaagtaacgtataatgtcacatctccacccctgcaacacacaatgtccttacactcaaaggaaccccggtggaatagtatgtggtagattgtgacattctgtgaggctcctcccccaaccaatatcctgaaagaggagggaaacgctcgattcagctatgagaggaatgcttgcgccttgggcatccacagtagctggattgtgggactgtgtgccctgcctaggcccggggctgacttcttagctggccttcaaaggacagatcgccattgaactctgggcaatacccaaaagtagctcgaggaagccgagagctgtgtttctgcagtgcgcaccatcgatccatagcatttgaagctatttttctctgcaagcgtccacaaaattcattactttacaatgagcctggcagggactgcggcagcagggaaactctacacgggtcccaggcgctctctctctctctctcctggaatttcgccttggcaggtaaatcaaatacccagtaaacacacttgtgaacttctccaaagccgcttctgtccgtggccttggctgtccctcgcgggtggcctttcattttcctgggcttggcctgcttcccccatgcactggggttgagccctgtggctgtacaggtatggccagctaatcctgccagacaaggtcagaaacaattaatgggcataatctctcttttttttttttttttttttttacctgctagagccagactttctttggtgtctctcctaagtctggagaaaggactgagaggagaattgaacttacccttcggatgcacatacccattcactgctctgtgctgccccccaccccgcccccgggctgctcgttatgaacgctgaagccttaggtggcggttatgttggagatgctgcttaaatgctatctctcgcgcactgcccgatagcagtctgccttgttgccgcctcggggtgctggccccctcctcagatccctatcttaccttgctgtacacaaaagagctcctctctgggggttctgagttttggttctcaaaaaaaaaaaaaaaaaaaaaaaaaaaaagcatttcagacgtgcagccccgtcagagtgtcagtctttacagctgtcagtcattcgtgggattgttttctctccctcgccccgtttggcatggtgtgtatatgctgctggagatggaatccagtcctctcccctagagtaagcgcatggcctgccactgaggccaccccctccctcctgccagggttattttccaatatgaatgcctcctctcggtgagcactttcttggttgaatgtgtgaatttggagtgcactgctttccaggaacaggccctgccttggtgactgactcttcctctgtcttgacctttgtggccagccaagctctgtgggagcttcagggtatgcagctggtagggaccgtgaggggatggatggcaggtattttaaagtggccttgaattggctgtcttccggcatcctcctgcagtcgatgggcaggttattgtggcctgtgaaggcacctgctgtcagagtgcttgccctcctgtcagctctgtgacttgtctcttctccttctgccttgctgagtgctgactgcagatgatggtttttagagctgcaaggcccggtggatctcttccctgcagcagtcactcaaaacctggggaggagttcctgaaggctctcaagacatccctatgactcctgcctcctgaccacacttctgtgcacatctcccctgcaaactgccccctccccctccccccattccagccctgactgctctgagaccccagcaactctagacttgatcattcctttgaagtgccccccaacccccaccccctgagttcctcctcagtggtcctctcctgtgcacaggctgcagctcaccagccagcgtcctgggcccctagatctggctgctatgccctgctgcttcatggttttcctctaagcctgtgtatacctgccactcaacaatacaagccattgttctctgtacctccaggtccacagtgtggtttctttatctctaggctaccttgagatcccgtgtccctgtgtggaaatagcaacccttctgtgaggcctttttgactcttcccattcctacttaccccaccccctctgcgggctgcttttgactctgcaccctttttgggaaggactcctcatttagtctaagatgtgttcttcaaagcaccatttatataccttttctccttcctagactgaggagatggtcttgtagttggaccacatagcatcttgttcagcagggaagaggcactaagtatttgtgggagttggggagggctcacacagcaatctggattcagccgtggcccataggcaagtgacaagtttataaaggtaaagggggaaccccgtgtttggatgaggtgttttcttttaattgggcctgttaattagggctgccaaaggggtctttaattgctggactttaattctttaatagctggaccttgatcggcagcctcaggaaaaggaagtgactaaatagggcagtaggccttggcagctagctttaggaatgttgttatctaatggattttagcctgacagagtatcttaaagtgtcattgctgtggagaaacaccatgaccaaggcaactcttataagggacaatatttaattagggctggcttacaggttcagaggtttagtccattatcatcaaggtgggagcatagcagcatccaggcaagcatggtgcaggaggtaaacacaagactggcttctaggcagctgggactagggtttcaaagcccatgcccacagtgatacacttcctccagcaaggccacgcctgctccaacaaggccacacctccaaatagtgccactccctgggccaagcatatccaaaccaccacacagagggattggggagagccatgtttggcatgctgggctggctagagtcccttcagtctgtaaagtgggagccacactttccacacagtacttgttgagtttccgtgaggaggcacggaagtgctagagtaatttggatggtgcctggaatgataggtcctcaggtcctgcttttcctggggaaaaccttagctgggtgaggcagggtattcctctaggaagtgggtgaaatcttgaaaggatgtgtttggacctgagcacagccatgggaaggacccccccctccccgcttccagcccccaatcccctagacccatggcaaagcctccctggtcccaggacagctactgaccttctgaccttgtttacagataatctccctgcagtttcttcctctgggatgtttacagcctgagacttgcccttgcagacaccccctaccgagattagctaatcctgcctcctactcactgtagaaatctgtgcactcaattcagagttaaacctgtgagtttgagtcgctgttggtatgtctccccacagagcgccatgcgcagcctatctcagctttgttgtatctgaatttgtcttttatttgttccctcatttccctagtcaggctttcaggatgtagccgcagggctcactcctttctgggcaacactgaggaggccggctaggctactgaggcaggctgatttctgtgagctggaggccagtctggtttatatcctatctaaaaaaaaaacaaaaacaaaaacaagccccactcccagcaaaacaaacagaaaaactaccaccaccaagaacaaacagaaccctggcaagggtggcttgcaccagccttttgtgtcttctagagaaggcttaagctactctgaaataggagggtgcacgttggggagccgaatctacatcatggtgggtggaggttttgaaccctcactgctgggtcatctgcgtgctgcagatgttcacagctcaaatcctgcgatgttgcaggggtttagaaagagctctgtggtgtgtgtcccatccttggcctgtcagaggaagcccgctcataaacgcttcagcttctgccttctcaggattgcggggcgggggggggggcatattctttggttttttttgtttgtttgttttgtttttggtttttggtttttgagtttgttttacttttttttcgagacagggtttctctgtgtagccctggctaacctggaactcactctgtagaccaggctggcctcgaactcagaaatttgcctgcctctgcctcccaagtgctggaattaaaggtgtgcccggcaagggggtggggcgcatcttctattcaggtgttctctctctgtcctggaagggtgatctgaatctgggctctggcatctgctaatgctgcctggaggcatccgactgggagatgtcaacaacagggatgtgttagaaagctcagaggggatcaacatggaattgaaagtttaataactcagaaaataaggagttttcaggaaagagactgggcttaaaatttttaagtaaatgaggtcacatctgtctccttccatgcagcagctagaatttgcagccgagggccgctgacgcccactcacgtgcccagcttgcccggcttaccgggatggccttgttgggtcctgacattcatttcttcctacctctggtcacaattcctgtcacatttacacaaacctcagagtgatctgcatcaaaatactgccttctgactctttttgtgggctctgcaaagcaggtgatttgagaaattggcctattccnnnnnnnnnnnnnnnnnnnnnnnnnnnnnnnnnnnnnnnnnnnnnnnnnnnnnnnnnnnnnnnnnnnnnnnnnnnnnnnnnnnnnnnnnnnnnnnnnnnnnnnnnnnnnnnnnnnnnnnnnnnnnnnnnnnnnnnnnnnnnnnnnnnnnnnnnnnnnnnnnnnnnnnnnnnnnnnnnnnnnnnnnnnnnnnnnnnnnnnnnnnnnnnnnnnnnnnnnnnnnnnnnnnnnnnnnnnnnnnnnnnnnnnnnnnnnnnnnnnnnnnnnnnnnnnnnnnnnnnnnnnnnnnnnnnnnnnnnnnnnnnnnnnnnnnnnnnnnnnnnnnnnnnnnnnnnnnnnnnnnnnnnnnnnnnnnnnnnnnnnnnnnnnnnnnnnnnnnnnnnnnnnnnnnnnnnnnnnnnnnnnnnnnnnnnnnnnnnnnnnnnnnnnnnnnnnnnnnnnnnnnnnnnnnnnnnnnnnnnnnnnnnnnnnnnnnnnnnnnnnnnnnnnnnnnnnnnnnnnnnnnnnnnnnnnnnnnnnnnnnnnnnnnnnnnnnnnnnnnnnnnnnnnnnnnnnnnnnnnnnnnnnnnnnnnnnnnnnnnnnnnnnnnnnnnnnnnnnnnnnnnnnnnnnnnnnnnnnnnnnnnnnnnnnnnnnnnnnnnnnnnnnnnnnnnnnnnnnnnnnnnnnnnnnnnnnnnnnnnnnnnnnnnnnnnnnnnnnnnnnnnnnnnnnnnnnnnnnnnnnnnnnnnnnnnnnnnnnnnnnnnnnnnnnnnnnnnnnnnnnnnnnnnnnnnnnnnnnnnnnnnnnnnnnnnnnnnnnnnnnnnnnnnctccccccccctctctttttagtgagttcctcccaaggtacagtctgccacacccacccatcctcgccccatgccctcctatctggattgctgcagaatttctctctgccccagggttactttgtgtgtctgtgattcagactaatgtttgttcctcagaagaacaagccaggtgggccccagaggtcactctctgtggagtcagactcagcgtgctctccttgacttgtacaaccccagggcttcccacaagtgagggcagtgtgcgtcagtccggaccaccaaaagtgaacaccagggatggagggaaagaggaatgatgaatgttgccacaagcgacaggtgcatgggggtcggggtggggaatcccccaggggcccggtgctcacagctattcatttttagttgagtgcagagactgctctcaggaaaatgctggatgtgtttcagggacctgacccatgcttaagtcactgccccaggcagttaagtctggatgacagactccaggtgcccatctgaccacacatagctcaacctgggtagaacgaatccatgccataaatggatccaaacccatgatattgaggagtgttttgaaagaaaaggctggggggaccccaaaactgagccattgagatggctcagggggttgaggcacttgctgcacgagcttggggacctggtacccacagtggaggagagaacagattcacaaagttgccgcatgacttccacacatgggccatagtgcacctgcccacacacatcacacacatgttcacacatgcaccgagagcggcaatggtggctaatgacaatgacataagccgagcccttggagctcagactctggctgggtaaaggctaccagtcctgcagggaacctagcagcatggtgtgaagaatgaaacttgggtcagcaccacgttagcagacgttcgtcaaaacttccagagtctcacctcacagtctattcttttgacacatttaagtgcagtaaaacgttgcaaggaggtttccacatgacaattagcacaactcatgtttaggtatagcgacatagaaactccccagcaaagtcaagtagcaaagtacctgtgtgactcacctatactgtaagaatgtgttctattgattggtaaaccttgctcagggtaagggcctgaggaggaaggatttgtaatgaacataaggatggagtctattgacggaggaagcagagtacacgaggcctctctcctaagagggttctcactgaaagacaaaactcagggccaagacagtgctcggggagattcaggaaggctggctccatagaacagcagaaagatcaccaggttgtcagatgacagacatccactccagccttctgggtggctggatggcaggaattttcttcctttgaagcaaatagccatgagtgtttaacaagtctggttcccccaagtgctttccctaagctgtgcctcctacatcagggggacaaggtgacagacccttggatgggcaggggtgcagttctccttcctcacccagctgacaagtgacattgatccttttggctgctctgaaaacctgccgtgcatccgttcacatgcacggcctgctgtctgccctccgtgctcctctctcacctcagacactcgggagtcatcagtatgggctcatccctgctcaccccacctgactactgggacacccccagagcctggcatggcgtgagaagagcactggaggtttgtacgagggtggggtgggagggatgagagttagaggggcttcctggagtaggaaagactccgtccgattctccgaccattcctactgaaagccttttactcctcgagggctgtatacctagttttctaactccactacctatgtactgggggacagagtgaagacaacgtgttgatggatacagcagactgagtttctcagagcagtggtaactccttcatagccaggccttgttttgcaggccatgggagaagcccttcttgttctgctgcctctcccctacctcgggaagcaccccagcttgtgttcagcctgggccaagcctggcagcctcctttagaggccacgttgagcatcatgctccaagggcatgcaggtgacagcctgcatcttttgggaggacaacgggaaggactaaaagccacaatgccagaagatgaagtggagttaggttttcggagcctcctcgtgtgggtggggtgttagggtttgtgaagatgcagagacatgcagctactttgccagggatggagaatctggggagactgatggggggttggtgtccagggccctaaatagtggcagcaggcgttatggatgcattataatggggagcctgacctgcactggttttctgcagtagtcctttacaggaactctcactaagcctgtggtccacttatgcccagattgtggtgccaggaggctgccctttgcagcaagcagcctaaaccctgcctgtttctgtcatttctgagaccagacagagaaagagtgggtaaggtaattataagttgagcatttacaggcaaggaatctgatcctgtcctttaatttcctcccgtctagaaaatagaaagcattcagatacttacatccagacacaaacgctgtgattgacagctgctttgactccgagtggggcggagagaagtatctgccgtgtggccatgggcattaggttttaagacaggctgccagttgcccactgctgcccatccttctagaagcttcttttatgccatctttagcatgggtataatggggaagaaggagagggatgagggggaagtaggactctgttcccctacctcttcaggagccaagaggacaggcagagtggtctttgggctatatgatgctgagcccatcacgggaggaaaaagcgaggacctccggaagcaagcttgagcagccaagtccttttactggaacacatgctaaatggtcactgagacaaaagtgaaggaatcgtatcagttcagatgaggaaaagacaaggaacataaaaaggagcttgtcagtactaagaaaaaaatacatgcatacatatatatgatccagatatccatcaagtggagatgaccctatgatggtatggtatatagctatgtaaagaaatatacatcaatataaagtatatttatttaaatgctttaagatttattttattcatgtgtatttgtgcaccacatgaatgtctagtgcctttggcagtcggaagacggtgctggatccccttgacctgtagtcatggccgattgtgagctaccacatggatgatagcaattcatctggggtcctctgcaagaacaacgtgtgctcttaactgctgagccatctcttcagactctaaaggataaaagctgtgtaaaagttttgaacaagactgtatgttttttgctggttatgtgcacacaaccctttatcaaaagtccgagagagttgcccctgaggttcatttgtgacagtctgaggagatgaagagggacgttagtataataatcagaagagttcgtgggaccctgattaaaaacaaaaactccaagcggagctggtgttcagcactgagtaaggagctcggtgtctccagtggttccaggctgtggtttagcagcttcagcactgggagcagagacccagccagcccataaacaggagctgagcatccgtgtggagtggccgtgtgctgggtcactcggcagtgcaggtgtcagggacataaagtcatctggggcaaagtgaatcattgatggttacaccttcttagaggtggcattaataatttaacatttattaatcatctctaggccatttctattttgggtacctactggaggagattcgcttttttttttttaaagactgaaaagatgaatggatgatacccttgcccttgagtctctcagtaggtgggccttctgttggttctttctacccttaatttggtatccttgcttctaaagccttgccctctgctctctcttccagctgcccctagagcaatgatttagaaatatgaatccaatccatctccctgtttacctcagcgcctccctcaactccctggtcctggaggaagattattaatatgtccctcagtgccctctcctaactgaaatggaagtgccctgaagttacaggatagatctaggctgacttcctgctcagcctggaacagcagtgatgctgtcctgtgtcaagttccaccccacatcctttgagacatagtccagatacacccttatcccccagcttctatgaagctttttggaccaggctggaggggtttcacctggcaccccactgccaatcatatagtatagtatagtagtcgctgtcatttctattgggaataccaacttaggtgaaagttacttatccttccctcacatttgtgccttagtgcccgtcacatgattggctctgaaaccacagtgagggagaggggaacttctgccctggttagctttgctgcgtaacgaagcactccaagactcagcagcttacagcagagatggtggattggaaagtttgggttaagcacagtaggtgtggctgaggccttagctagggaggagtctaggctgggagatacactgcataattggatcataatcaccacccctaatcccagtaccctcttttgtctcaccacctctgctcatgttttcttctgaagggacagttgtgagacgcatacaggtccatgtgcctgtggcattacacagtgatcctcggctatctctgcacggcctccccacccccaccccgtatcatatctagagcctggttagtgcaggtgcctctagcccctcttggctcaccctccagtcagtccttgcctcaggctctgcctctgcactgtaccagcaccacagcaccagctcacagttgagactccccgttgcagtcaccaatgtgttggctttaacaccttttgtgccctttgctatccggagactgtatgtcttgaagctggcctggtttaggttcccctggacacttcgggctctctgagtgccccaccatttcctttagagcaagctaggctacaaggcagatggacaatttatcacttatctcggagattcaccaagccacggcgccggggaaagccattagtcatgttcggtgtcatggagaaagttacttaaccttgaagaccatttcctcctctggtaagtgtggctgtaatgaaatcaacctcattcagtcgaggaggagtccaggtgaggtgactcgaggagagctgtgaggacaggcccttcaccggcctcattcatcttcatcttcaagtgccatgtacttggtgctaatctaaaaactgaggggaaacgagaaaatggagaacaggaaacgtcgctgatcttgtaacaggagagaggcagccctgccctcaccactcggccgctcagtacagtgttgtgagtgcctcgttactttccagggacagggctccaacacattctcactgtgtacatatgctccgtgtatcttttgcatctttaacccgaagtgaaacgttatgttccctttaatacttctaaacttagagctttcacgagacccatttttagatcaatatctcatattggtaggagatgaaattttaaaatactcatttgttggttttcaagtattatttgttctccagggttccccaggagactggtacatggtgcatcatccccatgttctatttctatacatgtatgtatgtatgtatgtatgtgcaggtatgtgtgtgcatgtgtgtgtatgcacacacctggaggtcagaagttaacctccggtgttgttccacaagcaccaccaactgttttgttttttattttaaattctattttatgcctatgggtgtctgtgcaccatgtgggtgcctggtgtctgcggatgtcagaagaggttttcggattccttggaactagaattaacagatggttgtgagccgtcatgtggatgctgggaattgaactcaaatcctctagagagcagccagggctcttattactgagctagctctctgaccccatcagctgtggtttttttgagatagtctcttactggctcatagctcaccaagtaagctagactgcctggccagcaaggcccagcgatctgcccatctctatccccagagctggggtttaaagtgggcattcccttggcagggcagtggtggcacacgcctttaatcccagcactggggaggcagaggcaggtggattnnnnnnnnnnnnnnnnnnnnnnnnnnnnnnnnnnnnnnnnnnnnnnnnnnnnnnnnnnnnnnnnnnnnnnnnnnnnnnnnnnnnnnnnnnnnnnnnnnnnnnnnnnnnnnnnnnnnnnnnnnnaaaccctgtctcaaaaaaaaacaaccaatcaaacaaacaaacaaaataataataaagtgggcattcccacagccagccttttgtttgtttttgtttttcaagacagggtttctctgtgtagccctggctgtcctggaactcactctgtagaccaggctggccttgaactcagatttttttctgttttgtttttaatgtgtgttctgaggattaaaattgagtcctcacacttagtggcaagcactctgctggctgagccattacctgaaccctgttcccatattctaggtagtttggtccgtcagtgtgcctgagtcacacgtggaaaaggatttaagagtggggctggcgcttcggtcctccagttgtacggcaaacatttcgctgatacagctgtcacatgagagccatgttcccatggcctacttgtttgaatcgtgctcagtcatacatcttgaacattaaaaaaaaaaaaaaaaaggattctgtaggaagaggtgtatgtctctgaatcctaaggcatgtttcaagaaatgaatgtgaggtgtgttggctgctccctggtcatgaactgctgaatcatgtcaccctgagccaggctcactaggactttaacatagcgaagctaattaggtgactgatagcagctgagatagataacttcacttgcccagagaccatggctctctggggccttgaataattcttttgagggtcttttgaaatagacaggctttcctcctagaatatataactatgcatatgatgcaattatacatttaatcttagccttggaaggaggatatgtatgtatgtatgtatgtatagcctcaggatgagttagctcttaactaataacaacaaatgttgacatttcagagcagtggtggggtatgggtggggtgcctctgtgactcgtgaatttagtagtagttcaggcttggaggccctcaggaagcaacagcccagatcttctcaaggccagctggcatgggaaagattgactagggttggaagatccactcttggtggctctgtccactgctaacaggttagtgtcggctggtggcaccaagcctcaggtggtccccatctggctgctttgatgtcctcacacagactatgtggtctgggaaagcaggcagattcaccctcagaagctaagtgcatggtttctccatttcctgtttcccaaaagtcagctgaactcagcatgtcaggcaaagtatggagcccttagtgcagggccttggtgcttgccttgggcaccaccctcctggcacattgtgtttatgaacctggaaggcatccttatctaccactgaggggttctttttctcctcttcttagtttttgtttaagctggtctcactgtatagccctgacttgcccggaaccagctgtgtaggccaggctgggcctcaaactaggagggtctcctatttctgcctctgcctctgcttctgggagtgctgggattaaaggtgtgtaacaccatgcttggccatcactgaaggtttctgagtacggttttgttacatgggcatgcattattgaatcagtggctattggtgaccagacgtagtgtccagcccctttgctgttcctgtaggtctgcgttggagctgaaattcccaacctgcaattcatggccaactttggcaacgctaaagagctaccttgagtcatctcattagcacaaattctgatgtcgaggttcacaggatgcagaagcgtcttgtcattcatagtgcgagggagttaggagctcaggtcttagggcatggactaagtgtctatgtaagtgaagcacatgcatatgtatattgcatatatatgcatacatggattgcatgcaaatgccttttatactatactagtagctataaaagaagttttattcagcagtcaggcatcatttgtattttggagtaaagctttggttcacacgccttgcagaggagtgcagtataaaaagggaaataaaattacttgtcctgtggccagggtttaccttctagtcctttctacagatgagactgggtcttttctcactgcagaagtggcattctgtacccaaagggtacagaatgtctgaagttataattgttattttttaaagaaacagtcctcacggggaggagcctactgttgtagactaagggaggtggtccagcaactgctgtgggcaaagttggggacctggtctgtttgaaggcagcagaaattagcatcgcagagacttcctgggacattgaagagtttgatgtgaaaggagaattggtctgttgaaaataaattcactttatttctgtatcaagctgcactccctgttgcatatggtggtgcatgcctggaatctcagcatttgagagcctgagccagaaggattgccaaaggttcaaaaccaacacttgtgtataacaagaccctgtctggaaaagaaaacaaacgaagacacactttctaagaacagccctgtttttcagggacgaagagctgtttgtaaggtgggagggaaatgacagagatagttaacaaccaacaggtagggctggctgtagctaagaatggatagtttgtttatttatcaggattggttgtcatctgcttttgctctgcatgagttgctctgacccagctgccctggctcatctaggccactcaacactgtttttccttggtgtgtgtgtgtgtgtagtataggatccatgcttgtttaaggtcggtgagctgaatgcactgtggttaagctcattatcagattgcatcagacggggtccagctgttttctttggacaaaaggagaatggcactttgtgaaatcctcaaaactgggagcttaaaactgttgagagctttcagttagatgtgtccattcatttgggaacctgagtggtcgacattgtaaggctgacctctctgtctctgtctctgtctctgtctctgtctctgtctgtctctctctcccccctctccctctccctctccctctccctccccctcctgtgtatgtatatgcacatgcaagtgtgcacgtgtgtatatacacttgaggccaggattttgccttgaatgtcttccttgattgctttcagctttaacgcctttgagacaggacctcttactgagcctggagctcactgattgattttgctaaactagctgcacctgtgtgcacattcccaggaaggggagagatgtggtcagccaagatgtggcactcccgggaggctactgccatgcccctgaacagatactgaccaggatctgtcagctgccttagcctgtttgagacatggcatctttttattgtgtactaattgtgtcttagtccccaagtcagggcctttatagacatcttatttaatcttttccctcttgcacttggggaaactgaggctcatagtccctgtcagttattccaaggtttcagttggtaaagttgtcctctctgaagtccttcctgtaagatgaggccaaggtctggagacagatctgtatgaagaagaaagacaagcctcaggtgctctttctgccatgcgtggctgtcccggtatctgccacacccaacaagcagagaaatgtctcgcccatgtttgagtggcttaggggtagtcagtgctgtgctgattcccaaatctgttttctattgctgtaacaaagtacctaaagtggagtgttttattttaaaaggagggattttgttttttagcccacaggtaaaggccaaagactgttggttggcccttgtgttctgcttctggtgagggcctccttgactgtgtcactacaaggcagatggtatcctggcaggaaaaggtgccgtcttatggtgaggcaggaagccagggatggaggatttgaatatgtaggtgtatgtgtgtatgaacccttgtgaggcacacttagaccttgcccaaagaagcgttgcaaatgacatgggatgagaaacttggatctccgtatttaatttttgcccttgcaagaggatgcagcgtgaggaacgtggggagggtaagcaggaggagtcgtgaccttggaaagctgtgtcacaccagaaggcaggggcttggtgggccagtcagagccaggagcccaagggcaccgaccttgtttcagatcttcctgcacactgtccctctctgctttgtcagctggtgggactctgcgcgccttcccactcctggtcactccttggaaactgacagccgtggtaggatctgtttgcctctctttctacagggaaaaaggaggtgctccttaggataggatggaaataaaatggagtgcccctcccaagtcgtgccccagtaaaaagactcaatggctttcttgggccaaccccgctaatcatgggagaaatgtttaatttcagccagattacaaggcggctgcttttatttgtttttttcctggatttgtgccaaggactcaacttttcctgttcattttattaaaaagtttataaacagcgttaataaatagatataaagctgccgtataaatgacagcgagcccaaatgaaattcacaagggtcagtgttgaataagtaacagagccatgtccttgcgagatcaaattcccatatatgcaaattagacgcagagctttaccacgctgttttaattaatatttataaatcacaaagtgccttggaaagggccagtaacctacttatactgccatcatgtcacacaaataacaaatcctctggggactgctgtctgttttgcattcagtcagaaaagtaagcacgttgctgtgtctgtctccccttaggtgtggtgtcagcgcagcgacaggtcaccgtccaggaagggcccttgtaccgcacagagagctcccacatcaccatctggtgcaacgtgagtggctaccagggtccctctgagcagaacttccagtggtccatttacctgccctctgctcctgagcgtgaagtacagatcgttagcacggtggactcttccttcccgtacgccatctacacccagcgagtccgcggtgggaagatctacgtggagaggatccagggcaactcagccttacttcacatcacagacctgcaagcccgggatgccggcgagtatgaatgtcacacccccaacaccgatgagcgctactttgggagttacagtgccaagatgaacctagtgggtaagtgactctgcctccacatggccagtgtcaggccccagtccctccctcatgtgcttttgttgcctatcgatatgattccccagacaccttagaaaaccgcatgagggagcatgagtgaccatgaatcctaagtacacttgtgaaccctggatggctaaggctgacacatggaaagttcttgtgcaagcatcaatcaccacagtggttaagcagacctttgctggtgaaaggcaaaatgaatttatcaaggccagatccaggtgtggtggcttcatgcctataatcccagcatccagaaggctgaggcaggggactaccctgtgacaaggacatttgtgggtggtaatttgaagatgtgacttggaagggaaagtgggtgagaccagcaggaagagcggcaacaccccagatttaagcaagggcaaaactcccagcatgaggcgacagtagatacacagggacaggaggatcattacaggagtgcagtaatgtgtgtgaggggaatctcaggggagtggctgctcagataacacacagagagttccagatgctcagaggggagagacaacaagcagggggtgggaccattttgaggtgtcacaggtgattttagtgaaccacccaggcggtttgtcagacagcggtaatggttctttttgggaacagagacagacaatagcttgtgactgaagctgcccatgtacagtgtgttctttaatttccttgtcggtagataggagtttaatgagtgaaagctttttcagcaggcctgttctgttttttgggtagacaggcactggaatatttcttcttacagcatccaccaccatgcaaagacttactttaatgtgacgtaatcagcaaacaagcgtccctgttttgggatgtaattccctggactccactcctcaggagccattcctgggtcagaagtgaggttgagctatctcaaagtgatacccaacaaggaatcttactagatgtcagcagttgttcttacacagtattctcggagagctcttctcatacattttctaagaaaatccacctttgctctgagcgtcattaagatcccaagcaagtgtcagtgccaaaaaatactgcccctgttgtggcgttaacagtggtttctgtgtggagtgagtctcagattctatagcactgtgacctccctccatgggaacattctattttacagtgatcccagattctctgcagaccacggctgtcccccagacactgcacaaagtggaacaggatcccctggagctcagctgcgaagtggccaccgagaccgtccagcacacccacctctcggtatcctggctgcggcagaagggtggcgagaaccctgtggaggtcatttccctgagccgagacttcatcctgcactccagcagcgaatatgcccagaggcagagcctgggcgaggtgcggctggacaagctggggagaagcacctttcgtctcaccatcttccacctgcagccttccgaccagggcgagttctactgcgaggctgcggagtggatccaggatccagatggctcttggtacgccatgaccaggaagcgctccgagggtgccgtggtcaacgtccagcccactggtcagtgtccctcagcttcttgtccttcacctggtggggagtcagatgctaggaggttgtggggacgccttgtttgatgaccatagcaatatggtagggttttgagtgaggttagagatagttgtagcctaggctgagggaaacaggtacatagtcccagcttccagcgagctgcatacagctgcccatactggcctctgctcattgtcatgtttgctctactagatggtgtcgtaaatattttatcttgaataaaactttttttaatgagagtttttttcaaaaaaacaaaaaaaaaaagggactgcagagatagtttagtggtcaaaaacatttgttgctcttgcagaggacccaggttcaagtcctagctcctacatggtggtccacacaattattcctaacttcattaccagggtctcctttgctctcttttgatctccgagcacacatgtgatacacacatgcaggcaaaacacacataaaaagagtacatcgttgtttaaaaaaatataaaagtgagtgattttacagaaaatctttgtcttatgactctgggttcttattcctgttagccatggatgccactccgtgtgatgatgttgcagttacagagggcatttgagatgatgagccttttctgttggatgcctgagacagcgagctaaggagatgttagtgtaccgttatttttatagtaatatttctgccattttaaacaagacttctgaaatgctttaacgtacattgtcatgtctgtaaggcaagtcacaatggcatccacacattgtgggtgagcatgctggatgcagagtaccctgtggtgtgaccccagagtgtgtgccatgtggccagtgtggagtattaggtcctgctgtggacactctgtcaagggaagacctgggtaggtttcccaagggggaaagaatagtatgtttagagctgaggtaatggtggtggttgtagaaatttttttttttttttgagacagggtttctctgtgtagccctggctgtcctggagctcactttgtagaccaggctggcctcgaactcagaaatccgcctgcctctggttgtagaaatttttaatcccagtccggggtttttaccccacgttgattatttagtttggtggcctggcacactatatccccacagcttctttggatgtctcctgtgactctgtgttcgtccctagttcttgtgcctacagggttccagttttgagctgacggcagctgttgatgacattggctgagcttgggcaggttctccggctaagctgtgggtctgacttggttggagggcaatcataatacagttactgaggtggctgtggagggctttttctcttctctgatgaggagaatgacgccttcatgttataagcggtagtactcctgtcagaacctgcctgtctcttgtcctccttgtcctggtggtcagttgccttggtctgtgcatggtactctgacatttgagacaatgcttcagagtcaccaaatagtaaactttgggacacacccctgaagtccctgttcggagactcctggcgaggctgggaagctgtgccttaagtattccctggtctttcttcacctgtctacattttatcttgacacagctctgaagggggcagagcttataggatcctctggacacctaatggatgtgagagcaaaagaagattgtatcctggtgagagggcacacttgatccacacttaggactcagagctcttactgtcttctgaatcttctaatattaagaaatttacccaagaggctttagttcctgtttatcggtttccttactggttggttttaagatcagtgtcaaaaaagtctgggcctaatttccagtcttaatgcttttaaattaggttgcatcagctaatcttctttattttaatcttaccaatttggaattaggacatttgaatttgccctgtaaatgtatccagactgagctaagaaaggaaaactctaatggaagtgaaaaaatgttgatagctccactgtgtgttccagttcaaactgaggagttgcaactccgccttggagtctgtttcttcatgtttattttaatagacattagtctttacagcactgaaggtgtcgtgcgaggcattcagggatgccaagatgcacgacatcggtctgtgtacttaaggtgctaagtgctgtgtgaatactgaaggctgtttttgctctatgttttctctggataagatggctattacaacagatctaggaattctagttcctcagtaggcttgagctgtgtcaaggttgagcagacagccacaggaagtagggaagggcggcagacatgctgtcgggcataagaaagtcacgtgactggatggtgggttcttggttgagcagtagagaaagtagggcccctgaagctgggagctgggaggtcgaacatgggatggactctgtggaccaggagtcgccaagccattcttcttggcgctttaggaggtccgtgggggtgtgcctgagaggtacacgtgggtgagtgcacttgctcactcgtgtgtgtgtgtgtgtgtgtgtgtgtgtgtgtgtgtgtgtaccagtgggaagagggcgagaacctgtgagctcctcttgcttcaaccagatagttgccttattgagcaatgaaagttttacatgaagtaaaggaggcccctctctttatacctcctgaagaactttcaatataaacactggagggaatccctttagtcagggattagccacctgattgggtaatttaggaggaagagctcagagatgtggaggagggggacatgtggaagttggtgagacaggttgggtgagcagtcaagagaaagggttgtaaagaactcatttggccaggctgtggtggtggtctgggaggtgagactgggtgccagaggcagaaggagagagagtgatggaggaggccagctgtttggaagtcatcggtggttccctgacccctggctgagagggctttgatctgtcaggaagtttgggtgatacagggaggagctagttcactggcaagaaaaaaaaaacatctggctcaagagaccagcttgtgtgggatggaggagataaagaaaaggcatgaggagataaaggatagacgctgagctgtattggaacggagaagtgcgtgcttggctcacatgatcattttccacaggaaaagattactcttacgtgcttgaaatgtgtgatggatgggttgtggatggccgaggcatggatccaaaggtgttagtgatagcctgggattgccacagaggaagggctgttgtggttgagattggtgaatgtcaagaaagttcacacaccactgtgatgtgatttttttttttcctctccatattctctgcaaggaacatagctagaactggaaggagttaggagctggagcctcccacagcaaggagagataaggccacttcctcctagtcttaattcctcttcctgttcctcacttccactgtgagtgcctcctgacagagccctgttggtctaacagtgcgagtgctaagcaaaaatagacagcctggatttggctggtattatggtatttaatgggttggcttggactcagatatccttggctaaagttggattttctctcaagatgaatacggagtcatcactgtagttagtgtaaggaaggtcaggggaataggatttcctgaagcagtttggtaggttgcagctcttatttgcccagaatgcatccagtttgtttgtgttcccagacaaagagttcaccgtgcgtctggaaacagataagaggctgcacacggtgggtgagccggtggagttcagatgtatcctagaggctcagaacattcccgaccggtactttgccgtctcctgggccttcaacagctcactcattgccaccatggggcctaatgccgtgccagtcctcaacagcgattttgcccaccgcgaagccaagggacagcttaaggtggccaaagagagtgatggtgtctttgtgctgaagatataccacctccgccaggaagacagtggcaaatacaactgccgggtgactgagcgagagaagactgtcactggcgagttcatagacaaggagagcaagcggcccaagaacatccccatcgtcgtgctgcccctcagtaagtagaagtgcgccacttactcgtttctggtgtggtgactagtgacatcgtggaaaagtgggaaagacagtaggtataggcagaaggggcagaatttggggggtgaagctgaccagagaggaggcctctccaccccctccatccccaggtctgcagagcagcaggggcatgtcctgggctgcagagggtacccatacttgagctcaagcagctcaagctgctgtcagacaccagccttgccagctcagttaggagtaagaccaggaagtcatttgcacctttgggagaattaaatcccagaagtgggcagaggcctgccttgaaatcttacttaaggagagctcatctcttatgggaggacttgaacatcatcaactgcattattaagaaggctttgccatctgggttcttccaggtatcaatgcaggcctttccctaattgtctcttctgtactgaaattgcattgttaaaagtcagtgggtgcgcacagcgttaggttcatcctaacacacacatgcatcagtcagtggatgggctctctgtcttcctgggatgtgctaggagagcttggacctctcaaggctgttccagggactcagcctccaggggcaatgcagtgtctggatgggtggtacccttttctgagactccagagatgaacagtgtgtatgcatgccgtgtttaaatatccatagtgttaggattaacttattaatcttcttctctcacagttctatttttagcagaaagttaatcaaaacttacaatgctctgattttaaacaagatggtccagtgtaagaactaacctttaaccttttctcagctcccagggctgttcctcctctcagccttgtcattggtttctttacatttttatttacacatttatgtatttgaaatgtttctctgttgtgtgaagtctaaaatagaggacgcttgttttctgtcatgcttattatattttgaacgaacacacacacacacacacacacacacacaccttgagtaaccttcaactctttcttgtgctttcctcgcaatgcatgatgctttgcatagagtaggtgcttgctaagtatctgtatagttgaaactactggattgaatgcccacactctttatactattttcctgtgcctgctgtaatcacagactctgtaccttgagactaattcctcattgtttaagaaggatggcatgaggggcagccacactgtttgcttcctgtatcttttgtactaaaagatttcccccagcccttccgagaacttgtttgatgatctgtggcctgctatattgcttttccagcagataactgggtagttaaagtcccccagcagcaccagatcctgccccaaggccacttgggtaagtctactgaagaacaacaatcaatggtaatggtgataacgccctggattttaatggcacctttcctcctaagaacccaaagtgcttctgcatatatgatctctctgctcccagtcctgcagtcctgtacaagccagcgttacatccatcttatgaatggagatgtcggagcacacgcgaggaagtgtctgatccggttttccactttgcggttgagcttggcacttgcattagggaacattcgctctaaccccgaacccgctgctctgtgcttagcctgggccccgccagcagcctcctgattggaaatttcatttgtgaacacacactcaggttctcattagttctgtcctagtcttcattcagtctggaggagatgaccttgtcggctacctttttacaagcctgggaaccttgtgtaaagagttacagtgggctacacagcactgtgtttgtccatgctcccgctgccagagggtttcccttctccctaggttttccaggctttctccacatagccatctagaatgtccataagagtctgctgttgtgacaggagggcacatgaccggtgtcctgcaggccactcctctgtgtaagacagacatggctgatgtcctgcaggccactcctctgtgtaagacagacagaaaggtttgcttccttggtgctaaaattgccttctgaatctctcagcttgaggtaaaatcagcgaggaaggatactgagtatgatggcgaacacaggctggactcagcggtagagtgtctctctgcagagcattccggaagccttcggttcagccctcagtactgctccgccttcctgcctcatcccctcggtgtcacaaccctaaggaggcactagcaggatctcaactttgcacatgataaattgaaggctcctctagtaagaataccaaaatcccgcagtcgggaggcagtacagccaagctgcaaaccatttctgccatgagcagtggctctacaagagccttgtcctgggcaggctgtcctgaagattgctgtccccaccttgtccagacaccgttcctgtgaaacaagcacaggattgctctttatgacgaaggctaggtgctgaagtcttgtgctcatctttgctgtttctgcctgtgggggaaaattaagggggagaagaataaagtagatctgaacgctgcagtaatcgggtgcgcttctcgatctggggcttgacttaatcaattgtgaatgttgcctagaaaattggatccaaattgattatgacattatgtattgtgttaattcttatgagcttgttgaactcaatataggtaattatacagaataacatatgcataattaagaaagtgttagccatgctgtttgtgagagcagaaatatccttaagtatggtaaatcagtcatgactgtgggtaccacattttaaacacatactgtgtcctgcacaatctgtatgcattgtctcgtttgctgtttaatcttttgtgggtttaaaaatagcatcctacagaagaaaaagctgaggcttgtagagtttagatcatcccctcaactgagaacagctatccaaaggcatggcaaaggctagactgagctagggatggagtggagttcttagccccacctttgtttggcagactgtcagggtagagagcagaggtgccccaggctgagtgggtctcagaagagagcagtggacggtgagccactggccatggcttactcttctctgttaacgaaagcatgaaactttgctctccacacactctgtgagactagaccatctgtgccccattttacacacacacacacacacacacacacacacacacacacaccccgtcttctgaatactttctgactttttttctacttcctagtaattctctgaaggattcacatggcacgctgaggatgcgtatagctttggtttgactcttgtagcttcaagtggtagaagattgagaggcagtacggtttgggagttcctcacgctgaaactccaagccaaaagccctgagctgccgatgagcaggtcacccataaataattttttgtcataaacaccatgtcattgtatcatattctgtttctgatttacttttaggccttagtacctcattatcccaacccactacccaaagcaaagggcattctaggctaccagatctagggagcagtgcccagttccaaccagccagcccttacaacagcaagttgtggttcaaaacaaatcagagtttttgagccctttgagcttcactgtcagaatcatgggattcggtttgcacccttcttcctgcatcctggagacggtaaacccccagtgtggccctctctcttctccccagaaagcagcatctccgtggaggtggccagcaatgccagtgtcgtccttgagggagaggacctgcacttctcctgcactgtccgcacagtgggcaggctgcaggcccgcttctcggtcatctggcagctcgtggataggcagaaccgccgcagcaatgtcatgtggctagaccgggacggcaccttgcagccgggctcagcgtactgggagcgcagcagctatggaggcatccagatggagcaggtgcagcccaactccttcagcctgggcatcttcaacagcaggaaggaagatgagggccagtatgagtgccacgtgacggagtgggttcgggccgtagatggagagtggcagattgtgggagagcgccgcgccagtaccctggtctctatcacagcccttggtgagtgagcagtaggactgtggcagacatttccctgtcagactccttcccaggagccgtcagtggctaaagcgcttactgtgcaagcttgaggatctggccgggaggttcacaggacccaagtaaaatgttgagtaggcttggcgtcatgcctgtaattccagcctcagaggcagacatgggctctttagagcaagctagctatcaggaccagccacaccagtgagctctgagtttgattgagagaccctgccgcagcaagtaaggtggaagaatgaaaagatgggcctatgcatacacatacatgcacatgcaaacatgtacctacaaacatgcatatacacatatgtgcattttatacacacacacacagagcaaaaagacaaattctgattagacatgatagtatcttccagagggtttcactgaagggacatatggtaatatgcgcagggttgagggaactaatagcagacggtgaagcacaggggactagtgacattggggagctgttgccaccaaccagcaggagcatggctgggacagcactggcctggaagaggggagtgactgggtacaggaacaagtctctccagttcacagggtgtcttgcccagctgctcacagctcagccctgcaaaagtgtggctgaacaggatggagatcccattgccaatgatacagcatttggcccacgcctacctgactcttagcactcagctcggttgttccgtttaggcctgtgtttttatctcctcccctgtaaagcccccacttaagaaaaacatttcctcatttgccagggagtgaagataccttgaggtttgctaaaaccaagtaatgttagatttgctgctcacaggctatccaaagaggtttctgctcctgttatctgccagatgcaatcagcccattacattctaaaagaccagcctgctactttgctgggaagataacttattatgtcaagccttctatttgtcaggaagctttgtcagtctccattcgcccagactctgtcaccaccttccctcagatagggctggcggtgctgtcgcctgcctaataaagatggcagcccagggtagatctgcccaagacctcgtcagtgttctcccttccaagattgggttgcttttgcttaattcccaaatgtctgttttcaaatgcatggtggtaaaaacattatccacgtgctgtttaaaccccccaccccatgccagagcttccctccagctgcttcacaaaggggtaagtcgcacaccactgttaaagaaatccttgagcttttcagggtaacaaggtgttgcccccaagcaaggcatgcagtaaaaacaaagaagaacaagcatgcaaacggtaagaaaacagctccggacccctggtgttccgttatggcacccatttggttagactggcttgctgttgaggacttgggacggacatggtgtcatgtaaatccagatgcagcctctgtatcctcccccacatcattgcgattatatctgcttcctgaaagcttagtaccaaagaagggcttgccttgtgtagtcattaggcagctcagattcctgttcctagaaactccctccagtgttgaacatagtccctgtgcctgtgcttggcgctgctgtggacccaggcaggggaacttgggagatggctctgagatacgctgcatatggtttttccccatcctgggaggttaggggtacccagggaagggtgattcggggttgtttccctggaagtaattttacggtttcagattatctgtccttggcgtattcttaaattccatgcgtgtctggcagcttccacagccaggacgtgctgagtagcactcctctgggaccctgaggttagctctgctcacctgaccccctctccattgcctctggaactaggagcaaggttgtctcactagtcctaatctattgtctacagtaagcaatgaacactcacgagtttctggattgcttctattaggcatggatcccctcagcggtgacagctatgtggatgaactaataggccacagactgtgactgtggagggacaccttggccatgtgcagtctggtctgtgtccacttatgtaaagtcagggatacccagtgcagggcctgtccctggtgtccctgatctgtacgaaacttttggcacatgtaccacacactactgaccatcacggccacacagggctactctctcttcatttttttgaattgaagatccagagagttcagcaaaatgtgccaacttattctctaataattcccctgggaaatacagaagattaatgttttgtcctctttgtttcttaaactgtattttctagactacatataatgcaccacacactcatttaaccttcacaagaactctttacagaaaggaaaacataggcagagtggacttagagcatttgtttaatacagtgattctcaacctgtgactcacgactcccacagaggtcacataatctgatatcttgtgtgtcagatagttatattgtgtttcataacagtagcaaaattacagttacaaagtagcaacaaaataattttagggtttggaacaccacaacatgaggaattgtattaaggagttgctgcattaggaaggtgaaggaccactggtttagtgtcatagaactagtaggtgtctcgagacgaaggtgacggctgggagttgatgcctttaaccagactgatggttcccctgggcaaagcagccccaggcggggcctagagtgaggtgcacagggataggtctgtagcctgactctaccatttgctatacttaacatcaggcaatttttttgccttctctgtacactgcaaaagggataacaagcctgcctgtttgacctacaagtgttgacttagtaagaggggatgaaagcagagcctccaacactaggtttggcatgtagcattcgcacatcccagccactattacttttatgatcatagccagtgtgctcatccacactgaaggggctgtgaatcagaggtcagaacgctcgctccccagtcagtaagaactattctcactgagacttcagggctctgagtttaagggtaatgcctcaccccaggtatccatccactaaagactaggctttcctgttgtatgtcccttaaaacctatctaaacccggattttgttggggaatttgaggaggggctggcagcgtccccatctgcctgtttcaggatgccatgcgctagaagaccagggacaggcatctgggtgttgggtgcgtgcagtgaaggaacttggctttttggaacctttttttccctcttgtttttgcacagaattctgggattgctaggagagaggttctggtgtcttaccctggagcaggatgtactgtgaacccacacaggatctcaggtctcatgggaaggagcggacctgggttattcagagcctggacccgtgaagtcttaggaactgttgtgttgggcctcaacacaaatccaaagtaatagcttctttgtgacaagaaggcttaagaactccccagcctctgctctgactgctggctttgccagtgggcccatatttgatagcacactgtcccagaaacgccagatgctgtccctggttcatgtctctgctctccctacagaaacgggctttgcagtcacagctatctcccggacaccaggggtcacctacagcgactcctttgacttgcagtgcatcatcaaaccccactacccggccagagtccccgtgtctgtgacatggaggttccagccagtgggcacagtggagttccatgacctggtgaccttcacacgagatggaggggttcagtggggggacaagtcatccactttccgaactcggactgccattgagaaggctgagtccagcaacaatgtccgcctgagcatcagccgggccagtgacacagaggcaggcaagtaccagtgcgtggcagagctgtggcgaaggaattacaacaatacatggacaaggctggcggagaggacgtccaacctgctggagattcgggtgctgcagccaggtgggtgctcagctcaggctccagggcctctcagggcccatgtgtgtctgcacagcatagtaaggcacatgggtgtgtgcttacactctccagtaggcctgtgaggatgcatgcctatgtattgggagacatagggtgtgttcttaaatgacacagagagacttgaggatgtctacttatgtgatctcattagactcagggacgtgcgctcgtaggacacaaggaggcatacaaggatgcatgcttatgtgttatgagacgtgtatttatatgacacgagatacagtgcatattcctacctgacacagtataatatgagagcatgttcttccatgatacatgagacatgtctgcttatgtggcatggtaagacatgaagggtatatgcttgcatgactggaggcctctggtgagggcattcataaacgctctagctaatgaccctatgaacaggacattgtcccacccaaccacaacaccattgtcacactcaggaatttagcattggtatagtctcattacccacaatcccccattcgatcagcaatgtgcaccccacccaaccactcaagggcgccaacaacaactccaaggagacttcaattagagatcacacagcactttgagttgttctgtctcttgtttagataaaggaactcagaggagaaaggacaaacagttgcatttgttgtgtctttggcctccatgggcaagatcagctatttgattagaattcacattccctggaagaattaaagggtagccttaggtcacgaggctggtctttggaggatacatggggccagtctttgcctgcctcagatcctatcatgtgggctgagtttgaatctctatttcttgtggaagctgagtggcccagaaggtgctgatttggggaccagtctgcagtggaggttccttcagacaccttcatcagccagcgtgttgattaagccttacagagagtttttgttttcttttgttttgtttttgtttctcctgtctttctgacccacccactttgcattgcagacactttgagcacccgtcctcctatcctagcagcagtgattagtgcccagcctggttgcttccgagggcccctgacagggaagttctcaccagtgtctgaggtcatccttcccctcgcctgaccctgtcacagaagccttttctgtaccccattgggaacaaatgggatttagaaatgttgagactcttatctggccaattagagcggaattgggccaacaggatgctagagaagaggccgttcttaagtgggtgttcaggttaatggggggttaagcggagaccccattttatgtcagcacttggggaagatgcagctccccgccggctgccttatggagtcgatccttgggatggtagctgcatttctgttgtctgtcactcaaggtcagggttctggcagaagtacctgtcacatggctttacagcttgggaaggtagcagagaccatgcatgacccctagaccttgcttgtcattgccctgctgaataagttcctactgtttgcttgtttctgttaccactccgaatcgaaggctggagccctgaagcacacgtgcacagctagttcattaaggtgctccttgtttggatcctgactcaaattcatgatggcaatttcaggcaccgtgagccctgacaaaggctagttaaatggtagagcccagattcctttgatttttacttctgccctttccatcatcttattggctttcatactgcagagttaggactgtcttcctgtgtcatgctcagggaatggaggggtctagggaggggcaggtcccactttgcaaacttggactgccattgagaaggctgaatccagcaacggcatctgcctgagcatccccctgactttgagactatgtgcggttttactgggtggtgagtatgagtggaggttagcactgggaactttgagcatctgctgctgccttccggaggctgctgggcctgcttgcaaatgatcatcacaccagagcttgttggctgttgactttctctcactgaaggtgggaggggtcaggaaggatcatggaaccctgccctgagaatccccatcccgccaccgcccgcaactagttgtattgcagttgggcattaattacaagtagcccatgaacagcgtagagtatatacgtggccaaaagacttaggagagtggactccatttacacagctgtggtaaagccaccatccctgctaggtgcagatcttcccatgtggctactccaaggtcatgttctcgctattgaccccttgcctattgctctgtcagtaagccgaataaaaccattggctcttccaggcaaactgtggtagaattggattctggtttgtttgggggaccttaagggagtgagatgttgtattgtctttcctatggtgagaggcctggcagtagccatcacgaggcctgctcttatgggtggccagtaacacatgtcctggcccttggaaaatgggaagagcaaaggaaagccgtttgactcccagcacggctgaggcacaagggagagtgcgctccctaagtgttactctgtcttgtgctaattatttatgcactcaaaaccgaatatgttccaaagagctttctctaaaatgcacggctagtgcaggtgctttcgtctgggggaagggagactgagtgctggagacagtgttgggttcttggagtgtgttatctccctaactctttgcagtaacaccccaagtagaagaaggaatgtagctatcacctgatagtaaacagtcaaacatcgccccccaactccaccaccattagcggtgagtgggagattggaatccaaacccaggcatgctttaatgaaaagtgctggtagtggggagactttgcccttctttttgaaaccgtgtaatctcatcttattcttctgcattcgacccaggacatctcttatggaacatgttttccctggtgtgccggagcctcagctgtggtagaatttaacgtaacagtagcaatgtgtggctgtctgcagtgtaaatgccttacttctgataacttaacttgatttttccttaatccatgcagggtcaatgggtgtgtggtgcctgacgcagcttacagatggggactctgccacccagggtgaataagttgcccaatgattcatgatgagtggcagagccaggattcaagtccaaacaggcggtctggctccagagctaaaattttaattttattatatactctgtagaccgtgagccaaagttttactgacttacgctttcttctctccctagtagcctatggtacagtgtgtatatgcatgcgtgttagagtgtgtgtgtgtgtgtgtgtgtgtgtgtgtgtgtgtgtgtgtgtgtgtggagagagggagagggagggagagagagatggaatgaagggcttggtgtatgcaagcaagcattctcctcctggggtgccaggcaccaggcattttccttgagtggacactctggtttgtggtctgggttccctgagtcttggttttgtagcattaaggccacaaagcatttggagcttcgttgaggcataagttgttaaagatgaaaccaaatatctacctcttttgggttcctttatttcttctaacttctgccacaaggtggctctaggaccagggaaaagcagggcaagcctcctcagtcccaccctccctgtggagcctgcctctccaagcctggtttagcatcttcccctaatgaatatcttagtgaatgttcttatctgaggagaatcaccagggagcccaggctccggtgactagctcagagcccaggcaccagtgactagctcagaccatttaccatcggcttccactgctgcaaagaaggcctttgtccctgttccattccattctgtgcggcctgtacccagactgctttctgccagagccactggtggggactgcagcgtggctgttctctccattaagctctctggttagctggcgtgggcgccttgccatcagaagtgacttgccgcggatttatcattggctacttccaatccataagcatgccatggatcctaggatccccaaggcgatcgatccatagttagcctccctttcttcccttgatttagtctggtcctaccccatactatgaccccatggagcactgaggcaagacttggtcagtttgaggtgttccattctcgttcagttttttcttttagttgtgaagcatcatcttgcttccttctgagtttcttcagttccaaaaaacaccctccaatttcacatggctaaatacagaagcagtaagggaaatgtcagcactcactttgcaaatgtttacgactatccctcggtctagctattaaatattgtgcattaaaattgacaaagcaataaacaagcctccaggcaggcagcgtccggtggtagaaggctgcttgtcagtgggtgtattctgctgggatcagactgatgggcagtcggaatgaatatttaatgccctctgcatgttgccaaatctgtttgcttcatgttctctgctgacctggcagattgggctagccgagagtcttgggtatgtgagcatgggctgtcctgaccagagaagtggccctgcattctccctgggcagcctgggttctccttccaacccacgcaacttctgcctgcctggtgtctatgcagggctgggcaagcctgagtgaacaagcccttagagaaggtctcagccctccattcgtgcttcagccttgttgccatggtggcagcaggtgtctgcccgatgtcagttactggcggcagtcagtcagggtcactgctctgtcagcataaaggttgggcagggtagggtgtgcctgggcttctctcagtttgctcttttacttcccaacccttgccgatttccctctgccacctgcccctgcccctgccacctgcccctgcgggcatgtttaagcacctgctggcatggtaggtgtgggtgtgtcactgcaggcgtgggtgtggcacacaggacttcaccgtggactgtggatgggaaaagggttagaccttccagaatggaggttgaaccaacaccgggaatggatgtgtgtgagccaggagggccccggttcatttttgttaaaggtgagggtgagccacatggcctggtgggagtccaagtctaccagatcactggctctgtgactgagaaagaatcattctgaaattgggagtaatatttacttgataggagtagtgaggagcatatagttaatatgtgtgaagcgcttatggtagaagataagacagagcaccctaacctggggaattgggctttggtcatgtgaggctaatatacctttttaaaaagtatttctttctatttttagctatgcatgtatgtctgtgtgtgtgcacataggaatgcaggtacttggagagtctagaggatggcatcagactggaactggggtggttgtgagctgcctgacccttgctgagaactgaacacctctgcacgagcaattcacactctcaggtgctgagctgcctctccagtcttgtgcactcagttttaaatggcagattaaatttcagtgtgtatttactatcctgaaattaaataaaaccgaatgcaacatttctagtcacataatctttaaacaccatcagctctcccacccccctggggcactttttggttttttattttcatttggttttgttggcctcaaacccacagtccccctgcctcagactcccaagctctagaattataggcgtgtgccaccacacctggctaggatagtgacaagggactcagtcatggccggctggaagggctgtgactgctgccctcaactgcagagtgacagccattccgaagagtggctgaagaagataaagacaaggtctctaatggttggccctatatattaaaaacaggaagaagaagaaaagaaaaatgggtgctgtgtttactagaaaagcgaagtagactccaggctcaaaggcacaattctcatgaaggttatttgaaagtcacagaggacacaggacaaagctttattggaaaggatttgagacactaactacctcctactccctaaaccaatgtaaaaatcaaaagaccttgtgcctccgggttcctgcgatgatgtcggattgtatttgagggggacagggatgggggcattgtctgccctgtggagggagaacagatgtcccagggacaggctctcagcttggaagtgaccaccctcttgcttgccctttagaaagatctccttggctgagacagaggctggaagacttgtcttcaggctgcggtctggggaagagcttattagggactgggtaggtaggtcctggccatgtagagggagaagaacaggaacatgggcacttcaagtgcagtgacttcatgagtgatgggtacatttttctgcttgcttcccagagtgtacatgcatgtatatgtgtgcattttgagtgaggggtgtccccagagctccccattgtcccctaatcttctggttgacctgattccttgaacttgaaagatcttatctgccccagccactggcttcctccatccctgacattcccgttagatgtttgaaaaagagtctcccttccttctcttcattctttcctgatctctccttgactctcttctgctcttcccttgctctcttgcattgaatccaccacacacaagagcctgcaggctctcaaacccacaggtcactgggagtcatctcttacccccatttctcacccagtataattctaacttgccaggtagctgtgccatccaccaaatattccctaagagccacagtgggcagagtcaagaactggtcccgcccccagtcttggccacttccctttctgacatcatccaccacacctgagaatctggccttgttgcctgctctgggtgatctcttccttttgttcttcatctgttggaccccagctcattcatttttcagagcccagctcagggatcacagctttttgcaaggttctctctcttttatcacagtcggaattaatgacccctcttttaaaagattaattgggtttttaattcaatcacctattagttaatgtgattagcaatgattggttcatagttcttttgcccaggcatttgcaaaacgaggagtccttttaaaagtggcctttgatgtaaggcagttatggctgagtttaaggagattcatttactgaaagagtaagtgccttctgcatgagcagtgcacacatgaacccatccagagggtgggtaggtgggctagggaagcagctgctgctctctgccgctgagcccctcattccactgtctttcctccatgtagcccacttctgcctcatagcagagcagcctttaccagactgactgactgtcttagctttgatccaaagcctgggcagagaactaactgtccagctgcagcaagaaagggcatcccctcaaatgatgggagcttctgagaaggcagatgctgcagtgtccatggactgtacgggccagcattgccgtctagcctgcctggccctcctcctgcctcctgctgtacgagggagggattcaccaagcctacctttgtgtatctttgcttactttctcctctgcattcattgactctccaagtttgtgtgctgagcagccacacccagggcttccctggcggaaggcaagtctggatctccattgaccttgttctattgagattgtgatgcagtaggtctgagagtctgtctctaagaaattcacccagtgggtctcatgctgctgatccatactgcttaggatttttttttattaatactttatgtatatgggtgttttgcttgcatgtatgtctgtatactttgtgtgtctggtgtcagaagagggtatttattggataccctggacctggagttacagacagttgtgagcctccatgtggctgctggcaattgaacttagaccttctggaagaacagccagtgctcttaaccactgagctgtttctgctgacctagaatatattttattctatttgatttatttattctgtgtatgtatgcatgtatggaggaagtcggtatgtgacatagcacacacgtggaggttagaggacaactgttgggagtcagctttctccttccttgggtccctgtgatttgaactcaggtctccaggcatggcagcaaacaccttatcctctgagccatcttgatggctctgtctacaatacttttaaaaagttggggggggggcggctgtgattggatataaagtaaataaaacaattataaaaactttagttgtgtcaggtatgaacactcgggaggcagaggcagacacgtctctgtgagttcaaggccagcctggtctacaaagcaagtctaggacatccagggattgttacacagagaaaccctgtcttgaaaaacaaaaagaaaaaagaaaagaaaaaggaagaaattgagttgccactatgtttgtcaatgtctcacctactgtgagttttgaactcggaaccacaaatacaaaccaaaagggattgaggagagctaaaactaactgttgttcagggtccactcggcctcccactaaactcctctggagctaatgcatttggtctgcagggcactctgggtgcattagatccacactttgccgttctggtttgcagatgaaaacactggtctttcggaaagtccaggttctcctaagggggagggagccgaagctcgcagatgtaccttgcccagggcaatgctgagacaggcttgtgagtgcttcctaatgagctgtggggcctcctgcctccccctggcttccgggtgtgtcctcccttaccaccacccccccaaggagaggacatgcagagcttatagtaagagctgaccccctgcctacatgtcagatttcaaaagtacctctctctcaggcttcccaatgcttcataatattttgacatgggatggctaaaaaagagatagaagaagaagaagaaactggaaatgctttgaaatatttctcctccttggcttgtggctctttaaccatgtgactgagtagaagttgagtcatagcatcccagtttaacatatgcagttactatagcaattgaggtttccttagtaacagttgcaaaaaataatctggccccaattaataatacattttaaagctctttctactctacacagaacaacccagttcatctggccaagcaccagatgattcaggaggtgccgtctggactgactgagatcccgtttgcaggtggagcattgggttggaacaggatgaaaagggaacaggtagcttcaggctcacaggagtccactcaggaaagctgaccagcaggccagggccagtccagcctctaggattcccagtgtgccctgacagtccttgtggttaaagaagagggaaagtggagagactggctggtaccaacagatggaaatggagcatgggccgtggctgatctgatgtgatgtgttctctgtggctggaggtcttgtgtgtgaattctgaagtcctccatgaggggaaagtctgcctcagcaacacgagacaggtcctcagaggtgcttttgtagtagtggtgttgactgtgggaccctgttatgccttctcgctaaagctttaaaaccatcctgaacgttcgtctgtgtgctactgggcacaccgaggagcagtctgtggctgtcaaatgctcttcttccttacacatgggtctcagccctgcaagcctttaacaaagcaggccagctaactggccagaatctcaggacacaaccgggggcccagtcacacacctggatagtttctgcacattccagaggcagactccatccagtcttaaggaagcaagggctctcagcagggcctggaggtgggctccaccaattggcagaagccctcgctatgggacctgtaccataccctgggttttcctcagctggcaaggtggctcagaattaagatatgaagagagggggcgggggtggactgctgttctcaataccagctcattaagagaattgccttctcctttcttctctggttagtagggaacacagggaagtataatgatatatagaggaagattctccagtaatctccaacaacatgcattttacttgggtttggcttcttggcaactcaaagatgagcatctgctctgttacaagaccggcagcctatggaatttgctctctattattattatctggagttggccatccctgttgcttctggactgtgatagtaaggggagggagctggtgctggctctgctctgtccatcactgccctcattgcttcaggacctggactggcctcctgtacctgcctgctcccacatctccatatcggagcaaacaccgagggggacctttgctgctttccaaagcctgggcactgggctaggctctgcagaataggagtgagaaagtccactggcagtgagcactctgaggctgcagctgtcccactctcagggtgtccccctgagcaggggatgatgggaaatatcagctgcctgcatggaaaagcttcatctctgttcctgggagctcggggtctaagggagaggagagacagggaggagccaggtgtcagagagcaccaagggaggaatgggagacggacagagattgagtggagagcagggtctggcagagaagacagaacaatggggactgtggccagggttcagggtaaagtgtgtaggtcgggggagcagaggagcagagggcaagtcctaggagatgagccaagacagttgagcaagggccaggctctgaggggcttcttgctgtccaaatgaattcttatttagattgcacagacagtggggagccgttgagcattttaaacaaggtcaagctctgggcagattggtgtcttgactgggtgcgggcagtggcacagggagagtggacagggcatgggatgtgacagcaggccagttggtgtggttatctaacactgggggagaggttttggggcatgctcattcacgctctgttccctgctggacagctcgagtcttcagcctagacctcttatgtcactccttcccttcacagtgacaaagctccaggtgagcaagtcgaagagaacgctcaccctggtggaaaaccgggcaattcagctgaactgctcagtcaagtcccagaccagcccgaactcgcacttcgccgtgctgtggtatgttcacaaaccctcggacgcggacggcaagctcatcctcaaaaccacgcacagctcggccttcgagtacgggacctacgccgaggaggagggcctgcgaggccggctgcagttcgagaggcatgtgtcggggggcctgttcagcctcactgtgcagcgagccgaggtcagcgacagcggtagctactactgccacgtggaggagtggctgctgagtcccaactatgcctggtacaagctggccgaggaggtttcagggcgcacagaggtcactgtgaagcagccaggtaagaatggaaggtgtggccgtcatgggtttcttacaaactctagggcttggagagctctgtacacacacacacacacacacacacacacacacacacacacacactgcaccccacatgcatgcacgcactgaggcgcacacacagactgccacagagataacgtgagtatggttgcaggtgcgtcaactgtaaactctggtgccctgaaggcctgttactggacctgctttggtcctgatactcacgaggctcagcaccattgtcccctctctcatgggaacatcttcagtgagcttccgagggcagctgaggcctccaaagtgcaggtgacatccaggaccgagagctgattgatctgcaaacctcagtcctgcggttggcagccctggcttgcttcctcccggagctccagcccccagaacaatacatgacaaacctgcttatttcatccctagtatagaaaggctgtgcccctcacaccttctgctcttaaattaacatggcttctgaattcttgtagggtggccttcactgcactgtccaccctcttccttcatgtgtcctgtgtgtattgtacacatctgtgcttccttaaggggcaggaacacatttgcttctgtggtccctcgtgcctgtgatgagccccttgtgccatttctcctgtcctccttgcatcaccaagacttcactcagcaccacttccaggaagcctgttctgatttcttctctatccttgtagggagagtccccttataaacgcagtatggtaattatctgcatgtcttctgcaatacttataagcatggtatggtcagagagtgtttttatgtcagcagctgctggcatggcatccttagtaagtactgggtgctgaatgaacgtgtgtgtgtttgtttttttaaaaaaaacaaaaaaacaaaaaaaaccacagggccttatttcagcgtggaacatgcagagatacttatgttcctccatcgtcctcagagaggcattcccaggtccttctgacttaaataacacctgtcactggttattcttcccattgcctttgcaaaatatagcccaccttcatcctgtccatttacttattcatatgtaaataattatgaagcacttcttcatgtttattcttaaaacccacttatcagctaccatgtgttatttgtctattcaaacacacactcacaatcatacacacactcacaatcacacacacacacacagtcacacacacgtatattcgttgcctgtctcttacactagatgaagcttcctcagtgagtacagggattttgtttcttcaccagactcccagcaaagtcataggaccggggacagaaatccagatgtagccagacccatgctgggtgagaggacactatttccttctattcactccgtgttctaggatcctctctgccacacagcaacattttctgataaccatgcctcctgtgtagagcaggaggcactcctctgaggggcttcttgtggctgtcaccatgactggggcactgactgcctaccagggccacattacaaacctcaggctgctctcaactcaccacatgatccaggcaggccttgaccttaagatgcccctgcctcagcccccaagaagctggggttgcagtctgtgctgcctcgggccttctgagagctgaggtctgtggtctggcccaccatgctctctgcctcgctctacctctgccttccaccccagtttgtctccattaggaaaacgctgttcttggtgctctgatctcacctccaaggtctcttctctgctctcttcctttcctcctttggtttttcttggagggggttccccctctgaggctgctgtggtcctaagtgagccagtactgaaggccatgaggatccctgtctcgaccgtggccgcatctctcctgtagtgaatttcagcacagaaaactcgcaggacgctcactggacagcttgggcttttttcagttgattttatggtttgcatctttctctttctctttttctgtttcttgttcccctttccccttttcctggtgagaaagcacatattactgagccattgcaagcaatgggaggggtccacaatgacacacacacacacacacacacacatacacatacacacacccccgagacagtgccagagctaacagcctacatgtgtattttggccaaacttggaaaataggtttccttcttcgttttgcttccagccttttatttgcaagtgatcttccatgcagtatgaaacatgcagacagcactggagtgtggcaagagtgagcttgccccacaagtctctcggggatgttgtactcttgtgtgtgtttacagtatcatggctgttatcatctactggtctagagaggttcattggggcctctgcggtgttgcaggcatgctgcagcaagagctatggttcgtgacacttctgccacagagggaaaccttgtgcacaggtgtttaactctaccagccccatcagtgctgtcctgtcttcactgatgtcacattgttccccctccacctcaaaaaggaagcaattcggaggcatagtgctgatgcatactaaactgtgtttttcttggcagctcctctgtggttctggtctgcacagtccagttatcatatggtgagacttagaagtttctcctagcccagttctggtggtgagggcctgtagtccttggtcatcagagagctgaggaaggggaatcacaatttcaaggcctgccaggctacagaagaagctcaaggctaggctgggcagtacagtgaaaccttgtctcaaaacacagtttgaaaagggttggcgattatactgcttcctgttctattgctgtgaacagacaccgtaacccagacaacttataaaagaaagtgtttgattaggggcttccttataggttcagagggcgaatccatgaccatcaaggtggggagcatggcagcaggcaggcagagagctggggcagtagctgagagcttgcatctgatccacagaccccaggaagtggggagggagggacagatagacagacacagagacagacagacacagagacaaagacagacagagaatggtgtaggcttttgaaaccctaaagcccaccccccagtgacacacctcctccagcaaggccacacctcctaatccttctcaaatagttctaccaactgggaaccaagcattgaaatagatagatgaccctatgagggcctttctcattcaaagcaccgcagtgatacttcagtagtacagtacatgtctggcatttgcaagaccctggttcatcctcagctttatccctgctgggagagaagctggcactctgcccttgcccaccccttctcttaatagggacctcatctatcagacacatgctgcaaaggctatgtggttagtctttcattgcttatgtccccccacccccaacatctgaacccccaagggttctgaaccagagacagctgttaccgaacactaggctcccacatggcccgggattcaacacacgcagggaaacatctgaaacattgagaaacatctgagacgctggcctgtgctccaggggcacctgttcagccgccctctccagggtgctgcccactgcttgctgtcttgccacagtgtcttttttcctccctgttcagacagccgcctgaagctcagccaagtccaggggagcctgtctgttctggagacccggcagatacagctggagtgtgtggtcctgaaccgcaccagcgtggcctcgcagctcctggtggagtggtttgtatggaagcccaaccacccagagcgagaagtggtggcccacctgagccgagatgctaccttccactatggcgaacaggctgccaaaaacaacctgaaggggcggctgcacgcggagagcccgtcctccggcgtgtacaggctcttcatccagaatgtggcggtacaggacagcgggacctacagctgccgagtagaggagtggctgcccagccccagtggtgtgtggtataaaagggctgaggacacggccggacagacagccgtcacagtcatgcgacccggtaaggccctagccttcggtgtttccatgctaagagtattttggatgcttgtattgggcacttatctcactacagtgaccaaagacccgacacagcttaagggaggcagggttgatttgacagcctgaggcagcaggttgtgctgcatccagtaagaagcagaggaacatggatgctggcgcttactggctttctccttctctgccttttgttcagtctggggtcccagcccgtagggtggtgctgcccacatcccaggtaagtgggtcttctctggatccttctgtggaaatccctcacagacatgctcaaccgtctgcctccttggtgattccgagtgtagtcaataagggttaattatcacagacctgaatacagtgagtttacttaagaaattatttgcagttcagcatatgaacatttgcattctaaattctctcaccatgtttgccctatgaatggaaaattgtacatctggctttgacctcaggtgattaggcttcttaattagaataaaagccagcaattagttattctaggtcccaagaacattttctttttaaagcatacattctggtcggacgtgtggctggtgtgacagaagtcttgaagcagtagccgtgtgctgggaagttgggccgctgggttttcagtgggagagagtggattgtttaagtagaaggtggccctacctctgtcccccactctgctccgggtaattccattggcactaatgacttttccatgtggccttttgttcctcttgtctctgttgctgttcctaaagtgtgcaaaatgcagataattactgggtgcagttattgttacatttaacatataattagggcgaagctgagcagagtccccgtgtctcctgcagcatcacagcgccactgatccttatccagcagaaaggacgtggagcggaattgaacttgtgacctgtcagtgtgaatgctttgccccgtgtcctctgggtgttccgtctctcggtccttatactgttgcaagttcttctcctcgggccaccgagtctgagctgctcttgtccttgatgacacgttgtggtcacggctgtgctgtgtcccattcatccacctctgtcgtgggaaaagggcatcagtcaccttcacctgtacttgcccaggctggaggagaacccctccccccattatcattttctgtgtgtatacttggctgtcttgctgctgctgctgctgcatgctgctgtaaagcttgcccagaggctgctctttgccttcctgtggaagtgcagagaatggcacaactcccacttgtttgatagatcaccagggtagccccctaaaacctggaatgggaggacacagacatttatggagaatcagctaggtccctaccacttagactgatgtttagtcttcctaaaatgaatcctaaagagaattccttcacagctgataaggaaaccgggtggacacaagcgtctgccatcttgccacctgtgtgatcccagtgaggctccaagcctgagatcctgtacataggctagatccaccctctacctttcttccctcccaccctccctctcttgtttatttatatatttatttaataatttatttatgggggtggtaagacaagggctcactgtgtagtcctggctgtcctggaattctttagactagactggccttgaacttacagagatttggttgcctttgcctcccaagttctgggattaaaggtatatttaaatttttatattttattttacatgcatgaggtgtgtgtgtatgtatgtttaccatgagcctggtacctgcagacgtcagcagaaagtggagttaagggtggttttaggtcactatttagatactggagaaggcaccagtcctctgcaaggtcaccaagtgttcccaagtgtggagccatttctccagcacaccccttcctcctgcgaacccgggatgcctggcttactgacacgggccctgggctctttgaactcaggctttcagtccagtgtggtaagctctttcacctgccgagccacctttctgtcttgtcttttttgttctgaggaaatgaatagctccttctcccttctctgttccttgtccctccccagacgctgccctccaggtggacacagtggtccccaatgccaccgtaactgagaaggcagctttccaactggactgcagcatcctgtctcgatcgagccaggactcccgctttgctgtggcctggtattccctaaggactaaaggtggagggaaaagaggcagccttggcattgacgagcaggaggaagaggaggaggaggaggacatatcgcaagaagaagactctgaagatccgacagagaggacagtcctgctgagcgtgggacctgatgctgtctttggtcccgaaggcagtccttgggagggcaggctgcgcttccagaggctctcacctctgctgtaccggctcactgtgctcgaggcgagcccccaggacacaggcaactactcctgccatgtggaggagtggctaccaagccctcagaaggaatggtaccgactgacagaggaggagtctgcccccattggcatccgggttctagacacaagtgagtttccccagttacagaggagggtgtcaccattgtccctgagctgtctgtaatgtaaatgcagagcttggttgtgggtcagtatgcagttttcctaacttcagtaggcatttgttagcaggggttgagatgtagaatttgacacactaacccacatagctgacccatgcctaaaaaacagggccaggagttgaagtgatgagattccatatggcgcttgtgatccacctgacctgagtccacttcagtgagatttcattgcacaagtcttgcttagtgtgtctttgttttacattagaatgccaagccagtctgccttgaagtgtttctggactcgaatgagagagaaaagggataaagcctgttattcatgctttccctcatgtttctgggtcacttttacttaggggcaactgcagtagattttcctcgttaccaggaccagccaaggaggccagagctgggggagtttggaatctgcaagagtaatctgcctccgaatggtcccgaattcagtttccatctggtgaggagttttcactctgaaccgaggactggaggtctattttgattggccgtctgtcaaaatgtagagtagatcaggcccaaaatggtgtctgctctagtagaatcggcccagaatgcagacacagacctctttctagtcaaaattccctacctcattgtctcagtgtgagggtcaggctgctatgccctacctcatcatctcttcgtgagggttgggctgctcagctccctttttttcccataccacctcctgtccaccatgttaagtgaaattgaaatttttatgggttgaaaatggttggccatcagtaatttgatatacattagaaaaccataagagtaaactgtgtgctgcctttctgccattgtgatggtgtaccccagtacaatgggaagaaggatggcgaaaacctgaatggaatgtgcattcagtgtcggaaatgagaaggagagtgttgaggccacacttgacctgtggacccatgctgagatgcttagggtaactaagcttcaccaacacagggatcactagaggccaaggctaacatgagcaagcagtgctgagctgctgtcagggctccaggtttgattctcttctatacccagctgtaagtccacccttcggagccatagacactagacactgtcagtggtccacaacagagtgggagttgataatgttcagcaagtgccttttctaggacagccaatccctgaagcaggcaggaaaggagtgtgctagattccctgagatggaagtctaagtagaagtaggcatagaaggacatgtcagctaccctcttaccgtgtaggagggtaagaaggaatgggagtgagcttcttcaccaccatagacacctccacgttcacaatcaataagctcaacttcagtgtatggctttcccagcagactaagttatgggtctcagtgggaatgggggcactgcatcatctgaacttaggagtcagatgattggttggggtgccatgagaaaaagagcaaggcagaagtctcccagtcacaggtggcaggggaggactaggagggtgtctggggtagtttcatcaggtcaggagagctctcaggagcagggagcaggcgcacagagtccaggcttcatcctcatggttccttgctgccttccaggttcaaccctgcagtcgctcatctgctccaacgatgccctcttctactttgtcttcttctaccctttccccatctttggcatcctcatcatcaccattctgctggtgcgcttcaaaagccggaactccagcaagaactcagaggggaagaacggggtgcccctgttgtggatcaaggagcctcacctgaactactccccgacttgcctggagcctccggtgctcagcatccacccgggagccattgactaaagaggctgcccactcccagcagacgttgcccatggcagggtcgggtcaggggagccctctgggcttttcctcattgcttcgtgctctgtgattggacaggcgacagcacctgaactctgcagtttctctgcaggagccagtcagacctggaacttgttggaagcttccggtcgaggtgatggttgcctctgggcggcagccctggttagctgatcacacccaggtgtcatgatgccaacatcctaggttcctagtttttggttttggtaacttagtgcgtagctccaggtgccgcatctactcgccaatctaactcatgttctcagatcggtgctatggggtttcctgtgctgtgtaatgtactcttttaagccccttgggtcctctccttttggatcccataatgttgtggaagagtttctctcacaactgataagcaagaggaagacgccttcatagtaacaaggattctcttccaagacatttttgtttttgcacatttgaaaatgccacccgtggatcaaaatatacccaaacattttttctttttttttcttttttttttttttttttttttttactttcttagcaagacttgaaaaatatgtgtagcgtgggcccaatttgtatcttatctcttccttcagccggagttgttggaaccactttatagtcaagatgaaagcattgaatttcgcttcaaaggactgactgcacatgtgcagaagaaaccctgcaggaccctattaggagcagatggtggccagccaaccagtccgtcagggaggcaaaaaggctcagtcccatcattgccaaaaaagaaaaaaaaaaaaataataataaacgagccaacctgaaggaagggtcaagggctccaggcggcacccagtttctgagggttgccctgatcaaaggcaatgactggggatgagggggggacgggtggttgttggcttggctttggcaagcttggtctcttgacttacccctgggcaggtagctttcttctgtaggtgctttgccaaattttcaaggggacatgtctagtgaagcctgaaggggctgccctgagtggagggagcattatggccaaagtggcccctgtgcacaggcccagtggagtgtgctgagctgctacactgagcttagcagagtggagcgtgggagggcgtcttagagcctggttgagaggttggaggagtgcttccctctgtcttccttccagtgagcctttcctcggagacggtgagggcatccttatccatcgcagctcttcccgaatctcagtgccatggagatattgtcctcggataggaccaggcacagccctttgccattcttgttgtccccctgctttcagcagacaactcagaacaggagctgtcactttcctttgttagagtgtgtgtgtgtgtgtgtgtgcgtgcgcgcgtgtatgtttatgttgtttggttgtactggtggcttttaattttcagcccccaaatctgaactccactgcctccactctgttaagccagatgcttagctgccctggagcctcatcaattgtaaatcctcccttttgtcactctgagggtctcgtgacccctctcttccccatccttcagtggccacatcttctctggggaatttgcatcctgagtcccaagagagagccccttggcaaaaggtacccaggattgtggaagtaaatttaaggagtgatttctgcaaagccttgtcctgagaataaacagacaacacaaaggctgcaggacttccaggtcattgggccaggctgttatggatccttccgaggagtctgctaggtgtgggccgtgtgctgagcagagagggcaggaggcaagatgcagcctgacaatccttcctggccctcttgttctctgagaagtgtccaggcagcgccaccttaatcctcctgtgcctgccctgctgattctcatttttgctgcacgaacacatcagagggaccaaattggctcagtcacgaagaaagaatgtcttttgttctgttccttcgattcatgggtgtgggctcttggtgggtagttgctgactcctgagttttaggctgagtcaatgagggaagattgacgccagagggctggcctggattaagatttcagatcagctctgtagcagcagaagactcaagtaaatatgcaaagcaaccgcaggacgtttgcaaggagcaaagaaatctatgtcagtattttaacaaccgttttttgcgtgtattttctgcagggctggggtatgcaatcaaagtttaaactctgagctttctatgaaaacaaaacaaaacaaaacaaaaacaaaaaaacagaaaagaaaaagaaaaatccaaaaccctcaggacctctctgtggctgggtctatggacatgtgttgtcggataaatggtgatggcgccctcaagtggctagaaggcttcactgcatattgtctgttgaggcttttgtcctccgagatcagagtactcaagagagactcctgacatctgtcctctccagtgtcacatttatgagcatctccactgtgctaggcctgtcccaggacactatatgaccacaccctctctcatcggtgtgtttctgtagcaagtcttcatatttgtttccaacaatggtgtctctgcgttcatgttgaagacagagatggggtaagaagactatccgtgcatgaagtagagaactgttggtttgtttctttttttttttttaaaggagaagctatttgtaagccactgcacaaagacgttttatatacactgcagagacctgtagtaaattatgttgacaatacgctgtttacattttctggagtctgatggcctcctacccctcactgaagcagccacctcctgctgtgggactgtgctcagtgggtggcctggagttttgctcttggcactgatgtaccagattcaagttttacacgctgtagcttttctatgcatgccctcacccaacctaaattatgtttttttgtataaatgataaaaaaaaactttctcaagacacttttgccacatgctgaaatgtatcacaactctacacctaccagttaagagtgcagccctggagctgtgacacaggtgccccccgggcctgctaggcagactgggaagctggctttgctatgggttatgtgactagttttcctttggtgggaaatttggggtaagaagacaccagtgagaatagccttccagctcacagggcctctgctgccgagacccaactgcccttcccaagccccgctaatgctcatgaatggaagtggacaacaggcatgagaataggagatggacagtccaggtggtgagacttggacaccagttactactgtgggtgattgacagatgccaactgagaaacattggaatattgcaagccctagaggtgaccacacttagttgggtctttggagttcataggnnnnnnnnnnnnnnnnnnnnccttccctcccttcctttcccctccctacccctccctcccttccaacctcccttttccatcccgcatccccaaggctcagccctatgctgtcctctgcacccagccctatttgctgcgttcttcttatcacctaccttcagctgcttgcttgcttagccacaagttaaaactgcaactgcttatccctcaggtgcccacaagggttccacgttaagtcttaaatgtgttatttttgcttatgaggtgaaaacatggctgtttatttcttgggtacccacaaaatggttccctgttatgcatgattccctccacccagaatgccctatttctaccaggagctaaattttaaaaagggaagtagagtattgtatagtaagattacccctattaagcccttggttaagtgaacatgtacctgcctgtgaggcgtatgatgaaaatgaccgtctgtgtgtggggccttaaagggctgtgtctgtcactatgtcccacatccctatactttatagttccaagtgtttggtaaaactaaagcccagggcaacaaagtggcatgccacaaagtgtcgtctgggctgcctgggccatcttaaccttctcatccacaattacccacagtgacaagaagggacagctggaccacacaacaccagtcacaggaggcacgcacaccaagcaatccttttagaaagggaagtagagaccgttccggcgcgtgaaaggagctcgttggctctctgctgaattcattatggggcatcggaagccacttctgattcatgatgtctgctaggcagggcccgtcggcacatccatcctgaggtgcttcgtgagaacatggcctatctcctaatgaaggagctggcgctgctcacgggtcagagtacacagaaggtctaacaggtccatcctcagccagtacatggagaccatgacccaaggcacttcccccccaccccgggagatggcgccgtcctttctgcggcttgcctctgcctgtacagacagctcttgtagctcgttcccagaaccccattcatctcagtccattcctgtgtgggccaagggggagcctttagactcagcccctcactgcgtctcgggtaagccatttatcttctccaagccagcttgctcactgtgaagacggagccggcaatccagttatgtccagccaggtgacatgcttaccaagccccacccccccagacttggtccttgttcctttcctagctccaaggcaaagttctgacagctgcctggtacatgcagtctggcccctcctgcctttctgactgtcaaggatgggggagagaatttattttctcacattctgagccacaccttgcacctgcccggttcccaggatctacaggtgatgtaaagtaggcttcatggggcagggcatcagtggattcccaggaactccctggcagaaagacatttaagcttttaaggccaaattgagacgtggtacatagatcacatgcctacgtgactgggcccccacctgacggtcaggaagatgatggcaaaatgcatgcttcatgttcacaacttgacaaacatgcttggtgtctgtctggacagcagagagtcctgctcacagagtaagtgttccctcattctctcagctgtgcagggtcaagcatgacacttctctctgcaggaacggggacagccagggaggagaaaggatccgagggtgcacgtctgagaatatggaatgacacctttgtcctgtcatagtgtcagttcaggaccagccccatggacacagctgtctaggggaaatagtcccagcctgacacccccccccccccaggtctagttgcctttattaggcacatataaccaaggataaatgttgggtgttttggggacaaagaaaaatgttgttggcttttaagacatgctgtggggcttgtgcacagagcagtggctggggatgaaaggcacagaggcaggggactggttgtctactcagaatgggagagagtgtaagcagagcagggactggaaggtcacagctggctaagggcttgagggcaccttctggtcactttccctttatcctgagcagtgaaggccacccttatggaagaggttcctggggctcttgggtgggtgggtttgggtgggttcaggtctagatggccatccctgctggaggggcagggaaggtcagtgggcaggagccttttttcagagaggctatttcatcattgaggaagaaccttaactacaggttcattcgttctgttgggcatggagagggactgggctcctgtactgtttggggacttgccctatctggggatccttcccaatgtacctcagttctccaccaagtgttcccaaggctgtgactctcaaatgacctcctcaccactcctccaggacataaacagaccaacagccacccaactagacaactgtccagtcgccagccatggctttgtgctcaggctccacagcaggttttaaaacccagccacatgaactcaccagcacctgccttagaagtggtttggtgtttttcttgttgggccagctgctcagagctggcttctcctgggaacatgttgaagatcccgggtcgcctgagaggagctgcacggcttcccagggagcttcgagcaaacgcacactagtccttcccacctgggttcactgccaagctgctttaactggggggaagcaaggctagtccagcctttgggcaatgggtagaggctttcaggctgagcgcacaccattggccagggctaagatgctgggaatgccatggcctgagaaggggaaagaaagtttaacctggctaccactgatctcaggatggatttctagggtttggatattcctccatcctcctcttgctctgggcctgctccctgaggccccatagttccccgaccccacatctactcaagtcgggggccctgctgttggccatagagagaattccactccagtctctctcgatgaacaaatgggtttattagggtcacacacagtgtagatgagggcttcctggaacatgggggactcagaagcaagtgcatcaccacaaagcttaccttgccttgaaggaggatggaggagagatgcattcgtgtgccctgagcctctttcctgctaagaagagatgtttccagttaggggaaatggctaggggacggtaggagagggctttacaggaatcttagagaaggtttcaagacaatagagtgctgggctgaggatactttaatgttccttccatttaaaactaaactcatgtcaggacccccaaagatgggcttgcggtgtcactggacctctttatttgttcctcctccagtgtgactgcattgaatccatctccctttactttttattattttaatttccttctttccttcctgccctcttcattactatgttgggatgggtgtctgaagtcgggttttttgttgttgttgttgttgttgtttgcttgtttgtttgaatttccagaccctgaccttgtgccctaaaagcttctgtaatggtgtctccttgaattcatgaatccattcgcaagtcatctcagccagcaaacctgtgtacagggtctgtctgtcctgcatagccgtaaatgaagatttgcagctgagtatcgtggtcccattagaggtgtgtcccctggaggcctagcctgcctccccagaaacctgaaagcggaatgatgacaagaccgaactctagttggaccgagtcgtggaccttggctccctgtacatcttagtcatgaacttgaataagttacctaacttctgtgtccttcggtatcttcacctttgataagtataccacacacacacacacacacacacacacacacacagagagagagagagagagtgagacaggcaggcaggcagacagacagacagacagacagacagacagacttaacatgaatgcactcaaggtaattttccttggtgcttaaactccattcttgactacttggaatcacctgggagattccgtggataggcttccatcttcctgttcccacaacagacatttttatatcctgaaataagcaacagtaacctccgttggaaaaggtttcctttgtagctgttgtcaaggacacagtgtttttaataaccttagctgcttgctgtttttccctctccccgttacacagctgaggggcaacctgagctggaacagtttctctgggaaagagacaaagcatcccctgggctcacgctgcatgttcccagagtctttttatcaggctgaaggaacacgggttgatttatcaatataatatgtattaagaagtgtttaatatttctattgctgagtggcctgtggagaggagcgggggtgggggtggggcagaagcagctctggtacaaaaaaaatgagtggaaacttgaactggcttcagaggaagcaagaaatgtctggctttgctgagaaggcagaactggcacaggttggcactgctgacttcagggacatgccgacaggacccaacttgtgctgggcaagaaacaagagcctaaaagttgggagggtgtggttcacccgccaccttttcctgatgagtgtagctctccccctcatcaaagaagctgcctttgcaacagacagagaccatctcagaaaactgtaatagctgatcagagtctagggaagagccgaccctgaggtgcctagccacaacagaaacacttacaacacctaagtcctgcacctaaggctcaggaaagatcataaggtccagaggaacaggaagtctgcttacgatggcatctcctggaaatggcagggacggtatagtcaggatgcggcagtgatatggctgcttaaagaagacacaattacagtgacaccaccagtaaacatgctaacctaatgtgacaaggaggagatctcatgggaccccaccctagacagagaactgtaggcaactaacaactggaaagaaggggggagttagtcttccccacagatgagtcctctaattggttatccaataccttgtgtaataggtttctccagcaatgcaataagcccattcaagccaaatcaagagaatgaaagcaggtttattgagaggcagctcttcgggcaagttcagtgacctcacagaaggacatcagcagagttgcaagcctgggctaaagcaacagagttttataagtcttgggcacaggggtggtgacgtgtaagctaggagctttatacggaaaaaggtaaacaactgagcccctgggcaggagctggtgggtgggtggctggaaaggcagagagagacaaggagtgctgacattccggcctggagtttcctctgtgtggccagggttgggggaagaagagcagatggggtttctcagcttgtgtgtggggcaagcaggggttccaaccaaacaatgtggtcaaccctggaatcacgtatttaaaagcaacactaaacagactcagcagatgggatccatatatttatgcatgcatatataagtatatatgtatatatgatatacataaataattaagagaaaggggtcccaggtttgagagggcctaaaaagggggacatgggcggggctcgcaggaggaaagggaaggggtagattgtatttaaaaaaaaaaaaaaaagacaggaggagtccaaatgataccttatatggcatacaaatctgttgcatgggtattttttctttttccttttatctttccttccccttgctctctcttcctccctccctccctccctctttctttctttttttctttctttctttctttctttctttctttctttctttcttcctttcttccttccttccttccttccttccttccttccttccttccttccttccttccttcccagagggtttctttgtgtagctgtcctggaactcactctgttccaggctggcctcaaactcagacacttgcctgcctctgcctctgcctctgcctctgcctctgcctctgcctctgcctctgcctctgcctctgcctctgcctctgcctctgcctctgcctctgcctctgcctctgcctctgcctctgcctctgcctctgcctctgcctctgcctctgcctctgcctttcaagcactgggattaaaggcatgcatcactactgcccggtcacttttacttttttaatgtgctgaaccttattcttggaaatgtcttataaagtgtgtattatcttactcaagttaacgtggccttgacaactattagcagcttaattgtcatctcccacgctcacagaccctgatggctctgctgtggttgagccccaacttgccagttatctctctgtccagagattgagttcctcgtagtaaggaactggttcctcgtaggcttgctttggttttcttctttcacactctagagtgttcaatgggagcgttagagggtaacgtttgtcagtgtctctccatctgtggttagttcacactctcatacgacacacgtccacatggtttgctgtagccacaatctgacagccttgtggttctctttagaaatagtaattcaagtcaaagctgtttcagcagggtgggcgtgaaattaatgtatgctttgtatagaccccatcttctattttaagtttatttcgttttgtgtgtataggtgttttacctgcatgtatgtatgtgtaccacatgcatacctagtacccatggaggtcaaaagagggcatcagattccctgtaaatggaggtacagatagttatggattgccatgtgggtgctgggaactaaaccgaggtcctctggaggaccagcaatgctcttagctaccaatccttctctctagctttccatgcatttctcttccttcctttccccactcctactttctccaaagcctgatcaggctggctttgaacttctgatcttaagctgtctttctgtctcagcctcccaagtagctgaagctctaagtgcttgcccttgcacttgggtgcaacatcaattttattgggtaaagagaacaaggctcagagaggttaactacctccatctaacgtcacacaaatgtcatagcagctcgagcttacctatgggaagcttttccctctccagtcctggggatggggggtggggtgggcaggcgtcataagactcagtgaactctgaagtaaaggaactcacaaggtttttaaggcccctccccaagattataaatgcagaaagtgattgctggagagaggggatactccattggaatcacctacagcttgtctgaagagtggacaaacgtcctctgcaagaatgaggtagacaattcttccctaaaagtcagtgtacaggagtgtggggctggagactgctcattcagatcagggcacttgcacaagctaggtgtgggccagagggaaggcaagagtcactgtgttgggttggagtctgtcagatccaggcccagcacaatggcagtcccagtgggctaggctaagcaacataagccagtcccaccaagaccggtagggctgaaagggaggcatagtagttctataagagcaatggcacccggcacaggaagcagaatgcatcatgggaataggcagtttggaaggctagatagggacagtgtctctcacccactgtgcttgggatgaaacaaatggtggtctgtgcacctgccctggacctttagccatgggagcccaacaggcgcttgctcagagcagaccaggggcctcccatggtccagtccaccctctgggaaggtgttccattccataacgccaacactcgaatacgccagggatttggaaagcagccgaaagaacagcaaaaacaagctaaagattttgaaccagagcatcccgtgtgggcaggaagaggccatctcaaaacccatacatttaggcagaaatcccagtgtcaagggatagttaatcactctacaagttttagccatggaggtcccctgaagtcccatcaaccataaaagttattgctgcagttattgcttttatgctaggatcacggttgaagagactgtgtttgggttgcggggaatcaagctgggactgagctgatggctccctccctcctgccctcccggatggatggcatctgcagtaagagaagctgctgggggagggtggtcaccagcagtcctgcttgctatggaccctagctgctctcctgccatgagagatgtgtctgcatggtgtgatacagcgtgacggttagggtacaggcagtggtgttctggtcggatttaaggctgcttcacaggagggaacgcatgtctagtacagtaaaacaaggcaaagcctgtggccagggaggctgtaggccccattggagaggccattactgtttggttaaatggatgtgatatgcctgtcagtttgtcttctgataatttgtgattacacctgtcgattgctggttctctctgtctccgttgctgctgcagagacttgtaaactaaaagaaagagaataatcagacgtctacatcacacattccaagccttagagaacactgtggaacgagaggcagggtgggggtggggtatgtgtgggcagagaagggctggagtcttcagtagctgcttcctctgaactgaaacattccttcctgggaagaggaaagaaaggaaagtttggaaagttacaggatccacccctcccccaagcatgagaaaacagtaagcaatttcccttccttcnnnnnnnnnnnnnnnnnnnnnnnnnnnnnnnnnnnnnnnnnnnnnnnnnnnnnnnnnnnnnnnnnnnnnnnnnnnnnnnnnnnnnnnnnnnnnnnnnnnnnnnnnnnnnnnnnnnnnnnnnnnnnnnnnnnnnnnnnnnnnnnnnnnnnnnnnnnnnnnnnnnnnnnnnnnnnnnnnnnnnnnnnnnnnnnnnnnnnnnnnnnnnnnnnnnnnnnnnnnnnnnnnnnnnnnnnnnnnnnnnnnnnnnnnnnnnnnnnnnnnnnnnnnnnnnnnnnnnnnnnnnnnnnnnnnnnnnnnnnnnnnnnnnnnnnnnnnnnnnnnnnnnnnnnnnnnnnnnnnnnnnnnnnnnnnnnnnnnnnnnnnnnnnnnnnnnnnnnnnnnnnnnnnnnnnnnnnnnnnnnnnnnnnnnnnnnnncaggtcgtttctgctcgggtacagaacactgttcttagcttcttctgtgggctgaccagaaacttgtacttgagggagcctctcacgttttatagtcacaaattaatccatccacctcaagcctgtgagtgaaatccagactgtttgacgtgtggccatataaacgtcaggaaagagctgtgtagctcttgtgtgtggtcacccaacctgtgctgctagctcaggaggaacatgcctcgtgcccaggtcatcttctctgacctcagtctttttacacacatgcgcgcgcgcacgcgcgtgcacacacacacacacacacactgccaccttgacctcttgcctttctcagctgttgcttagccctgtgctgatgattcctgagttgaaaccagggtaagtaagagaatctcttgcctaaagtcactggaatgaccacatgccccttctctgcatcaaagtgggagcactgtataaaatcatgtacctcctccatgcccatcagagggatccagatagatctgttctcagaaaatggatgcatcttgatcctactgagtttctgcttgattttcataacattaccaaaaaactcttgaggtgtagttcagtggaagagcacttgcctgccatgtccaaggccccaggttcaatccccagcactacaaaaccaaaggaaaacacatagtgttctccaatatggctgtggattctccaaaacatgcccgagtttcctctgagctggctgatctgtaggtctgtgcacattttcctgtgtaacaattaaaattgagaagcaagcaagatgttcagcagataaaatcagagaataataaagcattcagattaataaggaggtagcga

SEQ ID NO: 16 - DNA, 7028 bp, Mus musculus
atgaagtgctttttcccagtgttgagctgtctggctgtgctgggtgtggtgtcagcgcagcgacaggtcaccgtccaggaagggcccttgtaccgcacagagagctcccacatcaccatctggtgcaacgtgagtggctaccagggtccctctgagcagaacttccagtggtccatttacctgccctctgctcctgagcgtgaagtacagatcgttagcacggtggactcttccttcccgtacgccatctacacccagcgagtccgcggtgggaagatctacgtggagaggatccagggcaactcagccttacttcacatcacagacctgcaagcccgggatgccggcgagtatgaatgtcacacccccaacaccgatgagcgctactttgggagttacagtgccaagatgaacctagtggtgatcccagattctctgcagaccacggctgtcccccagacactgcacaaagtggaacaggatcccctggagctcagctgcgaagtggccaccgagaccgtccagcacacccacctctcggtatcctggctgcggcagaagggtggcgagaaccctgtggaggtcatttccctgagccgagacttcatcctgcactccagcagcgaatatgcccagaggcagagcctgggcgaggtgcggctggacaagctggggagaagcacctttcgtctcaccatcttccacctgcagccttccgaccagggcgagttctactgcgaggctgcggagtggatccaggatccagatggctcttggtacgccatgaccaggaagcgctccgagggtgccgtggtcaacgtccagcccactgacaaagagttcaccgtgcgtctggaaacagataagaggctgcacacggtgggtgagccggtggagttcagatgtatcctagaggctcagaacattcccgaccggtactttgccgtctcctgggccttcaacagctcactcattgccaccatggggcctaatgccgtgccagtcctcaacagcgattttgcccaccgcgaagccaagggacagcttaaggtggccaaagagagtgatggtgtctttgtgctgaagatataccacctccgccaggaagacagtggcaaatacaactgccgggtgactgagcgagagaagactgtcactggcgagttcatagacaaggagagcaagcggcccaagaacatccccatcgtcgtgctgcccctcaaaagcagcatctccgtggaggtggccagcaatgccagtgtcgtccttgagggagaggacctgcacttctcctgcactgtccgcacagtgggcaggctgcaggcccgcttctcggtcatctggcagctcgtggataggcagaaccgccgcagcaatgtcatgtggctagaccgggacggcaccttgcagccgggctcagcgtactgggagcgcagcagctatggaggcatccagatggagcaggtgcagcccaactccttcagcctgggcatcttcaacagcaggaaggaagatgagggccagtatgagtgccacgtgacggagtgggttcgggccgtagatggagagtggcagattgtgggagagcgccgcgccagtaccctggtctctatcacagcccttgaaacgggctttgcagtcacagctatctcccggacaccaggggtcacctacagcgactcctttgacttgcagtgcatcatcaaaccccactacccggccagagtccccgtgtctgtgacatggaggttccagccagtgggcacagtggagttccatgacctggtgaccttcacacgagatggaggggttcagtggggggacaagtcatccactttccgaactcggactgccattgagaaggctgagtccagcaacaatgtccgcctgagcatcagccgggccagtgacacagaggcaggcaagtaccagtgcgtggcagagctgtggcgaaggaattacaacaatacatggacaaggctggcggagaggacgtccaacctgctggagattcgggtgctgcagccagtgacaaagctccaggtgagcaagtcgaagagaacgctcaccctggtggaaaaccgggcaattcagctgaactgctcagtcaagtcccagaccagcccgaactcgcacttcgccgtgctgtggtatgttcacaaaccctcggacgcggacggcaagctcatcctcaaaaccacgcacagctcggccttcgagtacgggacctacgccgaggaggagggcctgcgaggccggctgcagttcgagaggcatgtgtcggggggcctgttcagcctcactgtgcagcgagccgaggtcagcgacagcggtagctactactgccacgtggaggagtggctgctgagtcccaactatgcctggtacaagctggccgaggaggtttcagggcgcacagaggtcactgtgaagcagccagacagccgcctgaagctcagccaagtccaggggagcctgtctgttctggagacccggcagatacagctggagtgtgtggtcctgaaccgcaccagcgtggcctcgcagctcctggtggagtggtttgtatggaagcccaaccacccagagcgagaagtggtggcccacctgagccgagatgctaccttccactatggcgaacaggctgccaaaaacaacctgaaggggcggctgcacgcggagagcccgtcctccggcgtgtacaggctcttcatccagaatgtggcggtacaggacagcgggacctacagctgccgagtagaggagtggctgcccagccccagtggtgtgtggtataaaagggctgaggacacggccggacagacagccgtcacagtcatgcgacccgacgctgccctccaggtggacacagtggtccccaatgccaccgtaactgagaaggcagctttccaactggactgcagcatcctgtctcgatcgagccaggactcccgctttgctgtggcctggtattccctaaggactaaaggtggagggaaaagaggcagccttggcattgacgagcaggaggaagaggaggaggaggaggacatatcgcaagaagaagactctgaagatccgacagagaggacagtcctgctgagcgtgggacctgatgctgtctttggtcccgaaggcagtccttgggagggcaggctgcgcttccagaggctctcacctctgctgtaccggctcactgtgctcgaggcgagcccccaggacacaggcaactactcctgccatgtggaggagtggctaccaagccctcagaaggaatggtaccgactgacagaggaggagtctgcccccattggcatccgggttctagacacaagttcaaccctgcagtcgctcatctgctccaacgatgccctcttctactttgtcttcttctaccctttccccatctttggcatcctcatcatcaccattctgctggtgcgcttcaaaagccggaactccagcaagaactcagaggggaagaacggggtgcccctgttgtggatcaaggagcctcacctgaactactccccgacttgcctggagcctccggtgctcagcatccacccgggagccattgactaaagaggctgcccactcccagcagacgttgcccatggcagggtcgggtcaggggagccctctgggcttttcctcattgcttcgtgctctgtgattggacaggcgacagcacctgaactctgcagtttctctgcaggagccagtcagacctggaacttgttggaagcttccggtcgaggtgatggttgcctctgggcggcagccctggttagctgatcacacccaggtgtcatgatgccaacatcctaggttcctagtttttggttttggtaacttagtgcgtagctccaggtgccgcatctactcgccaatctaactcatgttctcagatcggtgctatggggtttcctgtgctgtgtaatgtactcttttaagccccttgggtcctctccttttggatcccataatgttgtggaagagtttctctcacaactgataagcaagaggaagacgccttcatagtaacaaggattctcttccaagacatttttgtttttgcacatttgaaaatgccacccgtggatcaaaatatacccaaacattttttctttttttttcttttttttttttttttttttttttactttcttagcaagacttgaaaaatatgtgtagcgtgggcccaatttgtatcttatctcttccttcagccggagttgttggaaccactttatagtcaagatgaaagcattgaatttcgcttcaaaggactgactgcacatgtgcagaagaaaccctgcaggaccctattaggagcagatggtggccagccaaccagtccgtcagggaggcaaaaaggctcagtcccatcattgccaaaaaagaaaaaaaaaaaaataataataaacgagccaacctgaaggaagggtcaagggctccaggcggcacccagtttctgagggttgccctgatcaaaggcaatgactggggatgagggggggacgggtggttgttggcttggctttggcaagcttggtctcttgacttacccctgggcaggtagctttcttctgtaggtgctttgccaaattttcaaggggacatgtctagtgaagcctgaaggggctgccctgagtggagggagcattatggccaaagtggcccctgtgcacaggcccagtggagtgtgctgagctgctacactgagcttagcagagtggagcgtgggagggcgtcttagagcctggttgagaggttggaggagtgcttccctctgtcttccttccagtgagcctttcctcggagacggtgagggcatccttatccatcgcagctcttcccgaatctcagtgccatggagatattgtcctcggataggaccaggcacagccctttgccattcttgttgtccccctgctttcagcagacaactcagaacaggagctgtcactttcctttgttagagtgtgtgtgtgtgtgtgtgtgcgtgcgcgcgtgtatgtttatgttgtttggttgtactggtggcttttaattttcagcccccaaatctgaactccactgcctccactctgttaagccagatgcttagctgccctggagcctcatcaattgtaaatcctcccttttgtcactctgagggtctcgtgacccctctcttccccatccttcagtggccacatcttctctggggaatttgcatcctgagtcccaagagagagccccttggcaaaaggtacccaggattgtggaagtaaatttaaggagtgatttctgcaaagccttgtcctgagaataaacagacaacacaaaggctgcaggacttccaggtcattgggccaggctgttatggatccttccgaggagtctgctaggtgtgggccgtgtgctgagcagagagggcaggaggcaagatgcagcctgacaatccttcctggccctcttgttctctgagaagtgtccaggcagcgccaccttaatcctcctgtgcctgccctgctgattctcatttttgctgcacgaacacatcagagggaccaaattggctcagtcacgaagaaagaatgtcttttgttctgttccttcgattcatgggtgtgggctcttggtgggtagttgctgactcctgagttttaggctgagtcaatgagggaagattgacgccagagggctggcctggattaagatttcagatcagctctgtagcagcagaagactcaagtaaatatgcaaagcaaccgcaggacgtttgcaaggagcaaagaaatctatgtcagtattttaacaaccgttttttgcgtgtattttctgcagggctggggtatgcaatcaaagtttaaactctgagctttctatgaaaacaaaacaaaacaaaacaaaaacaaaaaaacagaaaagaaaaagaaaaatccaaaaccctcaggacctctctgtggctgggtctatggacatgtgttgtcggataaatggtgatggcgccctcaagtggctagaaggcttcactgcatattgtctgttgaggcttttgtcctccgagatcagagtactcaagagagactcctgacatctgtcctctccagtgtcacatttatgagcatctccactgtgctaggcctgtcccaggacactatatgaccacaccctctctcatcggtgtgtttctgtagcaagtcttcatatttgtttccaacaatggtgtctctgcgttcatgttgaagacagagatggggtaagaagactatccgtgcatgaagtagagaactgttggtttgtttctttttttttttttaaaggagaagctatttgtaagccactgcacaaagacgttttatatacactgcagagacctgtagtaaattatgttgacaatacgctgtttacattttctggagtctgatggcctcctacccctcactgaagcagccacctcctgctgtgggactgtgctcagtgggtggcctggagttttgctcttggcactgatgtaccagattcaagttttacacgctgtagcttttctatgcatgccctcacccaacctaaattatgtttttttgtataaatgataaaaaaaaactttctcaagacacttttgccacatgctgaaatgtatcacaactctacacctaccagttaagagtgcagccctggagctgtgacacaggtgccccccgggcctgctaggcagactgggaagctggctttgctatgggttatgtgactagttttcctttggtgggaaatttggggtaagaagacaccagtgagaatagccttccagctcacagggcctctgctgccgagacccaactgcccttcccaagccccgctaatgctcatgaatggaagtggacaacaggcatgagaataggagatggacagtccaggtggtgagacttggacaccagttactactgtgggtgattgacagatgccaactgagaaacattggaatattgcaagccctagaggtgaccacacttagttgggtctttggagttcatagg

SEQ ID NO: 17 - protein, 1188 aa, Mus musculus
MKCFFPVLSCLAVLGVVSAQRQVTVQEGPLYRTESSHITIWCNVSGYQGPSEQNFQWSIYLPSAPEREVQIVSTVDSSFPYAIYTQRVRGGKIYVERIQGNSALLHITDLQARDAGEYECHTPNTDERYFGSYSAKMNLVVIPDSLQTTAVPQTLHKVEQDPLELSCEVATETVQHTHLSVSWLRQKGGENPVEVISLSRDFILHSSSEYAQRQSLGEVRLDKLGRSTFRLTIFHLQPSDQGEFYCEAAEWIQDPDGSWYAMTRKRSEGAVVNVQPTDKEFTVRLETDKRLHTVGEPVEFRCIAQNIPDRYFAVSWAFNSSLIATMGPNAVPVLNSDFAHREAKGQLKVAKESDGVFVLKIYHLRQEDSGKYNCRVTEREKTVTGEFIDKESKRPKNIPIVVLPLKSSISVEVNASVVLEGEDLHFSCTVRTVGRLQARFSVIWQLVDRQNRRSNVMWLDRDGTLQPGSAYWERSSYGGIQMEQVQPNSFSLGIFNSRKEDEGQYECHVTEWVRAVDGEWQIVGERRASTLVSITALETGFAVTAISRTPGVTYSDSFDLQCIIKPHYPARVPVSVTWRFQPVGTVEFHDLVTFTRDGGVQWGDKSSTFRTRTAIEKAESSNNVRLSISRASDTEAGKYQCVAELWRRNYNNTWTRLAERTSNLLEIRVLQPVTKLQVSKSKRTLTLVENRAIQLNCSVKSQTSPNSHFAVLWYVHKPSDADGKLILKTTHSSAFEYGTYAEEEGLRGRLQFERHVSGGLFSLTVQRAEVSDSGSYYCHVEEWLLSPNYAWYKLAEEVSGRTEVTVKQPDSRLKLSQVQGSLSVLETRQIQLECVVLNRTSVASQLLVEWFVWKPNHPEREVVAHLSRDATFHYGEQAAKNNLKGRLHAESPSSGVYRLFIQNVAVQDSGTYSCRVEEWLPSPSGVWYKRAEDTAGQTAVTVMRPDAALQVDTVVPNATVTEKAAFQLDCSILSRSSQDSRFAVAWYSLRTKGGGKRGSLGIDEQEEEEEEEDISQEEDSEDPTERTVLLSVGPDAVFGPEGSPWEGRLRFQRLSPLLYRLTVLEDQDTGNYSCHVEEWLPSPQKEWYRLTEEESAPIGIRVLDTSSTLQSLICSNDALFYFVFFYPFPIFGILIITILLVRFKSRNSSKNSEGKNGVPLLWIKEPHLNYSPTCLEPPVLSIHPGAID

SEQ ID NO: 18 - DNA, 113486 bp, Homo sapiens
cttcagttgttcctacaagaagggtgggagtttgccaagttgacgggcagcagaaggaggaagggcatactggcaaactacctagcacatgcaaaggcacgtccaggaagccatagataactggtaagagcaggatatagtaggatcaaaagcatagagaaaatggagaaagatcaagaggggttggaaggcccttgtaacccattttaaggagtctgaaccttctttaagcaattggcagccccagaagtgtcacctctacactttagtaagatgcatactttagactaacagatgggcagggactgagatcatcacctgggagacaggtgggagactatgacaatagtctagagagaggtgatgaaggtttgatctagggcagaagccatgaaaatagaaagaaactgacagcttccaaagaagttagggaggtagaattgccagtccctagttaccaattgaatgtggaagtgagaagtctaaaattgatccaaaggctttggcttatatgattgagtgaaaagtggtatcatcaactaagataggaaattgaggaggaaaaaaacagtttagaggggaaaataataagctgagtttggggcatgttcagtataaggtctggtgacattgaggtggaacatttcagaaggcagttggctctgtagatgtaaaacacagaaaaaaggcttgggctgaaaatgccaactaaagagctgtctactgatagaaggaaaaaccatgtgggttgggggagaatggggtcatacggaaagtacatggaggtgaagagctatgccaagctttctgtcacaccccgtgtctagttcaattcactgtatattctgaattcatttcccaccacctccatcatcaccaccttactctaagcctccatcatctctcacttggaccattcagtaacctattaattggtttccttgcttctatttttgcttccttacagcctattttctatacaaaagccaaactgacttttataaaattaagtaaattaagtcataccacttcactgctccaatggcttcccttgacacacagactacaacctaaaatcccttgagacccacatgatctgaccttcacctttaccttcctctcggaactcacctcccacctctaactcttgctccctctgctcctgccagagagtttctatctttttagcatgccaagcttattcctgccccagggcctttgtacttgctctcttcttggcctggaatgttcttgccccagatcttaatatgattttgagtttctgcacaaattttcaagtctgaattttatgtctttgaagaggcagcctctgacctcaagaaacaagcaagcctagttgttttattggctgcgttggataatgtcaatatctcagggttttgtgggccttcctggttatacgtggctacatgctagaaattccatttagaaataatttgcagctcagagtgatagggttttcctcttgattctgccaggtacctggcactgcttcttgtctagaaccactttaacccaagttctaggctcaaggtctcttgtactatccaggtgacttgaatcaagttgcaagtctgagtaagaactggtttatttctgcttcacatttacccagaagatgcagctcctaaggggccccagcttcaagtacagagtccccatcttcttcctgggctttgaggttcattccccttgacttatgacgtcaaaagacagcttggttttgcagatatttattccaattcatggacgtccgcatggcaacagtggctttaagtgatggtcctccccttctcctagtttttgcctggcaattcctcaccactttaataactattttttcacattatttaaattttttctaggtattttagttgatctcagagggaacatcagtataaatgtcctgggctgatattaaaagcaggagttggccgggcgcagtggctcacgcctgtaatcccagcactttgggaggtcgaggtgggtggatcataaggtcaggcatttgagaacggcctggccaacatagcgaaaccctgtctctactaaaaatacaaaaaaattagctgggcatggtggcgggcacctgtaatcccagctactggggaggctgaggcaggagaatcacttgaacctgggaggcagaggttgcagtgagccgagatcacaccactacactccagcctgggcgacagtgcgagactctgtctcaaaaaaaaaaaaaaataaaacaagactccttcttccctcttctctcagatcttccatgattctttctttcattcagatctctgtgcaagtagtatttcttcagagatgccattctgaccaccccatcaaaaatagccacctccaaaattagccaggtgtggtggtgtcagcatagcacagttacttgggaagctaaggcaggaggatcacttgagtccaggagttctaggctgcagtgaactacgattgtaccactgcattccagcctgggcggcaaagcaagaccctagctttaaaaaaacaaaaacaaaaaaaaccccagccacctccattcctatgatctctgcttcatttttcttcatagcatttatcacatctgcaaatgattgcatatttgtctgcttacttgtttattgtctttccaactagaacgtattcattcaacaaatatttgttgatcacatcctatgtgctaggcattattctaggcattggaccaacaccagagaacaagacagaccagattccagcccacagacagcttacatacccaggggaagatgaccataaacagagaaactaataaagaatgtaaactcatgaggataggaaacttgcctgctttctttaccaccccagggcatagaacagtgctatatgttaactgaatttattaagcttttgtcctgacgttatttttcagtattattgaatccctggtattttgactgtattgttggtatactgctttttccctctgaaatatgtagcatttcaagcatgttaagggttaaacacacttgcatgtcagcctggaaatataatcaccatttattatattactgttatgggaaaatatgttctgagttccaaataattaacttccaagtgaacttttggaaactgacagccaaattcatatatatttgggtgagatttgccaatgtctttgcactcttttacagggagaggcaacatgccagccagatcaggccagacagccctggcgactagtggggtaacagatgtctcagaaaaaacatcccatctacaaggctccattctgctgtaatatcatggttgtttggattcttagaatctcagatatatggtgacacacttttccttgtgcaaggacagacgctctgtgatcaaactaacatcttttcattggagaggccaagtcaaattcttagagtcctccacctggaccacagcatggttgaaagtggcagccagcccaggcagacagcccagctgccctgggacgttgagagagaaagattgggggtcagccaatctaattcagaaaagctactccaacgtgacaagcgtcatggctttcagcctacccacaggtttgggttctttaaattctttagcaaagggagggaggccatacagggaagagcatgggccaagagccagagctggatgtaaggagatgcagatgcaaggctattgagttaagaaaaaaatcaggatttgctgagattttggaaaagacgaatggagagtcattaaatgctcaaggtttggggctgggaaagatcgggagcctgttgaccgtggtgagaactaagttcagaatggaatactggtagaagagatgagctcctctgattcttttgatctggggtcaagctatgcagttgagggaattctcaatcccaatcaaaaatggacttggacagaggggatgggatcatgaatctgtgaaaatccatcataaaattttgacctgaaagatcccttttaaaagtcttcttagactagtctcagacatatgttcagaaataggatcttctaaatggggcctgggaatctgcactttaaatgctttgtgagtaactcatgcacagccagtttgggactttctcactagtctaatcaacctcttttcttttcttttttttcgagacagagtttcgctcttgtcacccaggctggagtacaatggcgcaatctcggctcactgcaacctccgcctcctgggttcaagcgattttcctgcctcagcctcccaagtagctgggattgcaggtgcctgccaccatgctcagctaattttttgtatttttagtagagacagggtttcaccatgttggccaggctggtctcgaactcctgacctcaggtgatccacccgcctcagcctcccaaagtgctggaattaccggcatgagccaccgtgcctggtcatcatcctcattttacagaagaaacttaggtccagagaggtcaaaacacagcataagcagcaactggaagctagaatttctgactcctggtttcctctccttagaccatgtaaagtacatgattagtgaagagaatagctaatgaacactgagaactaaataccaggcattttgctaagttctttccatatgtcaacttatttaatccttccagcctcccttcgagggcaggtggtatttgttatccccttttacaaatgaggaacccagagtaagagaggttaagtaacttgactggggagttaggtgtcaataagtgcagatctgggacacaagcccaggcgttcttcttcagattcgctcttcgccgtcatccaagaaaataagctaacacagcacaggggttttgtgaggaaagaagaacgttagctgaatacaatcttatttccccctgtgggataaagtcatcttcgaagctccatcgggggcgggggcgcaaatccagacccttctctaacgctagatggcgcatctcaggttctgaacacccacctgtggataaagcctttggggactacccactggctaccctgatctcaagatatcatagtcaattctctctctctctctctctctttttttaaagacagatggtgggggctgggcgctgtggctcacacctgtaatcccagcactttgggaggccgaggtgggtggatcacctgaggtcaggagttcgagaccagcctgaccaacacggtgaaaccccatctctactaaaaatacaaaaaaaaattagccaggcatggtggtgagtgcctgtaatcccagctattcaggaggctgaggcaggagaatcacttgaacccgggaggtggagattgcagtgagccgagattgcaccactggactccagtctgggtgacagagtgagactccgtctcaaaaaaaaaaaaaaaaaagacagatggtgtcctgtgtaaattattcctagtcttcggctctggggatccttgcctgtgtaggagggtaatcacccagaagaaagctggctctcgggagaattgttgagtgggacacttttagctccaacttggctgttttgtgaggtagggaggtttgctcttttcatttggcattttgaagtacattaagaacaattaacatcagttgcttgtgagtacacagtatcagcctatccttagacaaaatgccttggcttcaatcttctttcaagtgatgaaggataacttggctaacacccttcatttttttccccttaaaacatgtaactctatgccatttgtggttttatattagccttttggttatagctattggtaggtctagaaacctcaaactgatataaccacttggccatatcttatccacgaaaaaattttgtgttggcccccccaaagtgtttaattagttaattaattagttaatttgtttgccctctcaacccagcttttcctcactctaggaagaactagaaagagagggattaatttatttttgaaacactagtttccaatgagcaaaattaagaataatttttttttaatgtggatttcctgattctcttaaaaagtaggaaaatcaggcaacaccacaccttccttcccagcagcaacactttgctgaagctgtgcgtgctctttcaggctgtgctctgggtgcacaggccccagtactccctggcactgtgcttcagctcggcttctgcaggcttctgcatttaactccctgatggacaagatcaaggagtcttccaaaatgtccaaaataaacaactgattccaggccggtgcagtagaggtttcaaaattcaaatgcagaatgttttgaagcaagctggaatgttcagcccgggcaccagacattgctgactggggacttcggtgcactcctctcctttgacatctctccttcccttaggactctctctttctctctctctctctctctttctttctttctttctctctctctttctttcttttctttctttctccttccttccttccttccttccttccttccttccttccttccttccttccttccttctctccctccctcccttccttccttcctttctttctctctgtctttctttctgacagagtttcgctcttgttgcccaggctggagcttgttgcccaggctggagtgcaatggcacgatcttggctcactgcaacctcttcctcccgggttcaagagactctcctgcctcagcctcctgagtagctgggattacaggcatgcaccaccatggccggctaattttttgtatttttagtacagacagggtttctctatgttggtcaggctggtcttgaactcccaatctcaggtgatctgcccacctcagctacccaaagtgctgggattataggggtgagccactgtacccagcctccaattcacttctctgcctgctgatgaactcctgaaggggccaccatcacatcactgttcaggactcatttaatcgtttctatgtctggagggcagaggcattcttttaaattatacttttgtctccccatccaacactttgcacagttctttgcatatcgtagatgtggaaattagaaagaatgccatgctgggaatcagccataacacatctgggtggtgatggaagtcaagggttgaaagatcatccagaaggatgcaaggggccaagtagtatgaagaggggcaggttgagattgaaagaacgagtaatagagaagggataattgagtataggggttcaaggatgaaggcctaggcagaggcctcagaaagtacagtcttgcaccttgatgggggtacaccttggtgggggtcagagagttccaaagcaggctgagatgccccttctggaagattccttgactcttctctttctctccccctccatattcagttcttcagagaatttcattgactctgctttctaaatgctttcagactccacccatttccacaacctgcatcagcaccaccctagtttaagctgtgatcatctctcacctgcgcaatggaaagaacctcccatccagtgtcccttgtccacccctaccatctgatgctctattcttacccagcagccagagtgagccaagctcctcaggttagaaggtcctactagatttggcctctttgacctctctgatcacattcctccttctccttctgttttatgccatttcagacacactaacacacctttaattttctgaacatgttatggggctttgcacttgctgttccctgcacttggaatcttcttattccagaaatctccagcgctcacacactccctgtaatcaggtctcgctcaaatgtcacttcctctgaggggtcttttctgaccacctcacctagcaaagagtccttcttcccactggaacccccaaacatacacactatttcttttcctttctgttttttatttgtttgtttgtttgttttggagatactctcgctctgttgcccaggctggactgcagtggtgtgatctcagctcgttgcaacctctgcctcccaggttcaagcgattctcatgcctcagcctcccaagtagctgggaccacaagtgtgcaccaccacggctggctaatttttgtattttttgtagagacagggtttcgccatgttggccaggctggtctcgaactcctgacatcaagtgatccccctgccttggcctcccaaggtgctgggattataggcatgagccactgtgcccgcccacacatttctatactccacttttcttcagaacacgttacattatattatatacttgtttcattgtctgtgtttcccaccagaatgtaagcttcatgagagcagagacttttcttaacacgtagtaggtgctcaataaataaatgaaggagtctagcaaatgggaactgagagctgccagagtcacgggtgtctctgggaaagaggtaataattaacacacaaggaaagattcctggttgggcacagtagctcatgcctgtaatctctgcactttgggaggctgaggcgggcagatcaccaggtcaggagttcaacaccaggctgcccaacatggtgaaacactgtctctactaaaagtacaaaaattatccgggtgtggtggtgcacgcctgtagtcccagtgactcaggaggctgaggcaggagaatcacttgaacccgggaggtggaggttgcagtgagacaagattacaccactgcattccagcctgggtcacagagtgagaacctgtctcttaaaataaaatgaaaaataaaacgtatatctgataaccatagtcccttactcaacaccttcagtggcttcccaatggtcccaaccccttaacacaccatacaatgccctctaggttctggcactcgatttcttctcagctcatttcttgtcacttctctcctacagtcaagtttgggcccagcagactgtcctggtcctctaactgggctcctttctgggcctgcagaggtgctgtttcttcagtctgcgattccttacctcccctctgtctcttcctctgctgctgccttctgttctttggcattcaaccgagttttcctttcctctgagaagcctgggacctaccccgaccaaagctccctcctccttgcccctcccccaataacacagggttggggtctctgcatttgcttcctcaacactgtacttttcttgtcatgtctattttatggtctgtgtccccactagactgcaagttgcatgagggcagggcggtctattctgctttggtcgcctcgtgacggtgtctacccagcaagttgtgtgtgttgggtaagtagtgagaaaacgaaaaagcacttgctttacagggcggttggtcataaaataataatagcttatatttactgaccacttgtgatgtatcaggcaccattctaaatgctttacaagtatgtcacagatttctcccataaccctcttaagtaagggttatttcctccacatagcagatggggaaattgaggcacagagaggttaagtaacttgccaagggccacagcgaggaagtggaggaaccggcgttagaacccaggctgtttccagagtccaaattctatccaagagtgaagtgcaatatggggttccacttcgtgaacagattcaagtctccaaagggctttgtttttgtttccaggaggaaggacgagcttctgtgccgccggcttcccaggttatgggtggccagctgggctttgggaagggcctgtacatctcgccggcggccccggagtctgggtgtgaagccctgattaacttgccgggctgctcggcccacacgccagccctgcccaggtcctccggtgccccgggccaccctcatgcccccgccaggcccggggccgggactcgcgtctccaggggcggggccgggggcggggccgggcctctcttcgaggccgccgccctggccccgcgctcgcctcgccgagtgcggcgggccgggctggagctggaggggcggggactcgggaggggccgcagcgcggctgctggtgccgttgcgggagaagaggaagcggcgcgtcccctgaggcgtgcgcctggatggactgaaggacggtccgacgcgcgcggagggagagggccaggggcgaggtcaggctcggcgggggcgcgggcggcgcccggagggggccccggggagggaggcggggaggcgtggagcggggagcggggagcggggaggggggagcgggcccgcgccggctgagctccgggtcgggcccgagacccctcccctggctgggcgggcgcgctgcgagcgcgctccggcagctgaaagcggagctccggactcccttcttccccggtttcttttctttccaatcagcgagatataaacaccctgcaaggtaaaacaatagcggggccacctgggacgcgtcgcgcgcagagctcccacggttggggcgggggccgggagtcgcggccccaccgcggagccccttcccgatttgccctggcggagggtggggctacctgcggcgcccgggctcggtaggaggtgacgggaattcccaggagtgaagcatttggtggaagtatttcaggaacaatcgggcttcccactgttgccctgctctgggcagggaaactgaggcggagggaaagacagagacttgcccaaggtcagaatgcagaggttgactgtcctggtccaggaaccggacccaggtgtccggaccagctcagcgctcagccccagtgggttttgcagctttgcctttgataaaaatctctgttgtgtttgttttagaaatctgctcgcgctggggtaccgcttcagggctgccgaacgccaacttgcttcgtgtgccctaggcaggcgtggggcaggtggcgcctccgtgacctaccaccatggatggaaacggactttttggtgaagaaacccaaacggttgatgccaggcagggtgatttggccgtcaaaggttttgacgaaacctgccctgttctctctggggaatccgaatgagggagatcacagacaccttcactgagaagccaaggacatttctgtataatcagtggatgaaaggattttctcagacccttttttccgtgcttctggaggattaatccactacagtctgcaatttcagtggaaactgcaaggcacacgatgtggcaggagccgggagcgacttccgaattgttgtggacccttcctgtagcataggggagttttcacacttgcctccactcctccccttccccccaactccctccttctgatctcttctttttaatctgttcccattttccgagttaagttctatttccaaaactgttctctggagctataagtggattgccagaaatgagagattaggagctgggagaagaggaagcgccttgtgttgtgtctcctggaggctgccgacatgaagtgctttttcccggtgctgagctgtctggctgtgctgggtaagtggctctgcttatcagtgcaatcgatgtgaaagtttaacctgctcttggttcctgtaatttctcgtggttctttttcatcaacactaggatttgggggacaccaggaggcggtcggtgtgtgtcacaggttggagtagagtacgaagaggcccgtttctaacccaagagcaacggtggaatatcatttgttatctataagaaggaacatttgctgttcttaaagtgtctgtcttggcccctggggtgaggtcctgcatctgcacatctgtggtttagggacttcacatggctggtgggctgctgtcttgtagcatgtcaaacatggatgctctggtgttttcacttctttgttgggctgcattgattcctaattgggagtgggaacatcattcccctctgtctcgaaagttggtttgggtgataatgatggtgccttttttgaggtggaaatgggagtaagtgggatgggggttgaagggatgctttgcctacctgagtggtctgaaggctaaaaatgtgagggcactagtcctgtgtctcctcaccaaggaagcttagatcgtagttctgggagaaggagagcctgaagaaaaggaagctgcctggtaggggagattttaggattggcttttgtgctcccacaaatcagaatgcctagagtgggaagaagaaactatggccctgagaggtgaacctttgacacccctcttaaggtgcagatgcaggaccttcaccccagtgaagaggcccctctgctcaacaattgcctattctttttatgccattgagcactgtcttcagcgtgctgtcttagaacacatctcaggtctaggataaacttcattgccaggatttggtgccattctctttccccatctcagacctcatacatgagcacaccccctgccctctctgtaaggctcggtcctctgcattcagaagggattatgattgttgcctacagggttcacgtctccaaatctaggtgtcttgcacgtagggaacttagggtgatctgttggcagtggagattgcttccatgcattgtctacacccttgcagtaggtaacaggtgtgtgggaagagaatggactttagaattagaggacctgagttcctatcccagcttcaccatgattgacatctgaatgtcaataaaacagaaacaataaaacaagggaaggtgtgataactaaaggatataaggtgtcctaaatgccttgactgccttaaataatgtctgaaactcataatagatttgtgcaatcagtggttctcaaactctcgtgtgcatgttggaatcactggggaagcttttaaaaattctgatttcaggcaacaaccccagatcagtgaaaccaaactcgcttagggagtgggacccaggtctcagcctttgagctatctcaggtaattccatgcatggttcagtagagaaccagtgggtgagttcactagcgccagtgccctaccacccaacgcatgcagacaccctgctggtagtttagttagtcttctgttcagctgtgggctgggatacaggcagtgtctccatgtcacctgtatgctcaggcagagtcaagaaggcagggagcccttcatttgccagtctcttcatattggatctgtatttgttgtactgtatgtgtcattcgcttagtgtctgggtttaaatcagcaattagtgattcatgtggattcaacaggacacaaacaaggaaagcccttggggaggtttggatgtggggtggggtgtgtggctaaggcgggaaagagggctgagtggcagggtggggcccagggcaggagaagtaaccatcaatgggaaaacaaggcaatgtgacatttgtgccttttgtttcttctggctgctcaagtaatgtaaggctgcatgctggtccccctgctgttcgctctctgggccactctgtggagtggagctcgggccctggcacctggcaggtgctgtcattttccctccaccctcatcttcatgtgtaaacaggtgccatggaggaaaatgagcatcaaggtggctttaaaggggcacagtggcagacatccagatgcaggctgaagtgggaaggtttggaactgtaggcatgcatgtggatctctgcctgatttggagccccactggtggaacctcatctttctcttcacctgatggctctcagtatggcaggaaggaggcctggctactactttactaatctgggagaggtagaaggcgtttggggagggagcaaaacccatgttggggtcttatttcctgcttgtcttctgatgtggtctggttcatgtgtcagcattcttgctgcataatgtgaattaatgtgtagtatgaatttaaaacagcgaagaatcccaaggttttaagcccatataggtcacatgcctggaataaaattttgtttaaaaaagttggataaggctaagtgctctgaaagtgagaccgatgcaggtaccagcctctagaaatggcaattttagttagaaaaccctggacagtatgtgaggggtatacagggtaaatctcggagacgctttcatctccctcaacatgacagacctgtgcttttctgcacctgtcctttgccagtgtctgggattggaatcagattcctcttttctgtctgttgggatactgattcctgcttatgtctttgtcctaccctttgtctttgtacctacccccttgacctctgtgtgttgtttccttctgtcctaaccctaggtgcctcacccaataagggttgtggtggcagtgcatggctctgccaccacaacccttggttccaattacaaagccatttaagcctggctctggttgaaccatgagggtagtaaagtctctatttgaggatagatgtggccagaggggcagaagattagagagagaatagaggctggtacagtggtaggaagggaagggtgactggaaaagtgcctctgtctgggagcagcctgcatgagtgacagtgacatgggaagatgacagcaatgtgggaaagagagcataggatttgtgtctgtaagaacaggaaggaaattctcaggaaagatgaatataagctttagacacatacagcacattttgattttgtgtagccagcaagagttatatacctcccagaccagtgctgatgttgcaaacaagattaaatagctttaaaagtgttagcaatgaaaaatgtaggagattgggacatctgagaacctgtagatggcaaatgatcatttgtgttctgctccagagggagagaagttcatttgtagagtttgggaagtctcttctttgaatacggtaaggctgaggaagccatctcttacttcccagttagttagaaaaggcttctgaaagggattgaaagaaactttgaagtactatgggtgtgacctcagaggcagggctggagtgatcaaaggcagaggagaaagaggaggcagagaaaagtgagatggtttggagcaatcaggagaagggttctgaaagaaggggatgaggattgtgatttatggatgaacaaacaccactgtcctaatagttgtcccagaggtagtgcacttccctttcctggggaccatttgacaagggtgcaggagaaggaaattcttgtcaggaggacttggcctactaggatgcctttcagctgtgagaatcattgagctacctccaggtacccagggctgtgttaagatgttgccatcttctacggttttcatggcagcaagactgctggtacttccataatggcagtaataccagctctcctaactctagcccttactgtgacccaactatatcaatcagtcttcaaaacaaccctgtaagatagataccttgcattatcacatttttatagatggggagattgaagcttagggaggttaagtaacttgcctaagctgggcatggtggctcatgcttgtaaccgcagcactttgggaggctgaggcgggtggatcacttgaggtcaggagtttgagaccagcctggccaacatggtgaaacaccgtctgtactaaaaatacaaaaattagccgagcatggtggcacattcctgtaatcccagctactcgggaggctgaggcaggagaatcgcttgaacccaggaggcagaggttgcagtgagccgagatcgcgccgttgcactccagcctgggcaatgagcaaaactctgtctcaaaaaaaaaaaaagagtcacttgcctaagatagattgctgacagtgttagggctccaagctcctgctgtcttgctccatgtgcatgctctctattcccaagatgacttcatggtccaagatgactcttctagccgcagccatcaggaaggaagaaaaggctagtgaagggtaggacctcttaatgtaaggatacttcctggaagttatatacatcacttccactaacattctcattggctagaacctagtcatgtgaccatatttagctgcaaagaaggctggaaaatatgcttatcctgagggtccatgtgtcctgagaaaaacttgggattctatgactgtagggaaaggagagaacagattttgggggacagctgcccatctctgccatagtcacaaagctaaaaagtggcagagtagggttttgaagccaggaccatttggttccaaatcctgtgttcttacatctaataagctattccgtttgactctgaagccgagcctctggcttctaagaaggcttgttaggaaggcatgagttagatgaaccaacgtttgtttcataggaagcaacctaaatcagcatataattaaacactacattttgtggttttatcagtgagtattaaagtgtttatagagtgcttatgtgccagtcactgtgctaaacactttacatagcatgaccttctgtataaaattcttgaagaccatctgtcatgttcattactgtagtcccagaactcagccttgtgccatgcaaagtaagcaggtgttcagttattttattttttttgagatggagtctcacactgttgctcaggctggagtgcagtggcacgatcttggctcaccgtaacctccgcctgctgggttcacgcgattctcctgcctcagcctcccgagtagctgggattacaggcacacaccaccacacccggctaatttttttgtatttttagtagagatgggccttcactatgttggccacactggtctcaaactcctgacctcgtgatccgcctgccttggcctcccaaaatgctgaaattacaggcgtgagctaccacacctggcccagttaattttttgatgagtgaatggtttcacaaggtaggtgttgtttctgtgttggcttccttgatcaagataaggaaattcatgacacttttcccttgaaaacaattatgttcaaaggaaaagagctggaatttggcagaatctgaatttgaattcacatttgtctgattatagagcttcttaaccttttttgtgttatggatccttttggcagtctggtgaagcctatagaccccatctgagcataacattttaaaatgcatacgtggccgggtatggtggcttacgcctgtaatcccagcactttgggaggccaaggtgggtggatcacctgaggtcaggagtttgagaccagcctggccaattagctgggcgtgatggtgtgtgcctgtaatcccagcacctcggaaggctgaggcaggaaaatcccttgaacctggaggttgccatgagctgagattgcgccactgcactgcagactgggccacagagcaagactctgtctcaaaaaaaaaaaaaaaaaaaaaaagaaaagcatacataggccaggtgtggtggctcactgctgtaatcctagcactttgggaggcagaagcagggagatcacttgagctcagcagttcaagaccagctaggcaacatagtgagaccgcatctctatctacagtttcctgcagagatcgaagtaaagttcagtgtaggtggttgttgctggggaagacactcaggaagaggacatgggctgagtgttcagaaatggtcaggatttgatggggagggcattctactcccaattaagtcctgataatgcaaaggcctcagcaggccttttacagattggagaaatgactgtcagtggttttaaggaccagttcaggtgggatgatgctggacacagaaaattggtttgaattataatgagtttgggatttaggcttaaagtaagtccccagagcccaggccactgctgctgagccccagcctgggaactggaggaagcagtcccagttgctgacctctcgtggtccctggcttcgggtgtgcagtgcatccttagttatgactccttgattaatatttttagcttctggccgggcatggtggctcatgccgataatcctagcactttgggaggctgaggcaggaggatcacttgagctcaggagtttgagaccaaccagcctgggcaatataacaagacctcatcttactaaaaatcaaaaacattagctgggcatggtggtacacacctgtagtctcagctgcttcagaagttgaggtgggaagaattggttgagcccagaaggttgaggctacagtgagctgtaattgcactactgcactctagcctgggtggcccccatctcacacacacacaaaaagagcgagaccccgtctcaaaaaaaaaaagggagttcctcatttgccatgagtggacacctgcttctttactgcttcaaagtgaacacagctattccttgtaaagggttggtttttactttaaggaaatctagaacacctgtgtgtgaatgccccctgattttcaaagaaatgagtggttgcatcaaaatcaagcttatatttgtggaaaatcacatgttgccaaattctctcatcaagaaccctttattaactgactaattgtgggccatggtggcaggcacttaacaaagaccatggcagcagacctccctcaactggaaccctcagttaagtgggattttgtttttatttttgaactccaccttcagaagggcaaaaatcacaagatgtggtagcaagggtttattctagaaattagcttccaagcagtcgtcagcccagtctgtatgtcttccgcatctataattatagtagcagaagagaatggtgagcctggggcactgcaagatcctaaatcaaagattaaggcatattaactctaccctgcctggaaagtggtcagttgtattttaaaaagctttacaataggctttctaataacgagagttgaagcaaagtttccacctaaccctgtaattaaattcaccagaagaccccatttcccattatccagacgaccaaggctttgccgaacaccacccgtccctgccctctaggagaggtcatccaaggccagcaatgaaacagtcaatcaatttgcaaatggacaggaggacactgacaggatgtgttcactgagggtaggtgtctactgggggagagaggccaggcaagtctgtccttgttttcagtttagcaggaggagtgaaggggaggccagagtaactcctgagtggtcaatctggaaaggccttttggaagggctggaattttaggcatttttcttaagtaagaggagagtgacgtcctgttggaattgtggggtagaggatattctgggcacttctaaaggggtggagaaacctgaatgtcctgggatgggaaccctaagggtgtagatttgtaaaaattgctgcagtcagttgccatgaggactgggtatctgggctagagacaggtgggcgacatcagaaagctgtgagtggatatcctggaagaccactgagaggaggagccaggaatggcaccagacatttctgaaggtggggggcccagaggtcgaagcaaaggggggcctgtttctgtaccaaagcaagagcttctgtatatccatcaaaacataatcaggccaggcgtggtggctcatgcctgtaattccagcactttgggaggccgaggcgggtggatcgcttgaggtcaagagttcaagaccagcctgaccaacatggtgaaaccccatctctactaaaaacacaaaaaagccagatgtggtagcgggtgcctgtaatcctggctacttgggaggctgaggcaggagaatctcttgaacctgggaggcggagtttgcgatgagccgagattgcaccattgcactccagccagggcaacaaaagcaaacaaaacaaaacaaaacaaaaaactccatctcaaaaaaaaaaaaaccataatcagagcaaagacattctaacaaaactgtgaactcggagaaatgagtaatgcctgcttcccgtcaactttcaggtgtccaggccttctctttattaaaacagaaaaaaaaatctgataccagttgtgtgttctttctttgatgtagtgcagtttgcccaggcttgccttaagttggtgctatttttgtgtatttaattctgtttttgcatgtgacccattgtctgatgcttcagaatgcagtctgcggcctcctttttgatagcaactctgagaacactgtctctgctctcggcagggcactgggtacacctgtggcatcgctggtgccatggcatgaggcaggcttcccacttcacttctcaaggacccattttattaactctccttcccccaggagctccgtattttgaaatctttggtttcccagaccattagggagtaattaaaccttttttcccacatgataaccagtatgatcgttcacacttgatatagtccagttctaaagcaaaattagtctagtggtctgggttgcggatgaccaaagcacacatgtttgatccattaggttgcttagccctgtggttagggaaagtggggttattgttaggtgattttgaaatctctaaggtcgtcagcttcccaaccccatgtgctgctttgggccttaggaaccttggataacctgggtggtgtttgcccactacttctttgcattggtgaccttgattgaccttgctaggtggcacttttcagcagggagaggaaaggagatgcagagttgagcagccatcatttgctgtgggtcagatcacacctaccctatcccagccagatacaatctattcctttttaaaaagactttcagagaatgaaattttacagtcttttttgtataacgcccccaaaaggaaatcttgattttcacttaagatttgatttgaagtaagtcatgatttagaacagcagacaaaatgtattggggtaaagtattatgtaaacgtaagatgaagagatactggtttctacttcaggaggtagcttatatttgtttgctttaattaattaattaattcattcattcatttttgagatggagtctcgctctgttacccaggctggagtgcagtggcacaatcttggctcactgcaacctccgcctcccgggtttgagtgattctcctgccttagcctcccgagtagctgggattacaggtgccctccaccacgcccggctaatttttgtatttttagtagagatggggtttcaccatgttggccagtcaggctgctctccaactcctgacctcaggtgatctgctgctccagactcccaaagtgctgggattacaggcgtgagccactgtgcctggcctaatttttgaattttaattttttgatggaggtaacagtgactataattctgttacaagaatgtagaaagtcacgcctgtaatcccagcactttgggaggctgaggtgggcagatcacaaggtcagcagattgagaccatcctggctaacacagtgaaaccccaaatacaaaaaaattagctgggtgtggtggcgggcacctgtagttgcagctacccgggaggcggaggcaggagaatggtgtgaacccgggaggcggagcttgcagtgagccgagattgcgccactgcactccagcctgggcaacagagtgagactccgtcaaaaaaaaaaaaaaaaaaaaaaaaaagaatgtagaaagtaaaatgtgaaagttcccctccttgtctatgctccttattgactttgatatagattctttatagtttggtatatgttcttccagacccttttctatgtatatacttacacaaatatattttttctgatataaatggaatcatgcggaacatattgttcaacaacttgattttaaagggatgatttacttcactattttttcaggcttaattttatggctatatcagaactgatttggttattttatagctggttgaagctgtaatttgtgaaatcattggggagtagtgagcctccttcaataactatataacaataaattttgctgtatcaggagagcaagtcataataaaaatattacccttaaattttaatgtatttagtgagaataattgacttgtttattctgcatattttcttcaaaaaatacataaattcatcaaattaagcacgttcgtattttattgactattttgctataattttgaaattatgttaaattaaaatgaagcctgtttgaaacctgttaagatgacaaccataaatacttagttttgtgtctaattcagttaagtgttcttgtttgttcatggaccagaaaaaaagttttcgtgtgttttcaattcccaagtgactcctccagatagaatgaactggacccgagtagcctttaaggttgctggctacgggctcagcatttaagactttaacccaaaggaagagaacttttttttctcaacccctgcagcaacagttattgctgtaaaaagattatcatttcacagcgttgggttacttctcaacgttcacgggaatgactttctttaaaacctctgggagcaagagcagtttcttggatggctcacctttagacctgatttttaaaatagttgctcttttggagagatggctgtgggattcatgtgtcatagtcatcccttcttaaacatcagtgtttgactttctatcccttgtcctgagacctctgggggtagcccctgttctagtagaatctacttctaatacttttcctaagaaggctttcccaagaagttcattcaacaaataaccgagtgcctgctacaagcattcattgttctgttatctccggtgccacagaattcacagttaaaatcatgactaacattttaagttgtcacctgatatgtatttttaatctttaataaatagaaggattaattaaatacactgtgacattggggaactcttttttattcctaaggtacatcttttttcttgccattacttaacctcttttcttcctgttttgttctcagctctcctttacagccatgagttaccaatgcccggtgccaccaggaagagggggtatctgtaggagtaagatgatgaatagcagtgataaggggagagcgaggagaagggagggggctctgaggaggctaaagggcaaacttttattcttgaaaatacacaaatatcccaagtcctgggtgtgtggaacgtccttattactgctggggatgttgcttgtgtgtgggaattgggaatttcacacctagctctgaatttctaggaagcccaaacaaaagagaaatagaaatagagaaatcacatacttcccaccagagaggagacaccgtccataccagaggagcctcgtatggggggtggtgagtataaggccgatccatcttccccacctcatactttgcctcctgcagtgtggcctccctgagggcgccctggcaagggagggtgagggaccctcatcagtatggctcttacaaattcccagaagctgctgtagcagctcgatgaagggcaggctcttccaggtctgttccttgccagatgccctctcccaacctggggttaaccctaaggaggcattgatctgcacttttctcagagacactggtgacctcctgggtagccaagagcttcccccttctccgtgagccctctgagactgcaggtcccagacggttgtaaattctgcctggtggaaattgccaaggtgccaaagcaggtgcctgctgccctcaggagcctctgtgcagggccattcttctccctacaagcagcacttctcagagacctttctggttttcctcttcagctttgtttggcagtggtttggtgttggtttggagatggtggtgtgttgggaattctgcttcacatagatggacatgtttgttagtgtgaggaatgatggtgcagatattcattccgggcttaccccaaactaggtaaccctttatgacattgtttagagatgatttgctgaacagtttcataatgccttctgatgtttcagtacaaaaaatagcttgctgaacaacgttacaatctgtcttctgatatttcgttacaaagaagcaagagcacattctgagcacgctgcccagtgctttcgccttctctctgttggagcaggtgattggttccagttctgcgtttcggcacctctgtggctgggcatccctctgaactgtgcacttctagaagggagcaacaagatagagaactaatatgcctctaggcctgagttcattttagaaaaatctttgtagatttcttgcccagtcctcttattttaaaggtgaattgtcctagagggaagaaaaagaccatggtgacctgggtgggtagagggtggaaggagtactggaaaatgcccctaacaggagatgagaaagagactctgatgcacgtcatctttgttttaaattaaaacattatgcaatacaaacattcgccttcccactcttccccctaccacagaggagctgtaatttcccatatttggaatttggggagagctgggcctcatttgaagataaggccagattcagtctctgatttggggggaagtaagtaactgagagagccttgaggactgtggtatttatggtgaatatatcagaactatatgtgcctccttgtcatcatttattcaacacctctgatgtcctagagctggtgctatgcccatcagtaatctgactcttgttttcttctgcatattttcccttttgcaaatgtataggcattcagctttaatcaagtaggctttttactctgtgatctgtaacggggatgactgaagtcatgtggaggattttaagtaactaatctcttaagacattcagagcataatcttccctagcccatgatcatcctgcctgcatccgagagatttgtgaggctctgcaaaggaggctggatggggactttggcatcctttggagagactgggtgtcttccttgctggggacaggtttttgtttgcttttggcatggggacagagcctgctgttcatttaccatgtcaagagagttcaagatgccccatgaatgtgaccagtgtgttactaaatctccgtacgggtacagagaacaatggcaggccaaacacacatgaagacactgtctaggctcattgatgtttatgcagtttgtgtccagggctggttctcagggagaaaaatggataagatctgcaaaatagataagagaggactgctggtcagtggtgttccctgacatttttccttgaatgataccaggttaatcaaaagataaggatctaaaatttttttgtgctctgcttataatttgaatgtgacttcatatgtgtgtcatctgttggactaaattggattgcagttgctcttcaaattgtcattcctttattttctatttctacctacctcctgatgttagcccaggttcctgctaccaaggtgtcttgcaaaagaatttggtgactgttactctaagtgaagcttttgatactttctcttaatataatggttcaacctctaacaatgtagactaatgaggaagattagtttgaattagtaaaatgtctgaattaccaaatatttttcaagaacttcactgttattacttttaagtaaatactgtaactcaaactaggctaatagaatgcctaataaagatccttaggggatactgctttaggagagaaataagaatgatttgcaattagtgcaccaattgtttatgtaaatggaatttctgaaatactagactgagcttgaaaaccgtttgttctcttaagtattttaaatagtccctatgaaacccctgtgcatgctggtagttgtttatatgctgtatagagacctgtttcatgaagacctaactcaaccttatatcatcagtatcagaaattccaagttagtgacgtccaggatcctcaccttccaagattagattagatctctctgccaaatgcttccatagcacatgcaattgtctgttgtaacactaatcaatacatttaacaaatatatgatgtattctgctatatgcttggccagtgtgtgaaatggaggagacataatcctcatctttgtgtagtttataggctagcaaagaagtcaggcagtaaacaaataaatgcatttataattaattacaatcctgaagttggattgtacttttgtgagtaatggtttaataaactagattttaagttccattaagataggggttacttctgtgttgtttgtcatggtgtcccaaatccttccttagcctactgcttggaatagagtaaatattaagttgagctttattgccattttgataggtcagaagcagtcgaatgtcaataatgtcacatagttcaacctaatagttgctcagtcaatatgtattgaatgttgaatgcatgttgtaatcaacgatcctatggtaggctgcatttaacacagttttctctagccaaagaaatgctagctatggtatttgaaaaggaattctaaaacttcaaacagctaaaactggtgatctgtgatatagactgtgggactggatatctgtgagactggagtgccttttgtccagtatattttctatgcagttcttggtacatttcccagcctcaggtgggagcatgtgtatttgggtctggagtgcttgtcagtagcccaaagaacctgggaagagtatgctggaaagctaagatggaaggcagggataggagccatttggcctgaagaagaaagaggcaggaaagagatactggcatagccaaagaagccttccctttaagtcttagtgtagggagacttacttttccagaccagagctcatgagatcatgcactcattccacagatttgtgtgagtctgtgatgtgctcagttatggctaggcatgggcgttccttattgtgagcttcctttttgtgcctggaacttctgtctgaagggttgtgggctggactgtagaccactggtcctcagaggcaagggttgaactgaggagaaggccccagctggatcccgctgggagaagcccagcactctggcctggggcctgctccctatctgtggaactgggagtagggcccaggctagggcttagatcagagcttcccaaaccttctgtgttaagaacgtttttgcatctgtttggatttcatggctctttttccattttctgtgcacacatgtccaattgtagcaccctattataatgcacactcttttctcacacccacaggataatttgtagttccacagctatttgttgagcatccttatctgccagcacaggatgggggtggcaagtgaggggaaacacagatatgtggtattggtccctgcctgtggtagacgtgattggttacctacagtggctcttcttttctcttcctgttggcaggacccagttgggttggatgccacacctctcccacatgccactcaaggaaaggtgaccctgcctccagctctagggtacgtgctgattgagctgagcccatcctggaggcccgtaatttagacatgggcgtgtgacatggttttggccactgaggtatgagaagtctgctgggagattctgggaaagatgtttttcattgtaaaaggaaatgcagaagggacagcttctttcactagattctcggacatgaagcagccatcttgttgcaatgaggaaagcaggtttgttgaggccagcagacgggaagagatgggaaaaaccctgagggccaagcccctgaagactgaacagtccaatctccatacattttgtcctcactgttgaagccagttgagttggaattttctactacttatagtgtctaacctatgttagacactccctcaaaggagcatgaaacaggatttcttcttgtaccattcagattatcatcaaaaagcacattattcagagacagagcttagctttgtggtaaggcagaaaggagaggggaaagcaagttggtaggaaagagttgagtgaggagattgtatttgaaatggatcctgaggtaggattaggatttgtgtgggaggagcagaagggcgttctggggaaaggaatggtggcatgagcaaacctgtgaagacaggtgtggatgtggcgctgccaaaaaacagggagattatgtcctgactaattccacggacagattctagagcacctcaaattgtgagtttatatggtgacacgtgacttatgcagccggaaaagtattacaggcttatgaacaggggagaaaggaatgaaagtgggccttgggaagaaggataaggattaagtagctgggtaccaggttctttggaaggggaagaaagtaaaaggccagtgacaagttcaagctactggaataactcacatttgagttgatagcagtgcggggagggagtgaagctgtcaaaggaagattgtaataaattaactggtgaagaagggtaagatggatatctaggggaggaagatggaagaggaagattttaggaagaggaagattttaggaagatgctgtttgccttttgccactatggctttgaggtaatgaggaaagatctaagtaatgaggcgttgaattcatttgaaaatagggctagactttgggaatgagaggccaagggttaagaggatgtggtagaggcaactcactagacatgcacatactccagattttccagcctccctcacagttcagttggggccatgtgactagcgttagtcaatgaagtgggagaggaaggaaccagggaagagccatgtattcctccattgattccttccatgccacagcagccttgggctagggccagaaagtgtggctgccaagacggggagggctgtccttccaggaccagactttgacggttcttgctcagctgggaaatcctggtagaagcgagatctgaagctgtaatgggtggcagtgctgacagctatttgtgttgggtctgggtggtatgtggtcttcatggtacagttgtctaccttctcctgacttgatttgctcaggggtctgctgtcaatgggctggagcttgctggctgactcattctacctctaggactctcagtgtttctgggggcaggtttacatcttggctgtccagggaagggcatccttgttcatgagctgtgctggtgagaaggctgctctctccacaggcaccagaatgccaagtgccttgcagaggagaatgtttgggtggctggggtccagtggtgaccaggtggagtgtctcaattatctggctaaacatggagcttcaggaagaagttccagatctccagacctgaataggaataaggtgcaaatcccatctttcaaatctttcccactctcagaagagtcaaaatgtgccttttctgcaagcagtccggagctaggcactttgcacacgctttgttacagtgttgcatcaatcttgcctggctgaatcatggtgttttcctaagggcaaagggccttgtgagtgctgggaggcctttggctttggcatctggttttcgtcaggcagcaggtaaaagtgcagatggcgggtctgactgtgctttaaacaaagcagagttagacacgtgggaaaggcatttgagaggcacctcttactctgtgtgtgatctcccgtgcatcctgtttcttctctaaccgaacacctcaactcctaatacccagaggaaaacccttcagacttgggagacagccggcattgctggcattgtcctctctggagcttttcttgataagtttgaaaatttaaagacagtggtggcactgtttctctgttgaatggagagttgacattcttatttttccttcctcttctacaaaactggggtgtcatcagatcagtgtttgctgctgctgttgcgttcttgggtagccactcttttttttctttttttgagagggagtcttgctgtgtcgcccaggctggagtgcagtggcccaatctcagcttatcgcaacctctgcctcccaggttcaagcgattctcctgcctcagcctcccgagtaactaggattacaggcgtgtgccatcacacccagctaatttttgtatttgtagtagagatggggtttcttcatgttggccaggctggtcttgaactcctgacctcaggtgatccgcccgccttggcctcccaaagtgcttggattacaggcgtgagccaccgtgcccagtcagctgctcttattttacacactgcttctggctgataggcctacaaggtctaagcttaatcccagaaaaagtgctacccgagtggtctgtcagtcggcctttcgtttgtttgtcttgttccggtcatccttgcctctgtccgcccagacaacattcaatcaacatttgttatggagccagcagtatgattttgcaagttacttttctaaactctcatttcctcatctgtaaaataataggaaatactcattagggtgattttaagagttaaatggaaacatctgaggaaagcacttagcatcggtctggcacatagtaagggctcaataaatggtggttgtcattattgttgagcagagccaggggttgccaccccggtcagctgattggctgtagacatggtgtgaccatttggagctggaatttgggccacactcagcacatagttgcgagccataaaggcacgacctttggaccccattgtcacctcccttggaatatcttggtgttcttgtttcagtctgataaggccattgtagctgggttctaggtatctctgagcatggagcactcacgccagcctcagacatcgctgtcaagggcatcggcagcagtgaggtgattcctcagccggtcatttgggcatcgctgcctgggtctctcctgaccttcagcctcatcttttttgtcacctgccatacctttgcctctaagtgtcccccagtttttattgctgccctctccatctgcaccagtgcctctctctgccagttccactgttctctcgcctgctctttaggatttcctttgttttgcctccttgcctggtgctttcagcaagcagcgctgacgtcatctcaggaactgtgctgcgtctgagagaagaacctgcattagccgtttaagtgtgcggtgctggcagagtacctccctgaaggtgtcctggggaaagtgagtgattgctcactgggtggtgagccaggggcagggtttggggagacatctgcattagcaagttagcatcacttgaaacacaggcatgtaacaggcaaggacgtgctcttcagctaccaggctgtcctggctgtagccggtggccacagacctgagggaccccggctttgttcccttagctggctttgttcccttaagctgcctttgttgtctcagtgtagctctctctacctcctctgtatttcaccgctgacaactcactcgattctccctctggcaatcttagttacctatgaatactctttaacgccatcttctgccttctcaatgaattaaggagattctctccttgactgtttgtgagccaaaacctaaccttctcttggctgataagtattaatatattgtgctgagaggaacttttggagtaaaattagacatcaaaaagaactggcacaattagtttccaaggcttttaaggttcctggaagtcttctgaatccatcctctttgtgtggaccccccccaattctccatcttcctcctaaaaataacgataatggcgtttcaccagaagccggacaaaagaaggctctgtctgtttcgcctgtgggaagtgacaggaactgctgaaacttgtgttccgtgtcacagagccaagggttcacacggtgcagaaacaaatcacagtgtgtcacggagactttttctgtctccggccccactctgtatttgagcccaaatgtggagggagatgctgcagttgtgggaaggcacttctatgacccctcattagggtagaggaagtgagaggcctgaggccacagccaggctggccttttgcaaaatggtcaaatcagcagcaattcggccctggctcccactttgtgccccacccaccaactcctgctacctcccatccccactcccagcgcagtcgcgtccatggcttccagggccccaccaggctgccctccctgtctggctgtgctcagccgctgtcctggttctccccagcatttcagtactttcctgagtcctcctgctggtccttgacttggctggttggaaggtttgtggatcattagagccacttactcacactgaggaaagaaaacagaagtggatatttggggaaggcctatgtgttgcttgctctgtgtgttcactcacattttctgatttcctccctacagttcccctgcccggggagtgttatgcagccacctgtacaaatgaagcagttgagacccagtaagcttatgtgatttctccaagtcatagccagcatgggccactactttgagctctagataaggaaaaggaacctagtgttttaaagatttgcttcattgtggtataatttgcttacatacaacggaactcaccagtttaaaatatgtaattctttgttgacaaacatgagcagccacataatcaccacctatcaaatatggaccattcctctgtccccaaaaagttcccttgtgccttcttgctaccagcccctttcctgcctccaggaccccagcctcaggggacctgaatcctgccactacagttttgcactgtacagaatgtgatgcacatggcatcctacagtgtgtagccctttgaatctggcttctctcactcagcacagtgcttttgagatccctccatgttcttgtgtatatctagttcacgcctttttattgctgagtagtgttccgttttatggatataccacattttgtccatctcttcacaaactgatgggcatttgggttgtttccagtttggggctactatgaatacagctattaggatgtgtacaagtctttgtgtggacacaggttttatttctcttgggtaaatacttaggagtgggattgctgggtcatttggtaactttgaaagaaactaccagactgttttccaaagtggctgcaccatcctacctccccaccagccatgtatgaaggggaccgggtacttttgatgcctaatctaggttcttttccctatatcgtagtgtcactggctgctgaggtgggaattgctgactatcacattcacatgccctgagcctgtccttttcacaggaatttcttgggaagtctgaccatttggagccagttgctggtggggaggtttcctgaggaggtcctttcatcacacagggccgcctcctctgatggctgatcgccacacacaccctcctttgctgcccatcctctctgctgtcaccttggttcataattaagattcacctgtgggtgacgtgggacccacttgcagcccatggacactggaacagtccattctgtgcagttcgcttcctggctttcacggcacctactatgctggctcctggccagagatggagttagaggtgtcctgtcccaaatgaacctgcatgcagaagccactggggcagtggggacactgcctcagcatcatcacggctgccagaggctgaattcctgctgtgcagggctgtgtggaactgctgctgttatatggcgcatctcccgtctggagcttgctgctcagggctctccttaacaagcggccaaatgactgcagttttctgcattgttttcctgtgaggtccctgatgttttgaaagagccaaaaccagacagggatgctatcaggttgcagttctgctctgctgtggtgtttctgtgaaatggagaggaggattttgaggaatgtgtagttgggtttacttttgtctttatttgtgggcacgtttcctgagtggggaccactgataattaggtgttctttggtgtaggggcccagatggacagcgtgggacccctttctaagggattgtcacagtgagagggctgagcactgaagtttatcttgcagcatgcgtgctgggagcagcccctccaaattggtgcacgtgtttggggagggcagagaccagggcatagactggctggcaaactcgcctgctgggctgaagagtcctgaccttgcaactggaagctctgctttcctgccctttccctgattcctgctaattttatgacctttcatcagtcacctgacctttctggacttcagcatcctcactgtagaatagaaacaatgatccctctttcacagggatcggaggatctgtcgcatgtcaaagccctttctacacctgtgacaacacaagacgtgcccgtagacacctgagcatgggcgtggcagaaggccaagctcacacccaggaagccacctgcccttctgctcctcatccttgtcagtcgctgtgcctgcatccccaggaggacctcacgggactgggagggcctgggacaggctggccacaggctggcctcagatcaccaggcattgagacctcctgctagcctcaggctgacagtaataaatgtacaaaggaggacagagctgctgaggagcagctgggagtccagacacaaacgactgtcggaggagtgagtcagggcctctgaaggtcacttgaggagtgtccgccctgaatcattgacctgcggcatgaatggagaagtagctgggataccagccctggggcagttccgttgggtggatctttagaagagagaggtggcgtgggaggggtaagagcactgatttgggaatcagagacctgggttctttaagtcactttatccaggactagctgtgtggcctcagacaggttgatagcagtttcctttctgtgaaatgatcaactccagaactattgatacctgtcacattgtgtttggggaatgagactcaacagcggagcctgcaccatgaccctggtgcctctcccccatccccctgcgccttttggaccaagaagtgcaggcatagatagagctttgcagcctcttttgttcctggatggtggatccctgtggttaatgaataattgctttaggggcagaggtgaggggagtgagtattgcaagtgaagatgggtgggacagggaggttccaggtggtgaaatattttcaggcaacaatctgcagagaaacctgaccatgactcagctaagcagtgggctcactggcaggtggccctggtggccccctgctgacatctgctactactgtgtgcttccaagtcccagcgagcagcagcggtgattgatgatactacagcgcatcccaggagctggtatcccagggcagcgctgcacctgctggcagccaagctcttcagggcaggacaccggcccacagcctcggagcgcccagttccaaccatcaattttaattcttgtgaggcttttctttttcacatttggttaccctgttgaaccaatctgcttcttcccaccactatgacagtttttagctccgttctaggccaaattttgctctggcccgagtcccactgtttgtttctttcatgtgtatcttttacattctgggagccctgaccgactcccagtgcctgagccccttcccctaagcgtggggactcccgcctcaggtctgccctgttccagctgctggaaggcatccagaattctaatgttattcatcatagttccagtttcactacaaagcatatgatttgacctcttatccttactaagtcatttcagacttagggaaaaaatacccacttaaggataattcttttaccaaaaaatttcgtgtttttttttctaataagaggtaatccatgcacatgttaaaaatcaaaaatcagatgcgaggtgtgtgggaaaaaaatgaaatgttctatatttcaaagtaaaactttgggtgacaaaaacttcagtgatttttaatggtgataataatatcagtagtacttttgaaatctgatgttgggctggggcacagtggctcatgcttgtaatcctagcactttgggaggctgaggtgggaggatcactggagcccaggagttcgagacactgtctctccaaacaaacaaacaaacaaaccaaaaaaactcaggagtttgaagctgcagtgagctattattatacccctgcactccagcctgggctacagaatcagacccagtctcaaaaaaaaaaaaaagaaagaaatctgataacactttattaggtgctacagtgttgtaaaggatcatcagacacacgaatttgataattaaataatgttcctaagtcttctgattgaaataataacacagtgcaaaatctcttttcctggcttcccttcctggtcttccttttgttctctcttcctgccagctctgctctctgcctgttctgaacggctgtctgctgcagtgatcagtgctcttctttggatgttctttgctcctgatgctttatggcatttccttcttttaattttctttctttcttctttctttctttttcttttcttttctttcttcttcttttttttttttttttttttttttgagacagagtcttgccctgttgcccatgctagagtgcagtggcacaatcttggctcactgcaacctctgcctcctgggtccaagcgattctcatgcctcagcctcctcagtagctgggattacaggtacacgccaccatacccggctaatttttgtatttttagtagaggtgggttttccccatgttgaccagctggtctttaattcctgacctcaagtgatcctctgccatggccttccaaagtgctggaattacaggcgtgagccaccacgccccgttcttcttttaattttctattgtgaaaagtttcaaatatgtaccgaagtggagagagcaggataattaacccccatacactcaccacctagttccaacaattatcagctcatgtccaatcttatctgtaccatcactcccctaccctccctgtagaattttcaagaaaatccgaggaacacctggtgtattcccacgtgttaatgaaaactcttgttgattaagctgcacttactagtaatttattttcccatttaaaattaattttcagaataccaagaaggcaccatttcatccttatatctgattggtgaaaagtgtaatagtcaaatagtaccaaggttgacaaaggcatcaaagaatagaaacacttaaacattgatcttggcaatgtaaattggtgcactgatgttgcagagcaatttgggcaatgcctagtgtggttgaagatacccttggatgaagatttacaagaatatttattgcaataaaaagttggaaaccacttaaaaatttatcagtaggaaaatgaatacattgtgctatagataatgattattcagacagtggaccatggtataaagcagttgaaatgaatgccctggagtgacatatgtcaacaaggattaccctcaaaaatgttttgtcaataaaaaaagatgcaaaagggtgcatacagtgtgatgccattttaaacagttttaaagcatccaaaaactctgtatattgtttatggctacatacataggtagtaaaagcataaaaatgtgcaagagtgataaataccaaatttgggatgttgtcatttctgggatgggtggaatagtggggcttgaaagggggtgaaatagggattgaagcacagcctgtaatgctttctttcttgaaaggaaaataaaaaaactaaaccaggtgtggcaaaatgttaagatttgacaagtcctggatgtgcacaggcatttgttatacatgtgtctgtgtaaatggttccttattcagaaatgaaaaatctgtaattgtccatcttctgataaacttgcaatggctgctgttgtcatgtgatgtcattttcttgactggagctaagaaacttggcattttttgttatttaatcctgagaaaatgcatattttcttcttccttcctttctttctttctttcttttttttttttttttttttgagatagagtcacgctgttgctcaggctggagtgccgcggtgccatctcggctcattgcaacctctgtctcctgggtaagggttcaagtgattctcctgcctcagcctcctgagtagctggggttacaggtgcctgccaccaagcccagctaatttttgtgttttcagtagagacggggtttcaccgtgttggccagattggtcttgaactcctgacctcaagtgattcgcccaacttggcctcccaaagaaagtgcatattttctttgtcatcttatgatagtagatcatggagctcctttaacttaatggattcctagaggccagtgactcctgatattttccagacacttatagctagaaaaagccaagtaatgaagctctaatgctttgacttgctttgacttaacaagcttagggaagaagcaatggcactgtattttctttctttttgagagaaggtaagaagagcatgaaaggagaaggcagaggaggaggatcccttcttgcctctgtgtagactgatcccagatgcagcttccttctgtcatctgcaggtggttgggacctgtctccacacctgtggtttgcttaggagtagggaggacaggcctgaaaggaaaaaggacttgagctgggctttgcaaaggcacagtagaatttaggtagaaaatgaggagtggttgaatagatgtttcacggaattaagggtccatctttagcaagacacaaaccctttaagacctggtcctgcctgtccatcttcacttcttagtacccatctctgtccaccctccccttccagccagacccagtattggccctattggcgagctcacctttgtcctctggccttggctttgcacgtgccctgacttctcacatggaagggaatgagtgcctgtgcctcacctgtccctgggctgcctgccaggctcctgcatactcccagactctgattgtggcagtctcccaaggaatgccctcctgattttccaggctgaccacccttccatagcacctggtacagttagttgctttgttcttaattctatgcttgtcttcctacctgtgacttttttcctgggcagtggcgcagctggaatggttcagcatgcatgcagactttgcacgtgaccctgggcagatacttaaccttggggtgccatactcatctgcaggtggggatggaatggtacccacctcctgttgtagttgtgagggttaaacattgtaacacatatagagcaattaggggagggcctggcaagactctgctgtaggagttagctggtcctattgctgttttccccatttcttccctttctctttttctctcttcctcttctcttttcttttccatcttgtttttagctcaccaacacaagagatggaaaacgatgtaagcatagcctttaggtgtgaatgactcctggtcgacttgggggaaatggcaaaatccagtaagacgtaccggggatgtttggagggagtggtgggtgtcagactgagtaggtggaatggggccagacttttgaagccttggataccaagacacggagtttggacttgatgtgattggcaaagtggaatctctggccatttgtttatctggtgagaaactgctgtgggagacctgtatggcagtagtttactgagtggactggcaagagtagggaaaagagtagcagtaggagactaattttaaaatatgctgaagacctttaaaattgaagaacagcgtggctggattaggcagttgacaagtggcagtgacacaggagagactagggagagaggagcaggagtccctggcttgatgaaagaacaaaagagagggagctacaatctttggctttgagatttgtagctagttagactgcaggaaaccacaaaaagagtgagggtagctggaataacacatttttggtttatttttaagatgtgtgggatggcatgggatttggcatcaaagttggtgtgtttattgagtatagttactgtggatgccagcaagaaggagagcgatccgatatacttataggcaggacaagagcagtccccatccctaagcaggaaaacagtgtggccaagtattgttttcagacttctttggcttcattagcatgctggagggttctgtccttgacctttctgaattgactgttgtgtttggtgaaagtagaggtcacactcatctgaatcatcgaaagtcatctgtatgactttaaggcaagaaggaacagcaagtgtgtaggttggcaagtaagataaaaaacagtctggatgagatagactgatggtctggccctgttgatggaacaagggtgaatgcaaggttttgaatccagctgcaaagtgtaggagggggaggccgtgggaaggatggagggttttagttggcaggtgtctgccatgtgatgtggcctctaaacagccatcttgtctgcactgaaagaaggtcgtctgcttgcttcatccttgtccacaagctggtcaggccacttgtggagaaaagcatgcagttctaggcagtacactctgaaggacggaaacaaactggaacctgtttgtaagacacagggaaaggaaatgaacccatagaacatgagctccttcagggtaaagattgttcatctgcatctctctgaagctttagtgcctacctacatcagtgtccaggcctagtatgtgctcacctgttgtccattgaataaataagagattggggttgtcctgtatccaggacccctgagcccaatttcagttcaaagtaaagaagaactttcgaatagtgctttcccctggctgccattagtgggaatgtgcatctatctgcacgcaggatgtccacaggcacaggggagtcaagcttaggtgagtggttagaccagtgggcctcaagattccatcactctctgcatgcgctggactcgttgatgggagagagtaagggagcgtgagtaaaagtctgtgatcagtgagggtggccaggaacaagtcgatttgtaaatgaatctgctggcaaacttccttacaaatgtactcccccaacaattttttataatttctagataaaatgccctgatttgaaagaatgtcaagtagaatttgagttaatagtgtgaattgcagtcccatctgctcagctccatggcccggtagatctgtggagccatttgtcacaatttgttttaaagccaggaagaaaaacactcctggacactgcccaacacttctcgcggagatgctgtctttggagtgtggaaggggtggggtgggtggtgagaaagctgggtgggacagaaggagggccctgtgcttcgaggcaaaagacagggttccagcccctcttcactggcttgctcgtgaccttgggtgagtcatgcagcttttcaggcctcgctcctggtgtagaagggctagacagatcacagcttctccaagtctgggccagatgactgttcattctttcctccactcaactaatatttttgaggtctgttcaggtgccacacaccattctaggagctggggatccagcagtgccaatactttttctagttttaagactggatgctaagaacatcattgtctacttcatgctattggagagcagcagttcttccaggcataagaacctggaagaaccagtttgcatgaaaactgtcctaagctcaggaaaggttgtcaccagccttcctcgtgatgtgcttgaggccaaaaaggggagatagggccaactcagagtgcatgaaaaccaagccgtgaagagtggatagctgaacagatgcctgtgaaagcaactttgatcagggaaggaatggtagactcggtatggggaattcttcttgggaaggtgattgtggagcggctctcaggagacaagaggctttgtttgatgactggcaaaggccttttgagagggtgtggtcggggtgatggctggcacctgtgaggaagacagttgttctggcgagtggaggtgtactgggaaagggtgttcaggagaataaccggttgattcatcccacaaacacttattgggcacctactgtctgaaatgcaaggggacacacaaagatgagttaaggatttgacttaaggcactcacacaacacaaggcaggaatggttgcctgcataaggcactgaggaaggttccctagcagagatgacggatgagctgggccttaaagtatgagtgggcattggctgggtgtggggtggagaaaaggcctttccagatgaagggctttgaaatgctttatgagtttgccttggcagagaccagagaccccataaccagatgttgttcatttgattcttggaatcatgggaatacttcagtgtcccaaaaagaagatgccattacaatgtttgaagatgacattctttgtgcttaagctgccttaagccttttcttaaacagcctggatgtgcagcaaaaaagagtcctgtctgccccgtgttgtagggcattggaaaggatgatgtactgggaggtggctgatgcagcctccagtgcagaggcctggaaaagtggacaatctgtggctacaggagggagaggttagggtgggtgaagaagtattatgaatgagcagaatctagggacactccatgggtgagggtcatattaagaaatgagagaagggcacggactactctatgccaggaagagaactggggaaggccaactataacagggattgttttggaggaatagacagtgtggaccgtcacagtgaatttgtttaaacagatatctggaattggtgactcaagggcttggtcaagctcagtggcaaaaaatcagtgagaataggaacatgaagtaagttacagatggggcctagacatttgggattctactgtttagaagcaggtgttgcagttatccagtgctgcataacagatcatcccgaatcatagtggcttaaagcaaaaattagtttattctctttcatgaagtctgtatgtcaacatcaggaagggctgggctcgtggttctggctcagtctttcatggggttacagtcagatggtggttggggctgggacactagacaactggagcagtggagactggcatctcattctcttcaccttgtctctcctgtggggtagcttgggcttccttatagtgtggcgggctcggagcaggcagatggcttacaccgcaactcaggctccaaatgtgtgtcccaggagagctggcagaagctgcgttccctgtttgtgacctagccttaaggtcacagagtgtcacttctaccagagctgtagcccacctagattcagggagaggaaacacaggttctgccctctcgatggaaggagtgtcaaagccatgggtaagcagagcaggcacgggagatgtcattgcaagccaactttgggaaatacattttgtctcaggtggggaaattgcatgaacaaatgaactccctcatagcagggaatggagagtgccacctgagatttgatgggcaaactgagaactgggagagaagcaagagaggaggcagcgagtgactgaggagatgtgggcagggagagaggaggaaagccaggtgatgttctgggcatgaagccaggcttgctgtgggtgctccaaggcagatgtgaacgagtgaggatgggaaagaagtggggttggccaggaccatgggaacacgtggctcttgttttttagttgttctctccgctagctggagcctacccttttttcctcttagatttttaaacagcgttttattaggagaaatttaaaattatccttgtcttttttatactgtctcctcattttgccttgtcgtggcatgtgtttttactcatttgtttttcgaataggtaatgcattcacatgtgttcaattaaaaaggataccgaaggatgtacacagtgcaaattaagtctgcttctgacctaattcttccagagaccatcaccgttactggtttcatgtgtgtctttcagaaaatattctctaccattgttacctctttgatgctgactgtacacattagcagggctgatttgctcctgctttggttttagcctcgatggcatagaggcccttccatagcatgaacagccctctccagacccatctactcacctttgtgagagggcagagcctacagactcagggctgacctcagccctggattctgttcaagctttttctgaacctgtaattttaagtgctgcttctaattcaagtcagactttttctatgttggcttttcatttttgctttctatggtttctcagtgttctttcacccctaagatcatgattttgaatttttattttttatttttggttctaaggcacagagagtttagtagacaagaaggaagggagaagacagaaggaaaaagctgccccatacagagacagagggaagggggctccaaagctgaaagaagaggtccccatgattgtgaaattttttgttctctcacttacatgcacctttccatggcataggggaatatatagttagggaaatgcaggggctttcaatactggtatcacagaattacacagtcttggagctgaaaggggattttaaggattgtctaggtgtttttcttctttaaaaaaaattttaaaattttgcttatagggaatcagccttagagaaaaagttaaaagattatgtaaggtctcttcttccacccaactcaaaaaacacccccaaaccaaaaccaactctgctggacttcctggaatggttgatgacctactgagatctgatttcccagagcaggaggtgggaagtgcttgatccggcagtgggtgggaatggttgaacccaggacatcccaaatggctggaatgtaggacagtggtaccatgcccaggctgggaccaacttcttagctggccttcaaagggacagatggcagctgaactctgcataaagcccaaatacagctcacagaacccaaagactgtgtctctgcagcgtgcagcattggtctatatagcatttgaagctatttttttctctgtaagtgtccacaaaattcgtcactttacaatgagcctggcaggatagctgcagtgaagaaactctccacacaggtcccagtgtctcttctggaattttgcctgagcaagtaaatcaaatgcttggtaaacacactgatgtcactgtccctagccatggagatttagaactttttcaaaacccctttctctctgtggccccacttgtttctcgctgcagccttttatttttctggagttggctgtggttctccctcatgctccaggccaggctctgtgggctggacaggtatggctagttaatcctgccagacgaggtcagctctgagttaatgagtacagcctctctttctcccctccagagcatggatttcctttaatgcttttcttaagtttgaggagacaaaaatatatgcctgaaaaaggattactgggaagaattaaacacgagtccttcagcacgcacgtgtccatttgttgccttccaggtttgctttcttctctgcctgcgaggcttctcattcagtatgctgcgttgtgtggttagctgttccatagttatgttgaaagtggcttctcagatgctgcttgagtcctggggaatgtcaccatccaatgacagtctagctgagagatgctagcacgcccaccccttcttccccccacagatccatatctcatctggctgtgcacaaaaagcaactgataactcctgttatcagcactaggtggggtgggaggttttgggggatggtcagcattttctggtttcgattaccatgcaagtattttaaatctgcagctctggcaaactgataacctccacaactatatcatcagagccctcattaatggaatcattttctaatttgaacatcttgtttgtccttcctctcatttcttagtgaacttgtcagtcttccccagcccttcactggttgagttgtgcaagtttggagtcttttgcttttcaggaataggctctgctctcagtgaccgtttctgtgtcttgaactttgtggcgagtggagcttatttgggagttatagggtctgcagttgatggagacgttgaggaggattgaatgccaggtattttaaagtggccttgaattaactgttttctggcatctttctcaaatcgatccatgggttatcatggcctttggaggcacctcccatctgaatgcttgccatccatcagctgagtgactgttgacctttgctccctatgtcctcctgtgggctggctggggaagatcacttctcagaggcacatggcaggatggtctagagagttggttgggcccagggaatagattctctgtccagtgatgacctcatcaacttctccccagtagttgcctaagacctgggaattgtggacagctacctggatatccccacattctcttgcctgttaactacatctctttactatctctctggccagaccaccccctttcactcccagtggaggtccagtgatctgatttggttggggtcctcagcagctctcacctggatcaccgcaggaccatgaaggaatcttctgccagggcccctttcccatcacttctgccagaacaatcttcccaaggcaggatttggaatatctgtttccttatttacacccccagtggctctccactgctcatagttcaaagcccatgctcttttttttttttttttttttttttgagacagcgtctggctctgtcgcccaggctggagtgcagtggtgcgatctcggctcactgcaagctccgcctcctgggttcacgccattctcctgcctcagcctctcaagtagctgggactacaggagcccgccaccgctcccggctaattttttgtatttttagtagagacggggtttcactgtgttagccaggatggtctcgatctcctgacctcatgatccacccgcctcggcctcccaaagtgctgggattacaggcgtgagccaccatgcccggccaagcccatgctctttagtagagcaccctatccctgccctggcctggcccctgtctgctgcttcctcttggtcttcctctactttcatggaccctaccacccatcaatgtcaaactgctgcagtactctggacctccagctcctcatgcagctctgcatagattcgagctgctctctgctgaggtcctatgtcaagtcctccccaccccaccatgatctagcagaaatacctactcatcctaattaaaactgggcacaagccacctctcttgtgtgaagcctttcctgacgcccatggaacacctagctcagtgcatctttcacagtgccacgctttgccgcctctgtttacttatctatctctgcctcctagactgtaaagattgggtcttgtagctcatcagcccagtacagtgtccagcaaagaggagacaccatatatatttttggaatgaatgaaacagaagcttagagtcagagattgtgggtttggatgccaactctgtatcccactgacaatttttccgagcctcagtttgctcatctcatcagtaaaatggggaatgtacacttccctcacagggtggctgtgagattaaagtaagaagacacctttggaaatgctagtttgctgcagatttggctagtacctggaattcagcaggcactcagtccttatttcctgtttcaggtgataaccagagagaaagcctctacttcaggagactacatctcattgtgccttttgtcttcttccaaagaggcttctctgatcttgcccctaattaggagggcgtgcctggagagccccttaacagcatctgggcagggcttgccaccagggggcagaggcttttgaaccatcactgctttgtcagagcctgtagcgaatgttcaaagcccaaatcttgttccaaatcccattccctccaggacccttgccttcagtggggatttagaaatggccccatgctgtatgtcacgtccttggctctgtgtaagtcagcgacagcctgcatgttaatgcctaaacttctgctttctcaagattcctcaaaccatctgtcattcaggtgccttccttgtaccctgaaaggatgattttcatcagggctcacagtctctgttaatgcctcatgaaggcatccaattggaagaagcaagagaagagatgcgttagaaggcttggaagggatcaacatggaatggaaagtttaataactcagaaaataggagtttttaggaaagcggctaaacagctttaagaaaaagtaaatgaggtcaaacctgttcaaccaggcccttgtgcattaagtagctcaaatagagggcaactgattaaccatttgacacttcacacacctgcaaagttgacctgaccaggctggctccagccaattttgcaatcattttctcgccacccattccctatttcacatcagcccccctcccccacttcaggctccttggccacctccctcctctccacttacacaacctgaattcatctgtaccaaaatattcacccctctctgacttctttttttgggttttatgaggcaggtggtctgagaaattgcttatgactgttggtcctaattatgaagctaattcattcagactatggaatacttagaaaacacaaagtgcaaagaaaaaacaatcccttattaccccacctccctttagcgttttttaaatatactagcccagtcctttttccacacatatatagaggtgtgtgggtgtttatctttacgaaaatactttcaaatccttttatagcctttctccccttttacttagtagtgtgctttcagcatttttaggtgttcataaatattgttctctgcagtttttaaatggttgcatactatttcaccacatggggagagtgctgtaattgactgatggattctttgtttggggaccttttcctgcttttgtgacccacccccctatggtatagtgctcattcttgtaccttcttttggaagtccctgaactctccagcttggtcttgtgtatctgcgagggccctgtttcccagttgtcttctctgggctgctgcagaattagtctctacttccacagttctgttatttttgcatctgtgatgctggcttatctgtgcctccctagaaagaatgagcagggcccactgcctactgcctggtcatagttatgctcaagaacatggtccttgaattgaatagggaaaatgtccaatccagggctacccactgatgagagccaagcacaggagcctgagccaccagcaatgaaagtcaaagctgagggggaaggagcggccatccattattatcatacgtaacacgtgcttgggaaaacccccagaagcagtgtcagtgctctcagtatttatttttagttacgtgtagatgttcatgctttatgagtatgctagacatatttcagggtgcctgccacccacactcttggtggggaatggtttgggggcccttcacagtccctgttgcccaaagtggttatatgctgggtaatggaatacagatgcccatctggtcaaggtcacctagatctgagtgtgttggggaaatgcacattgtaaatgaccccaaaatctacaactctgggggcctggttaaaaaaaaaagtctcccagccagtcagattgctttctggggaatttgcgctgagaaccacagtggggagtgcagcagcaacaggcatgtgtaagctgagtatttggagcacagaaactatggctgagtaaaggaactttgtccctgaagagtggcgggagctgtcctgaggagggtggtctaagtcacaaaggttttccagttctggtccttgcaaggcatagctgtgctgtgatcctcactcatgggttgccctgaaatcccacagtgtctttttgtatcctttctccatcctctccacttctgcccacacactggagctagttattggggctctgcttattgcgattatccagctatcatccaagaggatggcacattggctagtgcttccactgctgagagggtcacagcagtgccttgggcagagtcaggagaagaggaatattcctgttttgtaccggagtgctttccagggtgaagagctgaaggggctgctctgagtaggacacggctctgaggttcctttggagaccccaattcactgcctgggcattcctagctaggcagccccattttctagttttgtgtctccatggcctagtgttgggagacagaaggtggggacactgtgttgaaggacacagcagactgacttatcatgggcttcctgaagccagggccacccctttgtatccaggtctagttctgatgccacttgaaaaagccccccaagtgcttttgctgttggcgccccgcatccctctgctgcctggtagctgacatcctgacgctgcctgcagatgcgctcccggcctgttgtcagcagggccctgggcttagcagtcctcttcctgaagctgtgagagcattgagaggcgcactgctggggccctgccagctccaggaggaggtgcaggcagtgctgagtgtggcaggagctgtggaagttattccagtcctctttaggagagggtggtggtggcggccagtagagggactgtttgaaatccagcagacacctttctcccagactgaaaatctggggaccagactgagagtctggagaaactggggtatcctaggtccagaaatgaagcgtaaaataatagcaacagtaattgctgtgaaatgtatgctgtgagaaggaatgaggcacttactggttcgagtgatggtccttttactggaactcactctaagctgcggttcactgagcctctggacttctcagagggagtgttgccacgaagctgccctctttaaaaaaaaatgcccaacactcagcctatttctgttatctccaaaaccggacggaaagaaagagcggtcagagtaattacagggagaacatttacaggcaagtaatctgatcttgccttttaatttttttcccctctagaaaatagaaggcaaatactagcacttatatttacttataagcatttctattagatgctgccttgattctaggttgggctgaaaaaagtgtctattcctgtggctgtgggcatggctggcctagggcaggctgcagggctccctcgctgcctttctttttggatgctgcttctgtgctgtctttcgcatgagagtgagggggaatgcaggtgagagggtggcaggactcaggtgctatccctaccttttctgggaggagtggaggatggagtcaaagaaatgagcgataggagaggaggagcagaatagaagggcgggaagtggggtcttttgggctttcctggttccaagcatggcatagggtgaaatagccatggacatcctgaaagtgataaggtcttccctggggtttcaatggtcatggataagagaagctggggattgtacaaattcaggtggggaaaggataagcagtagaaggcatgggcttgttggttatagaaaaaaaaagtataaataacctaaatattcattaatattggaataaataaaatgtggtgtaatcctatgatggaatactgtgcagctatataaagaggaaaaatgggaactatatttgatctcaaaaactttgaggaggaaaactgaggatcataactcaatgaaagggacgataatgtttatgtaaaaaatgctgaaaaataatgtgtatttttcagtggttacatatatctggatataaaagcattttttttttaagtctggagagctctatccttaaatcacagtagtgctaatctctggaaaaatgaggggaagcagggttagtggtagtagtcagaagagataaaagacttaaaatactgtaatttttaaaatatttaagtaaatattctaatctaagtaaatagtagcatgtttaaaatatttttgagttatggtttagcagtcctctaaggaagcagcttcaacatttagtaatgagggaattaggcagcagcttagaagcagccacccatccctggggctcagtagctaaatgtctcaacctaggacaatcaggcagtctagtgacacagcagtgcagacatcagagagatcagtcaggttgggatgaaatgaattactgggtttgcagtccttttggatggttctgtagctggcagttacatcttcttagaagtagtatcaataatttaacattcattaatcatcatctttagaccagctctattttaggtaccactggggattcagataagagaaagaatgaaagagtgaatgaatgatatttttgtccttggatttaaaaccaggccaggccctcatcttgtcgcatttgactgtgaatttggtctgtctgcttccagtcctgccctctgctctgtcctccacctgccaccagagtgataattcgaaagcgtaaatctgatccgtcttcttccttacctctgttaggctctttctcaacttccccagtcccagaggaggtgtttgactttattaatgtgcctttcggtgcccttttccgcctggcactgatgtgccctccagtcatgtgacaaaacgacctccgcaaacttcttgctaatcctggaatgcactgcagtgttttcacgtggtatatatttcccttgtgctttgggacccaattcagatgtcactgcttttttgaaggctttttgaatgctttcactttctgaaagggcttaaccttgcactttgcacctcactgctattgtataccattaaaatgattagttatgtgtatttattttaggattgtcagcttaggacaacttgtcaactatgtcttatcaatctctccctcacagtttctgtcctagtatccatcataataggtactgaaaaaaatgttgattgaagccatagcatatgttcttgttacctttctatgtaacaaatgtttccaaacctcagtggcttaaaacaacaattttgttatgctcacagaatctgtgggtcgagaatttagaggcacagcaggcatggctggaagttccaaggctgggggcagctcacagtggaggcttgttcactcacatggtggcaggtggagctgggtgctgattggctcattcactcacattgtggcaggtggacctggctggagccagctctggactggagcacctgcccagggcctctccatgtgccttgggccccctcacagcatggcctcaggaccgttggctgtcttatgtggtggttcaggacaccctgagtgaaatggaagctacatcactttccatgacctaggattggaagccacacagtgacttcctgcccagatacacagagaagggaattattctaaactccacctcttgatgggagtgtgtggcatggtcacattgcaaaagagcatgtgggaaggagatattgttactgctgtgtctggagaatacaacctgccacggtgtgtgggagaaattagttccacagctagagttaatatcactactattgctactactgcaactagtggctaaacatttattgagcacttattgtgtgccaggaattaagttttaaatgtagcaactcatttaatccttccataacgctgtgacaattataccactttacagatgaggaaactgaggtgcagagaggttaagtaaccagcccaagatctcacagctactgcccatgctgtgggaagtcagtgaaggcgaagacttaggaattcgatccaaactttaggtttgctgctggattgtgacagtgcatttatcacatgggaattgatggctgtttcaagagccattttttttttttttttgagacaagatctcgctctgtcacccaggctggagtgcagtggcacaatcattgttcacggcagcctcggcctcccaggctcgagggatcctcagggaccttttttttgttttttttttagatagagtctttctctgttgcccagcccacagtgcaatgacatgatctcggctcactgcaacctccacctgctgggttcaagcgattctcctgcctcagcctccggagtagctgggattacaggcgcacatcaccatgctgggctaaatttttgtattttcagtagggacagggtttcaccatattggccaggctggtctcgaactcctgacctcaggtgatccacctgcctcgccctcccaaagtgctgggattataggcatgagccactgtgcctggcctcaagggacatttttgatgaaagtatggatccagataaggtccttgcacctgtgggcttgggaagctgaacctcgagctgtcctggttttatggttccacttgtgccatctggaccttggttagactgtcccttgatggcagtgacattgaccgaatgggctggagtgcagtggtgcgatctcggcttgctgcaacctccatctcccaggttcaagcaattctcctgcctcagcctcctgatagcgtgtgccatcacacccggctaatttttgtatttttagtagagctggggattcaccatgttggccaggctggtctcgaacccctaacctcaagtgatccatctgccttggcctcccaaagtgctgggattacaggcatgagccaccgtgcctggccagtgcaagtgtgtttagccagcttcatttactccctaactccttgcctcagattctgcatccgtaaagtgaggtcactaggagtattgacctcagagggctgttgcaaggttaaagctggttatacaagcagagtacttggaacagtgtcagttacctggctggggctcagtaagtgctggctgtccttattggaaaggttcaagtgttgtgttttcctgtcacctgatctggaaagaggtcaaacaaaggatcttttagcccatgccacttcctgtccttccttggccgaaggctgacaggtaagaatccccagaagttgtcaccgatgtgcctgtggaagtggccttcccgattgctttctctctggagcctttaagttccatgaagcacttagttggcctggactccaccaattcagcatgctgtggcagctcagttcagttcccatttttaacttgggactgcatagattccccatcatttcctttaggaccaggtgggcaagaagatccagtcagtgctttattacttctcactgatattcacagagcacatttagtgtgagccatggaataagaaaactcttagtcacattctgtgtcatgagaagtttacttaaccttgaaaaccatttccttgtctggtaaatgtggctgtaatgaaatcgaccccattcactgttgtgaggattaaatgagatgatgtatgcagagaaactaggacagtgcctgggaaagtgctactcattatgatcatttgtcttcagtttagaacaatatatacttgcttatttaaaaaaaggagataatagagaaaaggtattgagaaaaataggagaggagaaaatcactcaaattctcaccattcagcgattcagcccagtatcatcaatgttttgtttggttgtttttgtaggtgtaggattttttttttttaatgtaattttactgcatatgcagttttgcattttttacccaaacttaatgttctttttaatgttcttgtacttacaaagatttatcctgtttatatattgatatctcaccttggcagaaatgagataaaattttaaaatattcatttggtggctttcacagtattatttgatctctagggtctcctgtgagtttgctacatggtatgttgtattactttcatcttatagatgaagaaagatactagtgtggctgagtcgcatgcagaatttggaggagcatggtgctgaatgagctttgatgattgtagaggccataactggaaaagtagatgtaaaatggtgaggtcgatccctctgacactttcacatgctcagtcacgcatcttgaacatataagttggatcctgtgcctagagaggtaggtttctgagccaaggcatattccaaaaattgcatgagaagctggctttcccagacacagtgacccctccctgcccactaactcctgagtcatacctcctgcccctagccaggtttatctaggacttgagcacaaagaaaaagtgggagcatctttgaacaagaaatatcttgaaaaactagttaagtggtatcatgtatttgtgggatgggtgatttcaaaacccaatctaaaaggacaggaccttgctcattgacaatttattgtctgatgcaatgtttcttaatctttttgggtcttgaattcctttgagaatcttttgaagtttatggactcttttcccagaagaacacactcatgtgtatgtaacacaattttgcattcaatcttagggactgcaggtgtctacattagttatatattgatgtaaaaaaaaaagccccaaacttaaggcttaaaggaacaatagatgtttattatctcacagtttctgtggttcagaaagtcagtaacatcttaactggatacttctgactcggagtctcccaggaggttgcagtcaagatgttgttggggggaaaggggcaggttcagtggctcatgcctgtgatccctacactctgggaagcaaagccaggaggattacttgagcccaggagtttgagaccagcctgggcaacacagtgagaccctatgtattagtcagttctcacattgctataaatacatgagactggagaatttataaagaaaagaggtttaattgtctcacagttccacaggctgttcagggagcataatgctggcatctgctcggcttctggggcaaccacaggaaactttcaatcatggtggaaggtgaaggggaagcaggcgcgccttacgtggccaaagcaggagcaagagagagaggggggaggtgccacacacttttaaacaattagatactgtgagaactctaacaagcacagcaccaaaagggtgaagctaaatcattcatgaaagatccattcctgtgatccggtcacctcccaccaggccccacctctaacattggggattataattgaacatgagatttaggtgggtacagagaccccaaccatatcatcccgtctctataagaaataaaaaatttagccaggcatggtggtgtgtgctggtggtcccagatactcaggaggctgatgtgggaggatcacttgagcctcggaggtcaaggctgcagtgagctatgattgcaccactgcactctagcctgggtgacagagtgagaccctgtctcaacaacaacaaaaagatgcctggggttgacattatctgaaggcttgactgagttgactgtggctggagaatctacttccagtcacatgctagcaagttagtgctagctgttggcaggaggcctcatgtggtcttccccatatggctgctttgatgtcctcataacatcatgcttgtctttttatgacctagccctggaagtcacattccaccatttgtgcatttcctattggtcacgtaggtcagtcctatttagtgcatagggcaaggtctgagaggggagtagtgctgactgcccatgccctctcctggtgcacgccgcttccagcacccagaagctctcctaactccattatttagggttttcatatgggatttcattacatgggtatgactgatcaaatcactgaccaatgctgattggatcaatctgcagtccccttcttgtccttggaggtctaaggctggggcggaaaactccacaactctaagcgtggccagctccttccttgaaactgcctccgtgctcaccttcagtcacctcgttagcataaactctgggatggccaaaaggggcttcttataaataacaaaaggtactcccattgcttaggaagttccaaggggtttaggagctcagtgccaggaactggggacaaagaccaaatatgtatatatatataaatactacagtagtgaattttatatagcaaacatgcattatttttatttttggctaaaatttttttctagttataaaactggtacatactcattgcagaggactgggggaaggagtaaaatattaagaaaaaaataaaaatcacttgccatcctgtcacctagtattttctttctagttcttttcatgcagttatatataacattttgatctttctttctatgttacagaagtcatatttgcttattgcagagtaatccaaagagtacagaatgtctaaagttaaaaaagttatttaaaaaaaaaagatccttgcctgggaggaactttctattgtaggttgggaggggagagagaggggctgtgggtcagaggatgccctggtcaggtttgggagcctgtgtctctttggaggcagcagaggtctgcacagcagggtattactattataggggaatggtggggtgggatgtgtggaaggggaattaaactgccaagaagaaaacaattatttttatgttgagaagcattattttcaggggtcagaagccctttgtggggcagagggaaattaaggaggtatttaataaacaggtgcagctgaatgtgtgtggttaaagtgcaatccagtagttatttgtctggattgtttataacctgcttccagcctagacaagttgatttgaccctgctgtcctggctcattcaggccacttaacactgtttaccattgggtggggaggacgtgcatgatccgctggccgagtgcctttgtaaggtctgtaaataggatgcattctggttaaactcgttattgcctcacaaatgctagtatctgatgggtctcagatgttttcttttgcactggggaagactggaggagaatgaagctttcttgaaccagtgattgggtctctaccaaagagagaaacttaaagctagtgagagccttaagatatttcatttgagcacttggctggcaccatgtaggtagagacactttaaagtaacagtgctttgctacacctgatttgaatcatctgtggagcttcaaaaaaaaatcctaattaatcctaagaccagttatgtcaggtggggtccaggcactgttagttctttaaagctccccaggtgattccagtgtaggtccaggattgagaagcagtccttaaagatgctggtgtaccctgacttgcctctagccttctttgcaggagatgtatgggggttggttgtagttgcgctgtcatagaacaccgcaattcaaaggatacctaatgttatgaatgtagttaaattgtttgcaaaatgttctgtgtttcaggaatactgcaatcatttgattaaaatgtcaccatatttgtgtgtgtatacagtcatgggtcacttaatgatggggacatgttttaagaagtgcatcattcggcaatttcattcttgtgtggacatcatagggtgtacttcaacaaacctagatgggatatatattttcatttatatattttattatggaaaatgaaatgtcccagcactgttactgaatatcagtcatttcccctacttgatctgccatgccaacattaagtgccatatattagatctctatatatgctccattataatcttacaggatcactgttgcacatgtgtttcctcattgattgaaatgttattcagtgcatgactgtacatatagtaaaaatgttatgcatcatattttaacatactgatattactaatgagttgtcctcatggttactttaaatatcataattaatgccatcaaccagaatatatcaaataaattcagataccacttgttctgtttatttccttcccctgccaattttgtatttttcctgattctgctgaagccaagatggggttctgtgtaagattttgtttgtgaggaaaggttctgcatgaattaaagttttgcaagccatgggcatttcattgtatgggccgtttttgaggtctgtcatcttgcagattagattagcttacactgaggcacagtcccctgctgggctgggcagagagctgcactccactagtattgagctgtcccggctgttcaccagctggatccacttcagataggcatagccggggcagccgccattcccatttgtgggggaaaagggaagctatcacaagaatgggctgcagctgtgggaggaggtgggcagcccagcgatggtgtcattgtcaaggggccattgaaatgtccttaagcagtcattggccaaatcctgtcctctatggatccagagccacagaatgttccagcagaaatatgtcttagccagcagctctttattgaggactgattgtgggctaggctctgtggtagggtctttacagatgttattaaatcttctcaataaccctatgagacaggcattattatccccatcttactgatgagaaaaccaaggcttagagaggttaagcagcttatccaagatcacagttaataagtgacaaagccagcatcggaacccatgctagtcctctccaaggccttcttagaaatcatgtgatagatgagaagatcaaggtctggagaagaaaagcaagttgtctgagatgacacaaccagctctaattggtggcaaagctgcgcctgtaactcacctgcgcttttcacaacctgcagtacgtgaccactgccgaaatgaagaggcagggttgtgccccctcccgccttctgagtggctcaggcacaatcagtgttgagttggcgtgaaatgagaaattaaactcaccatgccactttaagaagaacatggagaaggcaggcagaagtgaccttggagaacagtatctgagccagaaggcaggaggtcagcgggggagtcttgagtgggaaactcaagggtagcctgactgtccttgtcacaggtttagctgggcactgttagttcccccctttgtcagtttgtgggaatctgggcatcagggatctgtttcagcccttcacatttgtgtttgggtgtgctcagcttaaaacgatagcagcctgcaggagcttagctctgcctccatttatggagggaagagaaactaaggaatgccccttggggtggtgttggggagcagctacatgggaaattgaagggtgcagcaccagtaaaaaggtgctcccaggactccctcccaccagcgctcagaccaaggaagaagcatttaatttcagccagatttctagatggttgcttttatttgttttcatctgaatttgtgccaaggattcaacttttcctgctcattttattaaaaacttcatacacagcattaataaatagatataaaactgccatataaatgacaaacagaggggctaaatgaaattcccaagggtcagctgttgaataagtaacaaaagcacatcttggcatgatcaaattcccatatatgcaaattagggacagtgctttaccacagagtgttttaattaatatttataaatcacaaagcgcctttgaaagggccagtaagctgtttatattattatcatgtcacacaaataacaaaccctttggagattgctggctactttgcattttggtctgagaagtaagtaagcatgttgtgtgtgtttctctccctcgtaggtgtggtgtcagcacagcggcaggtcaccgttcaggaaggacccttgtaccgcacggagggctcccacatcactatctggtgcaatgtgagtggctaccagggaccttctgagcagaatttccagtggtccatttacctgccttcgtcgccagagcgagaggtgcagatcgtcagcaccatggactcttccttcccctatgccatctacacccagcgcgtccgcggagggaagatcttcatagaaagagtccaggggaactcaaccctattgcacatcacagatcttcaggcccgggatgccggggagtatgaatgccacacacccagcactgataagcaatactttgggagttacagtgcaaagatgaacctagtgggtaaggagaagctgtcttcacgttgccagcgtctggcctgactcagttctttagtagcgtaattttgctttatgccatgcatttgactttaaaaaaaatcccaaaactcccaacatattttaggggtcaacagatagcacaaggaaactaaatttctgtgttcacttctaaataataggtggttgagggtgaaactttaaaaaggtctaatgcagatgttaagaatttcataagttaactaaccctgtaactggtgaaaagggatatgaaaatataaggcaaggatgtttgtggttgatgatctgaatgacaaggaagatgagacgtatgacatcagttggaagagaggagaaacctctcagaaggataggcctttgggcagctctgagacccacggggcactgctgaagcaggaagcacatgtggctgtgggtccttgctcagaccttgtacattgaaggtcctttggctccatgcgtaaggaactatgaactggctgtctcccttgttgctccttaatgctgaaggaaacatgaggaagagggatgcaggagcttccattgtgggcagcactggtcatagtgtttgccagtgtcaaagggttaaccattatcaaggctgttctgtttttctgcctatcttaatgtccagtttttattatcacaactaagcagtgggtgttgctagttcttttattaatacacatactatcatttgtttatttttactttctctaactagtctgtgtcccagcaggagaccttttttttttcgtgtgtgtgtgtgtgtgtgtatgtgtgtatgtgtgatggagcttcgctcttgttgcccaggctggagtgcaatggtgcgatcttggctcactgcaacctccacctcccgggttcaagcaattcttctgcctcagcctcccgagtagctgggattacaggcatgcactaccatgcctggctaattttgtatttttagtagagacggggtttctccatgttggtcaggctggtctcgaactcccgacctcaggtgatccgcctccctcaccctcccaaagtgttgggattataggtgtgagccaccgcacttggccgttcccagcaggagacccgtaagacccaagccttgggtgagaacagggagaaaacacatactagttgtgactagggtactctcatcagacagaaaggtggtgctatttaatctccagaaaggtgcaagcaaggatcagggtatgattctgaccaagggatcacggagaaaatctcttctcttgcctgaatctctccagactgtggcttccttccagtgaggacccctttgatcgatgaattatgcgaaaattaaacccactaaaaatagggtatgatgattattttttctaccaaaaatggttttttaaaaaaatcatcttcctagggctgcattgctgaagtaagttacaggatggggatgtgggaaggaaagaaaggatgttgtatagaaatgtaaaactaaaagttccaggaggcatttccattacaggatcagtcagaagtgaagttaaagtatctcagagaagtgccagaatcaacagcaaatgttatttgacctataagacaattgtttaaagacagtattttcagggagtttatttattatgtaatatgaaatacaccccatgttttatccaagtgttattaaaataccagacaggtaagtgtaagcaccaaaataatgcatttccaaatccaaacagaaaactttctgtttatgtgcatttggggctgtctgtggccttgaatcgatggttcaaggatgactgttaggggcgcagtgcagtgacgcctgcgtggaatgggagcttagccctgggagtctcagattctgtggctttgtgactgcactctcaggacatttctgtgttgcagtgatcccagactccctgcagaccactgccatgccccagactctgcacagagtggagcaggacccgctggagctcacttgtgaggtggcctcagagaccattcagcacagccacctgtctgtggcctggctccggcagaaagttggcgagaagcccgtggaggtcatctccctgagccgagatttcatgcttcactccagcagcgaatatgcccagaggcagagcctgggggaggtgcggctggacaagctggggaggaccaccttccgcctcaccatcttccacctgcagccttctgaccagggcgaattctactgcgaggccgccgagtggatccaggatccggatgggtcgtggtatgctatgacccgaaagcgttccgagggagccgtggtcaacgtccagccaactggtcagtccctctgagcctcttgtcctgtcctttacttggtggtgaaggctgtcagatactgggagaatgtggagactccttctttgggcacctctaccaggacagcaggttttcatgtgaagttaaagccggtcttgtgtgcggctggagggagctgagggatgtgtgggacataggtatcctaagacctgagtcacaggcaggtgccacacagactgagtcctgcttagagacatgctttctttgacctacatggtgtttatacttttttgaattagaaactcattttaaaaattgggagatttctgagaaaccatttgtatcttaaaagtctgggctttcattcccattaggcacagttgctgccccgtttaatgatgttgccttcctcaggtacccatctggtttcatttgcagaagccatttgagataatgagacttccatccaaggtctaacattatgaactagagaaattttggcttaaattattattttttatctaataatagtctttggtgatattttttaatttccaaaatgctttatcacatattacttcaccatcccccagacgttctgtgaggtgagtaggtggtagtactcctattttgcaggtgaagatgctgaatgcagattactttatgttggggctcaagaggagtcatagggcatgttgatgaggccagtctgagagtaccaagttccactgtagatgttttcttaagtgaaggcctggaaggggtcctgaggaggttgcatgatgtctttagagctgaggcaaaatgatggtggcacagccagctgaaaccctccctggcttctcttggtatctcctgtggccccagactctactccccagtctcctgagcccaccaggctccaggccagagctgacagctgttgctggctgcctctgctgggctgagggcaggttctcacatgggccttcagatcccccagctttggttggagcatggttgttgtgccatcactaagttggcgatgagtggcctgaaagcctttccttgtgcggaagctcacttctggtgaggactgtggtggttctggtgagtgagtgtggcttgtgggaaatgacctggtgagttgcagtacaggtggggtccttcgtcaggacctgtctcttgggctccctgttccatttgctgcagtcagttgtctgggtctttgcatactttctctgccattctagagtaatgcttcagactcagctaacagtatacattttggggcttcgtcccagaagtcttcaattggaggctcctgggatgggacctgggaagctggatttccggcacgcttcccaggtgattcttctgctatctacatttttttcaagcaaagcttctagggcagaagcaattctctggacatcactttaataagtcatctaatggatgtgaaatcttttaccgtaggggttggtagggatagggagcactttatctgctctgtaggacatttagcagcttctggatctttcaatattaaaaaatctatccaaggggctttattttatatttatcctttcccttcctggatagttttaagatcaacttcaaaaatttgggccaaattttgagtcttaatgcttttaaattaggttgcatcagttaatcttctttattttaatcttaccaatttggaattagaactttttgaatttaccctgaaaatgtatctagactaagccagcaaaaggaaaactaagtgaaaaaaaagttgatgacttcaccctgcattcctgtgctgtttaggttcagcagttgcatctccaactctacccttcttagtttatttcagtaaacatgtagccagtctccacagcattgaaggtgtgatggtgataggcattaagggcttcaaagatgactagcactggtccctgcacttaggcagacctgagagccaatggacaagtaaaatgtgctaagtgcattgatagcatttgtatagagtgctctgggaataccggaaataggaagtgttcttgcaaccacagttatctctgaatgggatggttgataagacaaatccaggaacaccaataagtttcttgagttgaactgagtctggaagcttgaggagtcagcaggaggagaagcataaaagtgcaaaagtgtttgatatgtttgccaagcagaaaggagtcaagtatgactagttccggatgttgagttccagatgtgtgtgatgagagaggaaagggaccccgaagccccaaatgcagtgatatagagccggggcttgactctgtgagccaagagttttcaagctgttcttggaaccctggaagcccctcaaaggtgcctaggaggttagacatgggtgtgtgttggtgttcatgtgcacgtatgtgcacccaggagtgcagggagaaggcatgcgagggcctgggtggtcccctcttgcttcaactatgttgggcagcagaagattttgtatgaataaaaagtccccttcctttgtcctcttcttaataaagtttgaaaacctctgctgcagacagttggagaggaggtagagatttttaagcagggagtaacacaatcagatcagggtttcagaaagaaaaacccatggaggccacctggaggttgattaaatctgttgagtctgaagccaagagaccaggtagaaaagagctaataagagctaaggctaggtcagtgggtgccagaggcaaaagaataaagagcaagtggaaggaggggtccaactgtctagaagtccaggggctaggactggggctctgggggttccttgaactgtgggagggaaggaacaataatgaggacatgcgggacttttgcatttgtggcagcattggctgccttttgtttttgtaaattctaatgaaagagcccatccatcaggtagactctgatagagatgctcagtatgcgaaacacccagtgggtcctcagacacaggggtctggggctcagagaccgagcctgagagtgatcagggccctggaagagcccatggggtaaaaatgggaaaggacctgggagaacagcagcagtaagaggtgaccagagaagcaggtgagagagtggaacagagtgggcaggccagcaagaagaagagcaggagagaagggatcatggagcaggctcagaggcctcaacctgcttgaggaaagcctttggttaggatgggggtaggggtagggtggatcatttgtgacatttgctaagtcagtgaagcctaatttcagtgagatgaagtggaaggggtattggaaaaagcacaggtcagtttctagagatgtaattgactgggcataaccaagggcagaaacgggggtgatgtgggtaaatcttgtgtcttcaacctgggaacatgaaggtgtcaccaaggcatggggggattcccttgagatgagaagagtctttggccgccgaaagaagaaagccagagttacagccaggctaacctggagcaacggaaaggtctgaggtctagggtaccccttgcacagctccagtggtgtttatgtggaaggagtgcttttctgtcattgatgttgggttataaatgactaactgggttgacctgagagataatatccagcagataacacggggactgtcccatatgggtgtgttcatccaggcagatggtggcagagtgaaatgtgcttccttcaatccatgcctcttaagactggtctcttgggagctagaagctgtgacagcagctacttcattggaggggaggccctggagttgatgatgtggttttccctgtcaggaagtttggctgctagaggaagtagttaggtcactggaaagaaggggtatttgcagcaggacactggcctatatcggggggaggggctggagagcctgaggagcgggaggggtaaagctgagctggggctggaaaagaagaatgtggatgctgcttatgcatgattcttatgttttcttggggaaacagaaacctcatctgcttgaagagtgcctaggacgggatgaatgggcaagatcttgaagatagtgggaaaggctagacatgccagtctagggaaggcaggcaaggtcagagctaatgaatctacatggaattcaaacgtctctgccatgggattttttccacctcggtgttctttttagaggaacagagctagaactgggcagtggtcacagctccagtctctaacccttaactccgttttcttccccctgacttctgccgtgggtgcctatgagatacgatagctgtctaatgagattaatagccactgtacactggtacacaggttgtgatgatgctgttagtggtaatgagcccctctttggtcaccccctcatgcctggttaagcacccaactcaacaaaaattagctggatatggtggctactccggaggctgaggtgggaggatggctggagcctgggaagtcgaggctgcagtgagccacgatcatgccactacactccagcctgggcaacagaacgagaccctgtcacagtaaataagtaaataaataaaaattaaaaaaacacctagatcttaggaggctgcttgggtttagtaatcatttcagaggctgtctggctttcagcagaagtaggtacttttcctactaaagtacctactaagtacttactcagtgggaaagtacctactaaggtttaaccaggcgtgagtacttagtaggtactttcccactaaagtaggtactttcctactaaagtaagtacttagtaggtacttcactgggaaagtacctacttccattgaaatctgactagagatttgatctgacaggtggtaaactagtgaacagacattagtttttattttttctatgtaattctgttagggtttgtcatacctacatcttatttctagtattcacatggcggggggtagagagggaattttaatatagtcatctttgagcatttgttaggattgggccagcacctaggccactctgtaattttttcccacagacctcagtggggtaagtcttacaatatctgctgaaaatgtttataatgctgttgcttaaatagagttctgggtgcatatatcaaggctagatatttgtaatctaccatttgagtgatattagtagcttctcactgacctgggggtctcatctaagacatctaaagcttcagactgagccccattggtcttaactggggtaacagtttgcttagaccgtctgggctgaagtagttttgaattctctctgtgatattcaggcgtttctctggaccttagataacctgggtctgagttggattttactctcaagctaagtgctgtggtcctccccgcagttagtattgtaaagaagaggaaggatagtgggaatgtgctaatgtggtttagttggctggggccctcattcacccaggatgtgtctcttttcttacttgttctctcagacaaagaattcactgttcggctggagacagagaagcggctgcacacggtgggcgagccggtggagttcagatgcatcctggaggctcagaatgttcccgaccgttactttgctgtctcctgggccttcaacagctcgctcatcgccaccatgggtcctaacgctgtgcctgtcctcaacagcgaatttgctcaccgggaagccaggggacagcttaaggtggccaaagagagcgacagtgtctttgtgctgaagatctaccacctccgccaggaagatagcgggaaatacaactgccgggtgactgagcgagagaaaaccgtgaccggggaattcattgataaggagagcaagcgtcccaagaacatccccatcatagtcctccccctcagtaagtagagagatgtgctgctttcttctcctttggctcagcatcatttaggagaggtagggggagagagaatagcgtggtgaaggtgaggggaggcagatggaaccctcgaggttaatgcagagctgggggaaaaaccattgagcctctcttccctgttgtagcccacctgcatacatgtagcaggctccccatagcagaggatcaggatcaggggtgtccagaatcagggcagtctagggctgggcataggcctatctgattgctagcagccctgtgcatacacaagcagtgccagctcagcttggagggaaaccaggaatcccagaaagctgtttgctcttgtgtgggaatcaagtcccagaagaagtgggtagatgcctgccttgaaatctcacttaaggagagttggtcttttatgggaggattttaaatcataaagtgcattattaaggatttgccatctgggtttttcaggtataaaggctggcatttccctaaatggcttttccctgttgaaattgtgtttctaaaagtcggtggatgggacctctcacatcttcctggagcatagccttttaagcttagctgatttctgaggctgcctcagtgggctccccagccttcatgtagactggccttgtgtgggtgggtagtggccattgctagggattccagaaactactggtgtttgcttgtgttgtgtttaaacattcatagtatcaagatattcttattaatctcattctcccatagttctgtttttagtaaagagaataaaaacctataatgctctgattttaaacaagtggtaaagttttaagactaacctttaaccttgtctcagctgctcaaactattctttctctgagccttgtaataatttcctttactttttatttatatgttttaatatttaaaatatttctcttcaagtgtgatatttctcttcaagtagccacagcggtcctcttgtcagtcttttcttcttttctcatcaactggattattttctttttatgcttattattattttgttaaaaaccatgcacacacatacctaattatcttgaaattcttttgtttcttagctttttccgccctgcaatgcctagcatggtgctttgcatagagtaggtgctcgctgaatactgtacaactgaaattattgaattgaatgcccactgtctttactattttcctgtcagtctgtgcttgccttaaccacggactctacttttaaatctgcaactaattcctcattgttttctaaggatcaagtgaagggcagccacgctgtttacttcctatattttttgtactaagatttcccccaaccccttctgagaacttgtttgatgatctgtggcctgctatattgcttttccagcagataactgggtagttaaagtcccccagcaccaccagctcctgtcccaaggccacttgggtaagtctgccgaagaacaacaacaatcacatcggtaatggtgacaatgccttggattttaatggcgcttttcctcctaagagaccaaagtgcttctgcatatatcatctccttctccgctcccacctctcaaatcctcgtagaggccaatatgatatccatctaatgaatgaagaaatcagagcaccacacaggaagtgacagagctgattgttcagttagtggttgagcttgcattgcattaggaaatatttgcttctaactccacacccaccgccctgcgcttagcctgtgctacaccgtcaacttcctgatttgaaatttcatttgtgaatgtgtactcagatttttattagttctgtcctagttttcacttaatccagagagtttaaaattgtcggctgccttttctcaggcctggaaattcttgtaaatagtgttagtgggcagtgaggcaccaggtctgtagttgcctttgcctcagctgctataataaaatagcatttcttcttgtagccccacattctaactatgtgggtttccaggcttgctcaagcaacagacaccaccaaacagtagccctttcaataaatgagccaggacttggataagcgtccactgggatgacagtaggggatgagagtgaggtcctgcaagtcattcttctgcttaatacaagtgaaaggattttcttccttgatgctgcagttgcccttttaatcccttattttgaattgataacagtggggatgagtctttaatctaaagaggaatattgttgttattaatgatgatgaaaaataagtacctcatctgatcctctcaatgtcatgccctaagaagtaggcactattagtatctccattttgcacatgagaaattggagctttggtaggttaaggaagaaccacaggattacagagttaggaagtctccaaatccatccccttaaccattagtgctatagatggtgactgttcaggagcctgatcatctctatgaatcatcctggtatgagtcctgggggaggttgccctcctaggaaaattgctattccctgccccatccagaccttttatttttcacataaaacaagcaaatccagaatggatagcaggcatcctcactataataagagctacatgtggaggctcagtgctcgtctttgtttctgcttgttggggaaataaaggagagaaaagatttgattcaaatgcattgttatgtgtatgtgtgtgttttctcttggtaattgggtgtgcctcttaaaatctgggatttgatttaattaattggtttaaaattattgcatgtatttaatgtgggtggtacccaaaaattggagccaaattagttactttgtgttctttaatacttacagaccttctgaactcaatatagataattatacaaaatactacatgtataattaaaacatattaggctatctgtgatgtttataaaaacaaagagttatgtggaatagtaaaattaatcatgatcatgatgaccagtttttgaaaacctactatgtgttaggtgaatctatatgcatcatctcatttactttttaatatttaaagaattctacagttaaaggtggctctctacctgtcttacagaagaagaggctgaggcatgtcgagtttaaataatttgattgagtgaattcagatagttaagtgagcagcagaggctagatgagacagggaagggagtggaatccttatcccaaacttttgattggccaaatgtttctagaaagagagcaaaggagccccagggctgactggacaggcgggagagtggtggatgacgagctgctggctttgttttgttcctgtgtgttaatgaaagaatgaaagcccgctcctcacacactctgcaaaactagaccatctgtgctcccttattacccacacttaagcacacgttatcgtcccaatacttactgttggtttttttcccagtatttcctaaattgtcctgaaggactcaaatggcacattatggatattcagcttttatttgactgctgtagtaccgaatggtaggaagagtgaagtgaagtaggattttggagttactcttcttgctgaaaattcaacttgaaaaaccctgaactccagctgaatagattacccaataaattgttttatgccctaaacatcatgccactatgttgtatttcttaggttcttattcaggctcaggtcttagaacctcgttatcacagttctctgcacatggcaaagaacatcctagattatcagatctaaaaccacagggagcaaagcccagaaccagccagggcttgcagcaactagggtcagagtgtttttgaccctctgaggctcaccgtacctgaatatgattccatttgcaccccttctcctgtttcctctgtggggagggcgctgtggagaccataaagcctccagggtgtttctctctccctcttcctagagagcagcatctccgtggaggtggccagcaatgccagcgtcatccttgagggcgaggacctgcgcttctcctgcagtgtccgcacggcaggcaggccgcagggtcgcttctctgtcatctggcagcttgtggacaggcagaaccgccgcagcaatatcatgtggctagaccgggatggcaccgtgcagccaggctcgtcctactgggagcgcagcagctttgggggcgtccagatggagcaggtgcagcccaactcgttcagcctgggcatcttcaacagcaggaaggaggacgagggccagtatgaatgccatgtgactgaatgggtgcgggcagtggatggcgagtggcagattgttggggagcgccgggccagcactcccatctccatcacagctcttggtgagtgagcggtgggactggcagtgggtctggcatggagacagcttcagtgtcaaacaccttatcctgacttttctcagtcagagttttagcaggaaactatggccagtcttttacctatagagtttgaagtactttcctttatgtctattttatttcttataagggtttaattaattaagatagtgctagcagggactgagggacccacagtggatgatggggctcctgagggatagcaatagctgggagctgtgactactcctagtctggctgggagagagtgatgttatcagaactctatccaggttagtgaagccacccagccatagtggtggccccaggtggaggagcatggccactgccagcctggccttaaagagagcagagtggctgagcactgtgtggcatgtctttcctgccctgctgcccaggggccagccttcctgaaagagagcagagaagggtataaaatcatctgttgtcatttatttagcatttactatgttcctgcctgatccttaacacttaagcttagttgtcccattgaatccccacctagccaagtgacagacactttcattttatggaggaaactgagactgagacacattaaatactttgcctaaggctagaagtttctactacctgacggggcccatacctaacaaagctattccctcattagcgtggaatgaaaagataccttgagatttgctaaaaccaaggaagattagatttgcttctcatggggtaaagaggcttctatcaacatttatctgcctggatataatcagtctattagattttaaacgaccagtctgtgactttgctgggaaagaaacttgttatatcaggtcttcctgtttatcaggagacatcggttgtcctcagcaactttatgtcccactccctgggactgtgtcaccaccttccttgcaggttgggatggtggtgcttttggatacttccagtaaagatggcagccccaagtggtttttgtccttaacagagtcctccattttcttacccctctgagattagaattacatttattttctaaagcttaatcctaaagattgacctgctttttgcagtaattatacagctcagatttctgtcttagaaacttcctccagtgattgcgtttcctgatcagctcagttcctgtatccatactcagcacctgtgtgaacccagtgagatggaacttgggggacaacttttggatgtccagtactggtgtgttttttttttttttaaccatcctggaaggttaggaatgtccaatgagtgattagagttagtgaggattgtttctctagaagtaatttatgttatcaggttatcccctgagttttttcttactcaccatatgtctggtggttctcacagccaggggcactgaggggctctgccctgggatctggaggccagcactgttcacctgatctccaccactgagatacctctggctagagccataatcaggtggcccaaaggactgaacaaggaagaatgggagggcactctagactaattaaggttgtcttttcagtctaaagttaacaatgacacacatgaattttcatatcagtataattagatgcgggtcccatctaattacagtgggtcattatggctgttcggttagagcagcttgggtgctctgtgaccatggcatgtgcccgtgtcaggactagacaaagtcatttgcttggggaagctctctccccttcaggtgtgaggccaggagcacctggtgtgggtcctgtccctgaggttctgtcctacaccaccctcatgcaacacctactacacacaggtgcacagcgactgtcacaggcgcttcatgtttaaggatgggcctccgtgtcataaacttttttaaagggtatatagagatagcttatgaaatccaaatcaaaggtccagagttttcagcaaattgtacctacctatttgccaacttaacctcaccatagaaagccaaaagattcatcctgtggccagtctttcacattacagagtttaaagtactttttttaaatttctattttatttttaacaaaatatttaacaaaatatagtatatctcatgtgccaggtactatttgtaatatttataaacactgatttatttaatcttcacagagactcattttacagattggaaaacagaggcagagagaagttaagtaactttaatgtcactcagctgggaagtatcaaagtcttggctgctggctccagagtctagacctttaaccactgtgttatgctttccatgggtaaagcaacctaaaaaggcccctggaatcagttacatgtggttggagactaactctgtcattgacttactaaatgcttgatattgggcaatttatctaacctctctctgcatcagtttctacatctgcaggaagagatgacaagcctgcctgttctacaaggttgttttggggattcagtggagcatgatgagagcaaagcagttggcaccatgcttgcacctagatagtgctcaataaatactggctactgttagctttatgattgtgatcaatgtatgaatattaaacagtatttccaggctgaaggagctctgaggtactcatattgaggagtcagtattagggcttagcagtgctgcccattcaataaggaatattgagagacccacagccgctgagcctgcagaaccctgcatttaggataattgtcccaccccactggaggtccccacctgctctgtttttggatttcatgagggacgtgagaaagggactggaggccgactccatctgcttcccttctcggcaccagtgcgctaagggaccaggaaaagtggtgttggggctgtgtggttgtgttttcctcctgtgcaatggaggaaattggctttggggttttcttttcctgttctctcatggaatctcaagatttctaggagcaaccctgcctacatgcaatcagtccctgagaggattgtgatgtctaattccaggggaggagcaaatgcacgaggatctcactgggaagggttaggctagtgctgctcagggggaattgtggtgggcctttctttggagtcttggaaactcttggactgggcctcagcaggatactaaaagcaacactagcctgagagctcaaaaggggctccgagagcctctgtcccacactgcttgctttgccagctgccccattgctgatgtcatactgccctgagaaagccacatgcctcctctggttgaatctctctgctttctctccagaaatgggcttcgcagtcacagccatctcccggacaccgggggtgacctacagcgactcctttgacttgcagtgtatcatcaaaccccactaccctgcctgggtccccgtgtcggtgacatggcggttccagccggtgggcacggtggagttccatgacttggtgaccttcacccgggacggaggggtccagtggggggacaggtcctccagcttccgaacccgaactgccatcgagaaggctgagtccagcaacaacgtccgcctaagcatcagccgagccagtgacacggaagcaggcaagtaccagtgtgtggcagagctgtggcggaagaactacaacaacacctggacgcgactggcggagaggacctccaacctgctggagatcagggtgctgcagccaggtgagtgctgcggacctgtgggctatgtgcctatgctgcctgagcagacgtgagggaaaaagaaaggtgtgcgtggagcccttagcgtcacttccccctttcccagctcttcatttagacacattgcaaatcaataggaagttttaagaatcgtgcagtggacacttgtatttcctttccttgatagccagttgttgtctgacggcatttgttttcttcctctgtgtgtatgtttgttgttgtttttgagccattggagggaaagctgtggacattgggacacttccccctaagtacttcagcatgtaactcctaagaacctacccacccactgcaccatcatcacacccttggggttttacgttagtgtagtcctaccacctacatttccccagttgtcccagtcatgccctttatttttccctttcagattaggatccaaccagggatcacacatcacatttgttatcctgtctctttagactcctttaatctagaacaattccctaacctgtgtgtttgtgtgtgtgtgtgtgtgtgtgtgtgtgtatatgtatgtgtctgtagacatggacatttgtgaaatgcacaggccaattgttttaaagaaagcccttttctttacttaacctcatctcctataatcctcatacaattatgtggaagtgatatcattgtctcctgttcatagacaaggaaattctgagtaaagagggagggtaataggcacctattgagcatcttctttgcatgaggcgctgaaggtcagttactttattagaattgcacaacaaccccaggaaagatttaagtgactagcttaaggtcactaggctccacctagtgaatggtggagccaggatttgaaccccggttgtctttctcccacaatgttgcctgcacccaggccctgtccagttgtatgggccctgaatttgagctcctttctctatggaggctgagtctgtctcaaagcggatcataaggatgcattaatttggggagcattagtcagtggggctttctgcaaacactctcgccttcatcaggctcttcagctgacacgtgggaggagttaagtacatgcagctcttatggttttcctgcatctgtccttgtctcctgccaggttagaagctggtggagggtggagcccaggcagtaggctcccgtgttccttccctcgcccagcccatgcctcggctggaacagacacctgtgcaggcaagggcaagggtttgactttgcaaagatggctggaacgccttgccaaagggatttttctgcccactaacagccatggttagtgcctgacctagtctgcctgactgctttaggtggccacagtgtcgttttcagcaacgtgaggttaaataatggtaacctttgggtttctccttcacctcttctaaccccataacagagttctgttctgtaccagatttggaacaagtgagttgtataaatgacgagactgttcccttggccaatgacagcctaaacttcgactgacaagaggctcagggaagaggctgttttgcttaaatggattttcaggttaatggaaggttaagcagagaccccattttatgtgaacccttgttgtggaaaatgtcgaggtacccacttgcctgcattattgagtgggacattaggattgtaattgcaccttttttttttgtcccctctggctctcaaggtcagttttctgagcagcattgcccatcacatggttctgcagctgtagaaggtagaggagttgctgacctcaagaccttgtctgacattgcctttttgaatacatccctagtatttgcctgtttctggtactacttggaatctaagactggagtgcctaagggaagaatacagaattagttcattgaaggttctaattatttggattagtttatggtgttactaaaggcagacagggaaaaatatgtatgaagtacctcttggatgccaggtttctgcttagtgctttactcatgttttctttttaaatttatccaacaacctaataatgtaggtgtttgtatccctattttgctaatgaggaaaccaaggctcaaagtggttgggaatcttgatggaggcaagccagctggttaagtggcaaaactgagatttgaactgagattggagcccaggtatctctgacttccatagagcaaatgttttcctttataccataattgcctcctgggtaaagtagctggagggttgggagaccccagatctgctctgaggtcgtctttgtgtcttgggtgtcttgagttggtttctgttgtgttttcactgtaaagtgagaatgaacagtggttggcagaggagacttatgagtatcactgtacttgggctgttaagaggcctctacttaaaggtgcacagtaatatacttttatggccctttggaggctaggaagagcaaaggtgggtgcttgaggccgtgcaggactcccagagggcagctgaggcaccaggagagtgcatccccttaagtgttactgtctctcctctattaaatatttatgcatttagcacttaatattttccagagagcttcatatgagtttttactctttcctatatactttggtgctggtgcattcattttggggaaatagaagtggaaaaatacatgagagctgactgtgcgctggagactgttggacacttggtgtatattacctcacttaatcttcactgcaaccctgggaggaacatattgctttcccattttataaatgaagtaacagaggctctgagagattctcacttcctcaaattaaacacctagtgaatgggggaagttgggatttgaatccaggtgtgccttgttaaagagtaattgcggtagggagactttgaccttttaaaggctatgtaatcagagattattctttcagcattcagttaatcgtgtcctttacagaagaattttctccttgtagattgatgatgtggaggagttatagcactagtgttactggtagtaacaacagtagcagctaatattcactgagcatttcttgtaaaccactgtgaatgctttggttcctcgtttcttaatccatgcagtgctgtgagggggaccgttttacccaacttcacagatgaggacactgacacagaagttacataaattgcccagtgtgccatagtaagtggcagagccaggattcaagtccagacaggcagtttggctccagagtccaagttcctaattttattattatatgttctagacaagtgtttttcttctcaggaatcctctttggtactgtatacttgtatttaatgtttcctctctctggttaaccacccctgatttcctaatcccctttagcaaatccttaaatttgttttttggaagttggggtcataagacattggtagaggttcctcaagacacagtttgctgatggtgtagaagttttatcttgtgcctcttttaactcctgattcttccagcttctgccacaaggtggctctaagacttgcggataccagagctccgaaccagcgctgtcctctcttcttttgctctccctgcgtaccttgcccctcaaaacatagattcttagccctgctctggtgtcttccatagaaatgtcccctgctacccccgttttaaagaatattgtgttaaatattcttattccatcagaatcaaataggaacccagggactgttgactcactcatgctggtctgtttaccatcagccttccactgctgtgatatcatttatcgcagcaagcttctttgtggtctgtgccccagactcgtccctgctggagccacctgctgatcctgcccccatatcagtattcatcagaatctctggttggatggcacagttgacttgtggatctgttatttgaccattccctgtgtgtgcttcctgttgcatatgcatatccccaacagaatcttcaaggaatgccatcactgtcaacgttgccattgatctagcttagtctgatccccattgatcacatagtgtgacccctcaaggggtgcttaggcaagactttcagccagttcacatgtttgattattagctcttaatcagttcttttctcttttaattgtgaagcataattgccttgcttccttctgattttctttagctcaaaacaccctccaattacatatccttaaatacagaagcagtaagggaaatgttagcactcattttccaaatgtttatgacaatatcttggtttggctattaaatattgtacattaaaattgacaaagccataaacaagcttccatgaggacagcctctagtggtggaaagccgacttgtcagagggtgtattctgctgggattttactgatgggcagtcaggatgaatatttaataccctctggatgttgccaaatcggttttcttctatttcttattgctgacccggcagattgggatagcagagggcttttctttgacttccatgagtccagagcatgtgaacactggctctcctttcacattctgagggatggctgccccatccctcagaggactggcctctgccttctttcaggggagtctggggttctccttcttccatcccaggtggcttctgcctgttgtctgtgccaagatagaatgggtgtcagtgcaagagccctaagaggagagctcagcccctcccagatccctcaggcctgttgtcatggtaacaccggggcacttgttattggcatcaaggagccagggtcactgccctacctgcagacaggtaaggcagggtagggcacatctgggtaaccttcattagctatttccacctgcagactcttgctgctttccccttgcccctccctccctgtctctctgcatgcattgagcacctactaagtgccaggttgccatgctggtgaggctgctgagatgggtgtgtcacgttcctgccttgcgggctctgtgggaggcagcaggcctagggacaaaggagagcagaaaagcgttacaggtgtggaggcagagccagcacagggcatgaacgggggcagggggcgtgaggagggaatggggtaggggtgagggtgggaggttgggaaggaggagtggagcatttcaggctcagagaagagtgtgaataaatatagtcacggagggtgggagcagcatgcttatcttgagatgactaaagcatggggtctggggagggttcacccccaggcaagctggcagggatcaagaagtcccttttgtacatgggagcatggggtgagggtgggcatatgtaatagctaaaagcaaggacagaccagacggcctgggtttgaattccagctctaccactaagccagctgtgtgaccttgggcaagtgtctttataaaattgggaataatatttatttcataggattggtgaggaccaaatagttaatatttataaagtgcttagaatagtgctgagcacataggaccagatgaaagtttgctaaataaatgagaatatcctaaactcagaaattaggactttagctcatacccagatcatatactccatttttgtaataatttataatgttccctttacccagaaatgaaattcatatacaatataacattcctaatcatatctttaaaatttgctatattgtcctagttgtgggataaagaaagttttttttaaaaaaagtagttcatagtaaaataatgagtttcagtgcgtaaatgctcaggacagctatgctaggaggcacagtcacagtcaacgctgtctctaaatgcacactgacagtcactgtatcagacttggcaccatgagcaggactgccatcctgacagggtttctgaagtcctgagtaactcttgctacaattctgaacaaaacaaaggaaaatcctctcttgactgacctggcatattttaaaaccatgcaaaataaaagtattgtgattatagtaaaacgaaagtaggttctaggcccagaggcataatttttgcccatatgaatgtcattcgaaagtcacacaggacacgaggcagagttttgttgcatggagttgtcccagatacaattttacatctttaatggctttattccattgaatatatacccctccccaaatcaatatggcaaccagagacctgcttgcaattagctgccttattgagaactgctgtcacgggctgtggggtgggcagccgtgggcagtagcatgccccatttgccatttagggaaatcccctggctgtggctaggctgagagggagggagtgtcatatgcaggccaattacaagagcctgagaaagagatcattgagggcccaaatagggaatggtcatgtggagagagcagggagccaaggggtgttaaggacagagggactcaggggtagtaacagtttgactggcaggcgcctgtgccactggcttcccatgcagctcaccctgcattctttccttgtctctcatctgacttgcttctctccacttgaaacatctcctgccgcagccactggccgcctctatctctagcattactgtctgttgtctttaataaagagcagtgtcttcctccctcagtgcccatctctttgcacgtgccactctggctgctgctcacagcactgcacagaaaccaccttctccagacttaccggcaaccacctcagcagcacggctgttgcttctcaaacttgaatgtgcatcagaatcaattggagggctcatgagactgcaggttgctgagccttactcgcagtttttctgacttagcaggggctggcagattcccaggtgatgctgatctgcagatccatggcgtgcaccctgagggccacaggtggtcaggatcaagtacaagctgcaggccccttgcagtgtggccgaagcttacctttctaacctcatccactacacctgagcacttgctcctccttgaatagagtgcacagggtagttgtcatctttttcctcttgtcccctctctctggcgtgccctttgattctccttctctgcttgtttctcagggcctagctcaggggccatataccttttgaaatgttctcttttctatcaaaatcagaattgcccctccttttgaaaagtaaccacatttattcaaccattcattgattagtttaacaatgattgggtcagagtccctgccctgcatatgcttagaattttgtaagaaagagaagattttaagaattaccttcgttgtaaggcagcagtaacacagctatagtagagcgtaagggaatcctttattgaagaaataaatgagttttgagtgagaagagcacgcacagagtggaatccgaagggagggtaggctggctgagaaagctgctgctggtctccgctgcgaagttcttccctcttcctgatgtctcaccttgaaaccaccctatcctggcctgtaacaaacacaacagcctctcctaccatacaaaacacagatcttccaagttttaatcacaagcctgggaaggaaactctccagttgcagaaagaaagggccactccctcaaagcagggcctggcctctgggggctgctgtgaaggcagctgctggcgtgagctggagcaactctcggaccctcttcctgtctcttgctggattctttcttcctcctgccaattcactgttgggggttaaccaagcctcactcttttctttcacgtctgcatttatggcctctcaaagcccattcactcacacggccaagtccagggtttctcaggcttgaagctacttgtgaatcacctggggatcttgttaaagtgcagattctgacttactgggtctggggtggggcctgagagtctgcatttctaacaagctcccagtgctgctggtccgagaacagcactttgagcaggaagattgccacttatgcttgacaactcccattctaagtgttgaactttgaacttgggacaaggcacagaaaccaaaaaggaatgagaatagctaaaattcactgggtgtttgttatatcccaggttctgtgctaaactctttttatagaccattgcttttagtctgcacaaaactcctaatggagatagagacattgttcttattttgcagatgaaaacacctgtggtctctaagtgggcagggctctcctagctctgtggaggaaggtggtgcacgcaagctgtacaccgcccagggcagggctctggcaggacatgggagggctccctaattatatgtggagattccagtctcccctgtgcctcaggaaaggtcctacctgccctggagatgtgggaggaaatccagagcatagaataggagctgaccccttgcccacctgtcagacgtgcaccaaatttaaaaaatgcctctctttcaagcttctcaacacttcacaatattttgacatgggaaggaaaaaaaatggaaatgctttgaaacatttctcttccttgaattcttgttctcagaccatgtgactgaatagaagtttagtcataggattccagtttaacatatgcagttactatagcaattgaggtttccttagtaacagttgcaaaaataatccggccccaattaataatacattttaaagctctttctactccatgctgaacaacccagtttttttggccaagaaccagataattcaggtggtgtcatttgcactgatatagatatcatttgcatgcggtgaattgggttggaaaggaatgaaaagggagccggttgtttcaagtattataggaatccaatctgaaaagtcgactggcaagcgaatgcaaatctagtttccagagcttgggagcttaatggtaaaccctgtcctggattcctagtgtgccctagaggactttctgcatttgaagaagggagaaggcagaagattggacttgctaacaaaaaagatgaacccgggagggtggggccgtggcacacaggatttctctctaagtggtgcctggtgtgttcttgatggcgtgagaaggtctgtgggtttgtgaattcaacaagtcttcctggagagaatgtccgatttactgctgggagatgctccgcagtgttgctcagtcatggcattgggaattggactttgccacaccttggcttgctaaatccttccatccattcagaacatttgtctgtgtgttacagggagaccaagtggcagtctgtggctttcacaagttttggttctgtgatgcatgggactcaatcaacccttgatgctgccaaaccaagcttaagccagctggcaggccagggtcatgaccagtgggctgggtcctgggtctggatgcagttcctggggttgagctggactaaagagacaagagtctgaccagtagagtgctggagcctggccaggcatccctgccctgcccctgcccctgccctccacacaagctcggttggaggaggcctaggttgctgtccctgggtggaatctgcaccttgcccctgctttctttctcagctgggaagtggtttggtccctgtggcggaaaaactaagtgtgaagagagtggtggaggtggaacaattcttgtactattagttccctaagaggaacttagaattgtttttttgttttttttttttcatttttagtagcgggaaaggcttgggtaggggaatgcagagccgaggttaatgatgatggggtgggtgagatctcaaatcaccttcctaagatggatttcattagaccttggcttcttgccactggcaaggtgaacatcgtcattaattagctgctggggaggcgctccacaggctgccctcttgtctgtttttggagcaggacagtgaggagaagggaggattgtagttggctttgccttgtcccgtggtttactgtcttctcagccttctctctcactcccccagaggaagccccctctccccccgcccgcagcatcctctaattacctgttgccgtgtttctccaacgtgctctcattcgctcacccactcgttcacctatttcagcaaacactgatcaaatgctttcctggcccaggtgctgtgctaggctctgggggtgcagcgataagaatgtccgctaggcagtccaccccatgagggctgggactccggcttactcttcagggcatccccagcacttagcatcctgtgggaaaccgagtgggcactccgtaaatactggctgattgagtggaaggagtttgatccctgccctgggggagctcaccatctaggatatgggagagagatgtgaggacacacagcccagagatatatagagggtgctgaggaagggtatggagcccagggggacgggaatgagggataagtggagagaagggtcagggtgggaggtggcagaaggagacaggcagagaggacagcaagggcaaaggccagggctcagggaaactgcaccaggggcatgcgcctgtggagggtgcctgagggtgagtcgtgagagatgagtcaggacacttgggtgaaggccagatcctgaagggactttgtgctgtgaaaaggaattgtttctctctggcccgtaggtagttcagagccattaaacttttcaagcagagacctgatatagctagatttgtatttcagcaggatcacccttggaggccctgtgatggtgggctgtgcaggcagtggataggggagagatggtgaaggcctaagccaggcgcatggcaaggaggagacagggaaggatgtttagcggtggcctgggctccgtgctgccttcctcacactgaagccagtcggtgttaaatcccccaggaactgtgctggaggaaacctggctcagagcctggaggtggatgggccacgtttctgggagtctgtggtgattcctgtgttcccctttcctttgcagtgacaaagctgcaggtgagcaaatcgaagaggaccctcaccctggtggaaaacaagcccattcagttgaactgctcagtcaagtctcagactagccagaactcccactttgcggtgctctggtatgtccacaagccctcggatgccgatggcaagcttatcctgaagaccacccacaactccgcctttgaatacggtacttacgccgaggaggagggcctgagagccaggctccagtttgagaggcatgtgtcggggggcctgttcagcctcaccgtccagagagccgaggtcagcgacagcggcagctactactgccacgtggaggagtggctgctgagccccaactacgcctggtacaagctggcagaggaggtttctgggcgcacagaagtcactgtgaaacagccaggtaaggccgcagggcacggctgtcctgggccagtgggtttagtgcagagactgcctgggggtgggtggggatctgtggggctggtgtggagagactgtctgcaaggtgcatgctgagtatgggtgcaggtacacggaccatcaccctagcacactgcaatcccatccattttacctgcagtgggtcctgatgctgacggcagactcatggaagcatccttgactctgcttctgtggataccatcttcaccaaggagcagggcagctgtggttagcaaaatgtggcaaggcagggttcatggcagctcctgaatcttcttctgggtttgcagtttgcaccctgaatcttgggctgacaccagctccacacccagagttcctacctagaaggcattttctggttttatgcatctgcatcccccttcttccttagctcccagcccgcccagacaagcctttcctatctccaaactgaatcattcctcctctggcccttccttgatcccatggtgtagcccttattcctctccctcacaggtggcactcaacctctgccagaatgcttccagggagggagagctattcagtccgcaagcctcagttccatttttgggcagctctgattgttaaaaagttcactttcctgtaatttccctttttagatctgcccctggaacaaccaaagagaagtctgcgtcatttcctttcaaatacatgaaatgtatgccccttctctgttaaagatctctagtcctttcaacttctcacatagtgtagcctgaagggcctctccacccctcattctcacatccctgcaattcgttgttgtcactgcctgtccttcttgatgggccatggggggtgctgtgttgccacccagagcctcatctccgtgccttcgcttgtgctgccctcattgtctgaaatgtgtttttcctgctgcttctcccttgtcttcactccatccctaagacttcattcagcaccacctccaagaagcctaccctgatttctcccataccagtaggggtcccttctaaaacacatagcctaataatggtttgcatttcttctgtactactctgtaagcatgttgaggacagggctgtgtcttatatcttcagccactggcatggtacttttagtaaatattggttgaataaggaataaatggttgctttccttgatcaccctaaggcctttgtacttattgttctgtcagcctggaacatgttggccatagatattcatttgtcttgctcttccgtgaagggggattcctagctcattttaacttaaatgtagccccctcatcactctagatttcctttccccggccctttcacaacacatatcaccacctgacattctgttaatttacttattcatatataagtaattatgaagtatttacttataattgacttatcagttactatgtcttattatttttatactagaatacatatatatatacacacacacacatttgttttctatctcttctactagaattgaagcctcctgagtaagcatagggacttggttttcttcactattgcttgtctcctaaggaggcctattcagtaagccagtggaacccgataccaaactccacatgtggcctgtgccctgctgaatgcagtgagtctgttcccctcctttgcctgaggttattatatttccagagattctcactggcctctcggtggcattttctgctaacctctgctggtgcattaaacaggaagctctggtctgaagtgattcccattggcattttcggtgacatatgtcctgacttcaggccagtccctggggcttttgaacattgaaggttgtcattaggcccaccagtgttcttttggttcctatttttcatctgttttcagttctgattattttctctactgaaagaacatgatcacccccaccactctgcatttccactctagtcatcaccattttttcctttcctcatttgtactgaaaccaagagattcttggaggatcctaaatttattgaggggatttccctctctgagactacaatcaagctaagtgggacagtgcggaaggactagaaggacccccctcaacacatttagtgaagtctctgttacagtgaactttaacaccgtaaacatggaactcagaggacaccgagtaaaacagctttcctcgtttctttctttgtgttgttttctttcttcttttttctctgcttctagttctttccttttccctgctgagaaagcctacacttacagagcttttggaaaatacatacacacacacacacacaaaaatcccccccaaaaaaacaaaactcaacaaagaaaataacctttcaaccctgagacaaccagagtcaatatcttcttttacatatgtattttttggatggggagggagaaagggagaatggttatttaaaatatattttgttattttatattttctgactttttaattacaaaagtaatcatgaatgttgtaaaacattcaggcagtattgaagtgtgtagaaagtaatgagtgaaagtgcccaacctcccctcctctgatgtcactcagaagtctcattcctgaggtgctattgtgcattcatagtgtcacagcttctagatacctctggtcctgatagactcatttgggcccttgtgaaattacaagcatgccatcggggcatgctgtcattaaagacatttttctactggaggagactctgcttggctgagttttcaaagcacccagttccatcagtagcaatcttttctttttctttttctttttcttttttttgagacagtctcactctgttgcacaggctggagtgtgcaatggcacgatcttagctcactgcaaccttcacctcccgagtagctgggattacaggcgcacaccaccacacctggctaatttttgtatttttagtagagatggggtttcattgtgttggccaggctggtctcaaactcctggcctcaagcgatccacccacctcggcgtcccaaagtgctgggattacaggcgtgagccaccttgtctggcagtcttttctttactgatgtcatatcagttccattcccaacctgagaaggaacctgtgtgggtttttgtaaggatgttggactacaattcgtagggctaacacatgaacagattaaactggctttcccctgcagttcttttgtagttggtggcccagcattttctagccaccatatgatcagttttaaaagtttactcttgcttttcagaggtttctcaccatccccttcccccgcccttcccagccacctgccccggccagcgacatgttttgtggtccgttgtcatttggatgtgcagtctctacagcttgtgcttgtcctcctgtgagcatcagaactgatgagggctacgactttgggacagctgttattgtaacattgagctccttgaaacccaggcattccgacacacgatcaaggaactcagaatgtttagggagccacatctgagaaacgtttctcctaatggagtgtgtgctgccgtccttctgtatttggaaggcatccattcacctaccctgggaaagggtgcgtacgaattgcttgttgtccttttgtcgctgacgtctcttccttactgttccagacagccgcctgaggctcagccaagcccaggggaacctgtcggttctggagacccggcaggtacagctggagtgtgtggttctcaaccgcaccagcataacctcccagctcatggtggaatggtttgtatggaagcccaaccaccctgagcgggagactgtggcccgcttgagccgtgacgccaccttccactatggagagcaggcagccaagaacaatctgaaggggcggctgcatttggagagtccttcccccggcgtgtaccgtctcttcatccagaacgtggctgtgcaggacagcgggacctacagctgccatgtggaggagtggctgcccagccccagtggcatgtggtataagcgggcagaggacaccgctgggcagacagctctgacagtcatgcgaccaggtgagggtccacgtccccaagcttccactccctctggtgtttcccatttaagtatactgttttatgcactggataaaattagtttattaataaattatttgcagttaaatatatgagtgtctacatgtatatgcatttatattcaaaattgcctgaattttttttcttgtgaatggaaaattgcacgtctggctttggcctaaggtgatttgatttcttaaatagaataaaatctggccattaattattccaggtcatagaatatttcctttttccagatttggaacaaagggcagatatgacaaaaatcttgaaacaataaccatgttgttgagaaaattcagcttgtggattttcagtggaaagtaatcgatttacatgctttaaatagaaaacaatgaattgtgtgcagccttcactctgtcacttcccaatacttttttttttttgaaacggagtctcactctgtcacccaggctggagtgcagagtgcagtggtgcgatctcggctcactgcaacctccgcctcccagattcaagtgattctcctgcctcagtctcccaagtagctgggactacaggctcatgccaccacacccggctaatttgtgtatttttagtagagacggggtttcatcatgttggccaagctggtctcgatctcctgacctcgtgacccccaccaccgcctcggcttttcaaagtggtgggattacaggtgtgagctactgtgcctggtcccaataattttattagtactaataactattctgtgtggccttttgtttttcttgtctttattgctgtttctaaatatctaaatgcatgtaattactaggtataattgttgttgcacatttaaacacataatcaaagctacgatgtgcaggattcccatgtcctttgcaacatcacagcatcatccattcatattagaatgaaaagtcgatggttcctgtaaggacctggaggagaagtgaattcgtgaccccatcagtatcttgtttgttttctgagcatcctgacattcacatttgtggccttgggcactactggaagttttcaccatgtcttcatgtctgagtagagcagctcatttcgttggtggaatattgcatctccagggtggtgccaggtctcttatgtcatggaacatgcttcagggaggcactgcagccttggttataggaaatgggcagtatctcactcgcctgtgtcttgcctaaactgcagggaacattgcctccactttgagttaactcctatttttccgtgagcttttacttatttatattttttgctttttaccttgcctagaaatggctgcatgtcttttcccgaaggtgaaattgtagagaatggcagctgagtgcccccactccctcaactccctcccattctgcaggtcagcacactgaggctcccagatggagtgggaggagacagatgtttattgagtacagctacatcccagccacagttaggagacttatgttcagtcttcacaataactctgagtggtaggttttactcatgagggaccaaagcatggagcgaatcaccacccagccagcaggtgcaggcagagtgaccacccaggcttccctcctgccacactgtgtgcttccaacatggacctgaaccgttagccttgtgtctgcctcctgttcaaccctgtgagcaagcctggatcaatctgccttcccgtccctttgtccatctgtccctgattgcataagttgattgtactaattacaaaacattggaaaacagaaaagtataattttgaaaagaaaggttagccataatctcacggcctacaaatatctactattaataatttggtgtatattttttggtctttgcctcatgtcttcatatttcctctgtctgtaaacaaactcaggatcttactgttttatgtgatcttttttcccactcaactttcttttatgagcgttttcccatgtctgtgaaagcatttcatagccaccatttttactggtttcataacattcattgtgcagacgtacttcaaagatttttttcggagggatacgttaaacacatggaagacttgaaataatatagctctaaaagtattgttaggaaaataatcaccttccactgctgagagttgacattcacaataatctgaaatacatggaatgaagggctcccatcctcactaagattgcagatgagtcgattagtagttgtgttgggctcacacaactggggaagggagaaaaccacaatcatcacacacaggccaggaattggcggtcacagtgagatccaggggagctgttagtgtcacgcagacagcaggggcagaggtcggcatctttccatggcttatacttggaaaagaagagagtatttaagtccaaacagggaggagggttggcatattctagaagggggcagattcagggaactaaattggtagagaaacatgttaaggggagagagattgtgggaaggtggaaattaatttctgtcgaaaaacttgtattgagtcatttatgcagacaaggcatttgaaggggccaagaaaaatgttaagcggttagaagacaagaaagcaaagggagattgaagagggaggaggtgtttctgaggagctcaactgatggtctctggccatcttgcccctggccatgataagttccactgcacatcgcccagggccacctcccttgacaccttagccagtcaccaggagcgtggggatactatgttagactctggaggagaaaagcatggggtggggggctccccttggtctctagtagggctctctaatggccttggagttacaactgaggagttgagtgagtttgagttacctgtgaactgattgaatagtccccacccggccatattctgttctcaagcatgttcttgtccctgagagagctgggcctgccacctgtagctggttactgagccctcctgtgccagcagtgcacactgagattccagatgggtgcaggaggtgggtgcagaggggcttggcagagcccccacaagagcaatgggaagcccagccttgtgttaacctgtgagcgacatgttcacctgtgagcgacactaagccaattcattgaaagcccaggacaatacttggaaagtgctcctatttggtcttcatccaagtaggatctgatttggtatctctacttcagtttacattacattggcacctttcatgaacatttcataagcagagccaaagggaggccttttaggagttagggagtgaattatttgtttagaacatattacagtgagccaaaaaaaaaaaaaaaaaaaaaaaaagacagcaaaacagattcaagtctgttggcatctgtgagatgtgactcacctgcttggggtccctctctgtggttactctgtgtctcccgcctaagcagggaggacactttgcgtacatcctcctgagacatctgtgctcacagggaagggccctttcagccttgtcgtctgttatctggctttaatccttggagagatactgatctccttgggttctctgtgttttaggcaataagctacatgcacacagtttaaatttaagttactgcatgggtgttttaaattcccagggctaccataacaaattagtataaacttgattgtttaaaacaaaagaaatttattctcttacagttctgcaggccagaagtccaaagtcaggatgtcatcatagccatgctccccatgaaggctctagggaagaatgcttcctggcctttgccagttccttgtggccacagacattccctggttgtggctgcttcactcctgtttgggcctccatcatcatatggccactttctctctgtcttctctcctgtgctcataaggacactagttatcttagtctgctcagttgccataacaaaatactatagactgggtggcttaaacaacataaatgtattttcctacagtcctagaggctggaagtctgaggtcagggcaccagcatggctaagttctggtaagagctcttctggcccgcagacggcgccttcttgctgtgtccttgaatagtctttcctcggtgcatgcacctggagagagatctctcttcttcttcttataagacaccaatcttactggattagggtctcactcagccttatgacctcatttaactttaattacctcctaaaagtcctacctccaaatgtagtcacatcgtgggttatgaattcagcatattaatttggagggggaccaattcagttcatagcaccagccactggatttagggcccaccccaatccagcaagacctcctctttgctaattacgtctgcaaagttgctatttccaaataatcacattctgaggttccaggtggacatgcattttggagggacactattcagccactacaaggggttacagtgaaaataaacacctcttccccccgggattcccataaggaaccacactaccagcttcttatgaattcttccacagatattttatgcagatataaacagatatgtatgtcaaaataaaatatgttttctgcatacaatgacatggacagtaacattgttctgtactcttaacaatttttcttggatcaacttccacctgtagcactgcctatgccttttcaataggtgcataatatcttatagtatggatgttactatcatgtgtttaatgatggacatttagtttattttgagcaaataaatttaaacaaccccttccctgtttgtcccttgtcattccccagatgcttccctgcaggtggacacagtggtccccaatgccacggtctctgagaaggcagctttccagctggactgtagcatcgtgtcccgctccagccaggactcccgcttcgctgtggcctggtattccctgaggactaaagctggggggaaaaggagcagccctggcctggaagaacaggaagaggaaagggaggaggaggaggaggaggacgacgacgacgacgacgacccaacagagcggacggccctgctgagcgtgggcccagatgctgtctttggcccagagggcagtccttgggagggcaggcttcgcttccagaggctctccccggtgctctaccggctcacagtgctgcaggcaagcccccaagatacaggcaattactcctgccatgtggaggagtggctgcccagccctcagaaggaatggtaccggctgacggaggaggagtcagcccccatcggcatccgtgttctagatacaagtgagtttcccaagtacagagggaggatgtcactgttggttccaactgtgtctggaagataaatttgagcttgattatgggttaataaacagttttcttaactgtcatgggcatttattagtaggatttgagatatggtgggattggacatattagttcatataattgacccttgattacccatgcaaaaatagggatagaaattaaagtgataacataccatataatctttataataaactcgatgttctaccagattcaattttagtaatatttcattatactagtatattgttaggtgttactttgttattttttagaatattggaactagtctttagcgaattagcaagcgtttcagactcacaagggaaagggaaaaaaatgaaggctgactacctcactgtcattatttctttttgtccagtttctgcgttattgttattttggagggtgccttggaggttgaggtggatcttgtatggttgggaggaccagcctagaagggctgtgatattagaggagagctgagaggggatggatttgcagctgcccagaatgcagtttccatgatcctgagggacttccactatgaacagagactgggggaagtattgctggcctgaattatttgttgtaacaatgcactcttggttggcttgccatcaaaatgtggactacattagactaaaaatggtgttatagtagaattagcctagaatacagaaagaaaaaaaagattgctggaatttttaacttctttttagtcaaaacatttttcaacatcatcttgatttgagtttttaaagtttgggccactatttttttgccttgatcaccccgtgctcacattgtgttagaaccatatgaaattggagttttgcaggtcaacaatggtggactatcagcagtttcatacactttggaaattgaataacaggcagattaaatgttcttaataatactgatgagcaacagctattcagtaaaagggaaagcaggctgcatcatacatagaccaccctgtgatccactgaataacccactgcctcaaagcgaaaacaaagcagtctaggcaacattttacctgtccattgtggatgtccctaattattaagcttcatcgagcacagaggtcacccagcagccttattttacagagaaaacaggggctcccagaggctaggctcctgccaaggtctaatgacttatagagcagccctcaacctgtcttggggcgcctggtttattctcttccatatccagctataactaatactgtgttctttgtggccacggacacactgtggacgtttgtaagtggtccataatgacatttaattgataacattaatcaggtaagtgtcatttctggtaaaactgctctcagaagctggcaggaagggattgtgtcataatcccagagaaggaagtctgtagcagaactaagtgcaaaggggcatgtaaaatccaaccatgcaggaggctccgactgaaccagagcagcttcttcaccattctagatgcagttgagttcacaatcaataaattatgtttcattatgtggctttccaagcagcaataatggctctcaatggaaaacagaagcattgctttgttggaacatacagccgtaaattaggagaggtgttgcgagaaaaagaatataagggtcatcttccaccattaatggtagcaggggaaagacaaggtggtgtgggagtgtcaccgaggagcttccactgggtcaggtgaggtcttcaaaaggaaatgtgagcagtccaggttctcagccctcattgtcttgtctctctcatgattcttttcaggtcccaccctccagtccatcatctgctccaacgacgcactcttctacttcgtcttcttctaccctttccccatctttggcattcttatcatcaccatccttctggtgcgtttcaagagccggaactccagcaagaactctgatgggaagaatggggtgcctctgctgtggatcaaagagccacacctcaactactcccctacttgcctggagccccctgttctcagtatccatccaggggccatagactaagcgggtgatgccccagcggatgttggccacggaggagctgaggctctccctttctctgtgattggacagttgacagcacccaaactctggggtgcatgtgtgtggaaagttgtcagacttgaaaagtgttccaagttcccagtcagtcacagagacagactgcctctcggtggcagtcttggttggttagctatttgcgcgcaaatgttgtgatcctgccattatagatttcttgtttctgtttttagtaatgtagtgagtagctccaggtgccacatctactcacagatttatctagtattctcagatagatgttacagggcttcttattctttgtaatgtactctttttaaatccctttagtttaccctttttggattccttaatgtggacgaatttctcttacgtacaactgacagcaaaaggaagggcgaactttctagtgacaaggaatctcttccaagactttgtttttgcacatttgaaaatgccacccatggatcaaaatatacccaaacgttttttactttcttaacaagacttaagaattgtgtgtagtgtgggcaaaatttgtatgttgtcttttccctcagctggagttattggaaccactttgtagtcaagacgaaagcactgaattttgcttcaaagaactgtgtatgtacaagagaaatcctgcataaccccattaggagtagatggtgcccggcctatctgtcagggaggcaaaaaaggcttcatcccatccttgccaaaaaataagaaaactgtcttggagaatgggtcagaagccccaaacggcacacactttccaaattaaagtgggcaggggctgcttttagcagctgctgacctgcagatttgtcaaagccagtgactagagaaggaagggagaaaggctggctgttggcttgctctgagctgcaaggatggtctctaactgattaactgtgagcaggtgggcctgtgtcttcaggtgctttgccaaactcttaaaagaaagtgtccagtgaacttggaagtgggcccctgagctgagcacagggccaaagcagccatggcagacacctgacggagggcacggggctggctgacactaagtttggtgggacagtgaggggtgggaggggggtttccagggcctggtgttggagagtgcagagaaatatctacctccctggaggtgtgaagactaggtttttcttcttccttccaattagattttccttaattatagtgatgtcttccttattcatttttctctccctgcctctcactgccataagaatatcagcctgggggcagtccagacgcagccctttgtcatcctttctgtttgcctagtctcagcagactgtgatcacaaggcattgtctgtgggatttttcctttccctttcttgatctctcttgtggttctaggttgtttggttgttcattgttatggtggctttttattttaacgccccttgagccccatgatggctggtgtcaccctgttcttttacactgttgggccaggtgctgcttgtccttcttagggcatcatcaattgcaaatatttccttttgctccctttatgaagatgttcttatacccttgctttcccatatttttctggccaagcatgccatctcctttactctgggaacttacatcctgaatcccaagagggggtcacagtttggaaaaagtcatcagggattctggaactaagtctgataaaagattccagtgaagccctgttctgagaacgagcagactgcaggggaggccatgggattccccaggccagtgtctgtgctgatccttcaagggtctgcaggtatgcaggtggcctgggctgctcggcagatactttgctgattcccagctgaggggagcatggtggcgattgctcagccattttctgacagacacacagacctgccttttctcccccaagtataccgtaccctcctgtgagacagtgtgtgcaggcaccaccaccttaatcctgctgttgcctgacatgctgattctcatttattatgctgcatcaacacattagaggtacaggagcggctcagtcatgaaaaaagaaggtcttttgccccatttctttatttcagagatgtgggctttcagtgggaatttgctgactcctactttataggctgagtcaatgagggaagatgactggcgtttcctctgtctaaatgggaggttgccagagcgctggctgggactaggatgtgtaactaagatttcagtttgaaatcttagatttcagttcacggcgataaagaagtaggtgctgcacacaaatatgtaaagcaattgtaggaaatttgaaaggaaaaaaagaaaccgaagccagtattttaataattgctttttctgtgtattttgtattgggctgggggatagcatcaaaggttgaactttttgagctttctatgaaaaaccccaggaccttctttctttggccatttctatggaaatgcgatgtcagatggatggtaatggtgccctccagtggctgtgagacctcattgcgcattgtctactggagctttagtcttctgagacggaggaaaactgctgaatactctggattcatctatgtctacaatgttgcatttatgaaaaactacactgtgctaggcgcattctaggacatgaatatgaccacaccctctttcaccgggtgtttctgtagcaagttttcatattcttttcaaacaatggtttctctgcgttaattattgaggaaaaaaaaagatggggtaagaaaactacccatgcatgatgtagagagctgttgatttgtttctgtttttttaaaggaaaactatttgtaagatgttgcactaaaacattttatatacacttcagagacctgtagtaaattatgttgaaaatacggctgtttacatttactgcagtcttctatccttctttccccttactaaccagcccccttcctctgtggaactgtgctgtgggagcctacagttctgcccttggcattggcctgctaggctcaaggtctgtgaattgcagtctttattattacaccccataaccttcaaatgataaaaacacctcttcctcaagacacttcactgccatctgctgcaacatatagtaaatagacacctccaccccgatgatcaaggctatgctacctctagagctgtgcaacacacaacacacctagcccctgaaagccaggttcagaatgtagatcttataacctgtagcgtttttgttggggggtggggtgggggtagaagccggatgagaaggagagcaggaacacaggatggccttctctagggcctctgcggcaagtccacaccatccttttccaactatgaagtgctgccctggccatgaaatgcagcggggatttcccagaatggtgataaaagcaggagttgtgcattctagttaagtgagactgcacagcgcactggtctctgtttcctcttccagtgttgggaggggtttacatctgcaaattgagaagaatgttagaatgattaaaaccatagcagtgatacgtgattagtcagaacccatctataattctttaaaattcatagaatatgcaaaaaggaactagatagtaagaagcagagggagacacttctttttttcttctttttctaaatccaagactttcaaaagctttcgtgtgtgctttcctctgctcccagaaccattggctgcatccttatcaactccttgcagctgctggcttggccaggagttgaaaatgtgactgcctctcccttgggtacccataatggttccatgttaagtcttatgtataatttttcctaatttttttctaatgttctttttctgccagggtatgttttaaaaagggaaatagagtattatggaataagattacccttctatgtccttcgtgcaaatccaaccagtatttatataaatgaatgtatgttccctcatgaggcatgcaatgaaaatgacaatttgcatttatgcaggattgagcagtgttttgctcactacattctgggattcctaagctttgtgggagtagttccaaaggtttggcagaaacgagagtcaagacaccagagagtggcatgctaggaagaacagccccggcctcttcagctgccctcttttcttactttctcatccatgattatctacagtgacaagaagataaaactggaccttgcaatactagtcacagcatgaaaaatacatccacccctccttttgatagcaggttctcagtatgtaaagggaatctttttggctgcctgcttaacgcattgcaggtccagcattcctgagctgcttttgattcataaaattaaccaggcatttgagggcttctaaaagtgcttgatggacagcatttctctcaatgaaagagcaggcactgctccttggtcaaaggagagtccaaccaaggaagcctaatgagttattcctcacccaatacctggagaccatgacctgggggtgaggggcttccccagccccatgtgactgggctgttctttcctcagccctgctcttaaggggcttaacagctcttgctggcagtccaaatggctgcatagctgtcagtccaaaagtcccattatcatatcccgttcctgtatgaagggataagagtagaggcattggacatggcctcagctggactccaagttctgccctttactgtgtgccctgagtaatttaccttccccaggcatcagtttcctcatttgcaaaaacaacagcagcagtaagactaagttaatccaagcaatgcacttcacacagggcctgctcaatagatgtttgctgtcatatcacttcccagctcaaaaactttctgtggctccccagtgtctgaaggtctaaccccatcctgcctttctaagttggcctgagttcctaccagcccagggcagagaacacttgatttcctcatattttatgttacacactgcccctgccttgtgttcccagtatctacagatggtagggaatatctcgagatagcaggtttgtggtagagggcattggtcccagaagtttcactgatagagataccttttaagattttatggctaacttaagaaataattcatgtctctttgcaatatggttcaagtgtcttgagtgacttcgagtccccacctggggataatggaggtgaagcagcaagaaagcacattcccactcagtttcacaacctgcaccatgtatgtgttggtggttatttgggcagcagggagtcctgttcatggaaatggattcctgctcacataataactaagagttctgtgaactccctcagctgggcaggggcaactctggtgcttctgtctgcaagaaaggggacagacagggaggctgatgtgaggagctggttctgggaatagggtcatttgttctgggatatagggatgtgaggggagggccagctcaatccagactgatgaagagcggggagagtgatgagtgcctgcctcagcttgggctggatggatgtggggaggctgggcagtgagggagatgtggatctgacatctcagcctgagggaaagtcccggttgagatgggggaagacagaaaaagaggaatctgagaagggagaaaccaaaggctggaaatcccagctccggggataagggagtatggggacgggggaggcctgcctcaggtaaccctacgcctaacagttgtctaaaatgctccctttccttgtcatgtttgaggaaaagtggttcaaagaggccgtctgatgcgggatcacacagcgctgaagggatgaggggccccgggtgctcccgcccgtcctgctgcctcctccggtggctctctgggagccacagccccgtctagccacggaggggcctacagcacgccccaaacgctaaggggaagcgcgggaggtgcggtaggaaggcagagaaacctggtttttaaaaccaagccattttcaaggaaagaatttcttactttaaaaccttggtttttaaaaccaagccattttcaaggaaagaatttcttacttaaaaatagcgtatggaatggcggcggaatgacgggagggaccgagctgggggactggacggcgccccggggacacaggaaggaggcgcgcagagccgaggccagaggcgcgcccggggagtggaagcgcgaagacaaacgcggcgccgcggagggtgggggaggaagggccggggcgggccgccggctgccagcccagggcggggcggagccctacttctggccgaccgcgtaggcggtgcttgaacttagggctgcttgtggctgggcactcgcgcagaggccggcccgacgagccatggttgctgggagcgacgcggggcgggccctgggggtcctcagcgtggtctgcctgctgcactgctttggtgagtgaagcctgccccaggggccccgcgccggccggcgggtactgggcagcacccaggctgggtggacgcgccgggctcgaggcggttgccgatcagagacgggtggggacgggtcgctgtgggccgggaacaactcagccgtgggagccttttcaggaagagaaagttgttatttcatcgccagtgtccctcatggagtcagcaaggaactgtgtggccttagggaaggacgggctccggcccgctagcctctcctgcggggcctgcgcccccccgccggccccctcccgagctccagtgaccaagttccttcctgggcttccccagtaacgtcgctgagcgcttcagcggactgcaaaatttttcccagccgtgaacgcgcccgggacggggagcgggcgcggatgccacctgctcgagggcgacgcctgctgccctccccgcgcggtgccgtccccgcccgcgcggcgtccgccgtatcagcagagaggacttttcagaatcgccccacagcgaggagcgggtaggcaactaggaagcccagtcggcagcggcctcacgttgggattcctaagtggtgcgactcctgctcctttttcctcccctcaaatcctaaaaactagtatcagaactggttccatcctctccgtgtgttgtcagccaagtcgtcacaacaacctcaggaaataggtccccttcttcccattttgcctccccatcctccttcaccctccacacattggccccagtcaggccatagcaaaaccccgggagtacagcagtaacctcccagcgagttcaactgtacttgaggggttctcatggctggctcctgcaccccactgccagccctccagcccgtccgtccgtttgctcagcgtccgctgcctgcccgggaggtgcgcgtgtgcatctatggaagacagccaagggggaggggttgagatagactcaaaagtacccgcacgatcagataagtcagtgttgtaagaggcctgggctgggcgtggtggcttacacctgtcatcctagcactttgggaggctgaggcaggtggatcacttgaggccaggaatcggagaccagcagggccaacacggtgaaagatcggctctacaaaaaatacaaaaattagctgagcgtggtggcgcatacctatagtcccagctactcggaaggctgaggtgggagaatcacctgagtcccggaggcagaggatgcagtgagctgtgattgtgccactgaactccagcctgggtgacagaatatgacctgtctcaaaaaaaaaaaaaaaaaaaaaaggtgagctgtgagggtacagagggaagaagaaggcagtctcttttgtgaaatcaagtgtcttttgtgaagcagtcttcatgggagggaggatatttgagcccagccttcaaggactggtgatgtgtggacatgtgataatgtgggaaaagattgctgagtgtccccttagggagtctggattctctgagctgagagagcttctcctgggccttacaggatcaggaccatgcgcctgggaagaagaatctgttagcaacaaagaggaaggctgcagtcaggaggaattggaggcagggaggccagaaggccagggtggactaccatcacagggcccaaatagctctggggagttcatgtgcgggtggctggggaaaagaagagatacaaacagggattaattgaatggatggggtaactctcctccaggcaagctggtccctcattccctggcaccttgggtcactgctgcctgtacctgtgttctcccttccactgcaaacccagtttgcccaagctccacctccaacagattatttgaactgtcccttcctggtgatctctctcacctaattcatgtattcattcagaagtcatttgattcagcaaacatgtatttataaactgctctgcataggccttaaactaaagacaagactgaatgggtatatccccttttggggacccaagcctgcctcattagggaagctgcaaatgcagtgattaacagcatcagctctggggtcagatgcctagctttggatcctggccccactcctcacctgagtcatgaacttgtgtgagttccctaacttctcttcacttcagtaccttcacttttgaagagagtaccactcacatgagggaaaggagaataataaacccacttcatagaattactgggaacatcagtcatgcaataaatatttactgagtgtcaattatatgttaagcactgcacaatggacgggggatacagcaagctatgcacagttccctgcctttgtgaagctcaccttatagtgagggagagagacagtaagtaaatgagtaaaaacatggatgctggatggtgataaagtaaacatttactagtacagagatgagtaaagcaaagaaaggggtgatggaagtcgttaatacttcagtttagggttttttttgaaattttagaacaattaaaatctttaggacagttgcaaaattagtacagtgaacatttgcgtactttctccttgaatcaccagttaactgtcacattagttttctttgttatttttgccatctgttatttttgccaaaccatttgagagtttcagatctcatgacacctcacctgtaattctttatcatatgtctcataagaacaagagcattctccaacaagtcacagaatcatcataatctggaaatgtggcattgatacaatactgtttcctggtagagaacccagaagccagtcctgcaccacatacttcatttgataatcatgcctttttaaccccctttaacctaaaactgttgcttttttttttttttttttttggtactttaagacatcatcatttttgaagtgtctgggctagttgctttaccgaatgtccctttggatgtggattgcctgcttgtttcctcatgatcagattctggttgtaactctttgtagcaggaatacttcatagctatgttgggtccttctcagtgtgtcacatcaggaagatgtggtctgtttgtcacattattggagatgttaactttgacatttggttaaagtgaagtttaccagatttctccattgtagaggcaccattttacctttgtaagtaataaatgatgtgttaagtgatgttttgaggttgagtgaatatcctgttctccagccattgttcattcagtggttttagtatcctatggtgattcttcccagaatccattatcactaaaatattttattttattttttgagacagggtctcactgtgtcacccaggctggagtacaggggtgctatcacagctaactccagcctcgacctctgaggctcaagcaattctgccacctcagccttctgagtagccaggactacaggtgcatgccaccatgcttggctaatttttttttagtttttgtagaaacagggtttccctatgttgcccagactggtcttaaactcctgggctcaagtgatcctccctccttggcctaccgaagtgttgggattacaggcatgaaccaccacatccagccactaaaatattttcaaatggtaattttcttcccccacccttgtccctttcttctccctccctcccttccttccatccttcctctctcccctcccctccctccctcccctcccctccctttccctcccctccccctcccttcctgtcccttcccttcccttcccttcccttcccttctttccttctttgtttcattgccttttctcttttcttttgagacacagtctcactctgttgcccaggctagagtatagtgacacaattatggctcactgcagccttgatctcccagactcaagcgatcctcccacctcagtttccaaatagctgggactacagggacatgccttcacgtccacctaatttttttgtattttttatagagacggggttttgccatgttgcccaggctggtcttgaactcctgggctcaagcaatcctcccaagtcagtttcccaaagtgtcgggattataggcatgagccacccagcaattttctcttctgtttctctctatatatatatttattagtttacattgttcagtaatggatagcttttgcacacacatcctccctttttttcttttattttagaaggttatgtggactcatggattcttttttaaatatggcattcctgtcatccattttgatgctcggcaaccccacatttgacaagtgggaacaccttcaagcttcagagtccttttgctctgtttgttcctgtttgattttaaacacttccttactttctggcacagaaagatgttctggactcatcttgtagtgttcctgcctcagccttcgaatcattaggttccctggtttcttttagtgagagatggtatttagaaatcaagttctgggtgcaaagtgtgcccacaggtaccagagtcattgcttctcagccttgtcagttttcaaagttaagaaatagagtttttacaaagtcaggagttcaccctgatacttctaacactaataatcttgctgcttagttcttctgcctcttctgctcttccatatttgcatctccttactcccacagtgagaactctgttcttagtagcatcagtatattttcctaatctacattaaaccccaaatcattttacagttgctataccaatctactaccaactacaaacttactaaatacagttaaagatttctttacagttccttttatttttcattacagtctccaacttagcaatggttcgacttaagatttttcaactctacaatgagtttttcaagatataactccataataagaaatatctgtatatcccagtgaatatgcaatactatattcaaaagttacttggattctggccgggtgcagtgactcatgactgtaatcccagcactttgggaggccaaggcgggcggatcacaaggtcaggagattgagaccatcctggctaacgcagtgaaaccctgtctctactaaaacaaaaaattagctgggcatggtggcacacgcctgtaattccagctacctaggaggctgaggcaggagaatggcctgaaccaggaggcagagactgcagtgagccaagattacaacactgcactccagcctgggtgacggagtgagactctgtctcaaaaaaaaaaaacaaaaaaacaaaacaaaacaaaaaaaagttatttggattcttttttttttttctaactacccttcttaaacaaggtaacactctatgtatttttttgtatctcatttttgtcacttaaccatacatctggaaaatcattccctatcacttcatagagatccacctcattctttttcacagctgtacagtccctcatagggtggctatatggtagttcattcagctaccctctgctggttagtattacatagtgtggtcagggagggtctctttaatagggtgacaattgatcatacacttaaggaagtgagagataggccacaaggctatctgggggagtgatattccaggtctactactcaggaccctgagataggcttcaagcgtttaagaaacttcaaggataccattgtggtggagagtggtagaaaatgaagttataaaagtagtcagggttggatcctgtagataaagtttttagggccttttaaatattttggcctttttgctttcagtgactggaaagttttgaaggattttgaacaggagtgaaattatgatgacttggatgtttaaaagaattattctggctgctggatgaatagtctgtagaggagagaaaaggaagagcagggaggttggttaggctgcaggggcaatgcaggaaaggaatcactgggggtgggagatatctggatgtgttttgaaggtggagctggcaggatttggtgtgggcttgcattagtggaatgacatgtggatagggcctggatagtgctgggcaagtagcaagaactcaaaagtatgaacttggctgagagtggtggtgcatgcctgtaatcctagcactgagaggctgaggtgggcagatcttttgagcccaggagttcgagaccatcctaagcaacatgctgaaaccccatgatatggtttggctctgtgttcccacccaaatcttacgttgaattgtaataatccccatatgtcaagggcagggctaggtggagataattgaatcataagggcagtttcccccatactgttctcagatagtgaataagtctcacaatatttgatgattttataaatggggattcccctgcacaagctctctcttgcctactgccatgtaagatgtgccttacttctcctttgcattctgccatgattgtggggcctccctggccaggtggaactgtgagttcattgaacttctttcctttataaattacccagtcttgggtatgtctttattagcagcatgagaatggactaatatagtaaattggtactgggtagtggggcactgctgcaaagatacctgaaaatgtggaagcaactttggaactgggtaacaggcagggattggaatagtttggaagactcagaagaagacaggaagatgtgggaaagtttggaacttcctagagacttgttgaatggctttgaccaaatgctgctcatctcagatggagatgaggaacaattgttgggaactggaataaaggtgactcttaatat

SEQ ID NO: 19 - DNA, 7400 bp, Homo sapiens
gcggcgcgtcccctgaggcgtgcgcctggatggactgaaggacggtccgacgcgcgcggagggagagggccaggggcgagaaatctgctcgcgctggggtaccgcttcagggctgccgaacgccaacttgcttcgtgtgccctaggcaggcgtggggcaggtggcgcctccgtgacctaccaccatggatggaaacggactttttggtgaagaaacccaaacggttgatgccaggcagggtgatttggccgtcaaaggttttgacgaaacctgccctgttctctctggggaatccgaatgagggagatcacagacaccttcactgagaagccaaggacatttctgtataatcagtggatgaaaggattttctcagacccttttttccgtgcttctggaggattaatccactacagtctgcaatttcagtggaaactgcaaggcacacgatgtggcaggagccgggagcgacttccgaattgttgtggacccttcctgtagcataggggagttttcacacttgcctccactcctccccttccccccaactccctccttctgatctcttctttttaatctgttcccattttccgagttaagttctatttccaaaactgttctctggagctataagtggattgccagaaatgagagattaggagctgggagaagaggaagcgccttgtgttgtgtctcctggaggctgccgacatgaagtgctttttcccggtgctgagctgtctggctgtgctgggtgtggtgtcagcacagcggcaggtcaccgttcaggaaggacccttgtaccgcacggagggctcccacatcactatctggtgcaatgtgagtggctaccagggaccttctgagcagaatttccagtggtccatttacctgccttcgtcgccagagcgagaggtgcagatcgtcagcaccatggactcttccttcccctatgccatctacacccagcgcgtccgcggagggaagatcttcatagaaagagtccaggggaactcaaccctattgcacatcacagatcttcaggcccgggatgccggggagtatgaatgccacacacccagcactgataagcaatactttgggagttacagtgcaaagatgaacctagtggtgatcccagactccctgcagaccactgccatgccccagactctgcacagagtggagcaggacccgctggagctcacttgtgaggtggcctcagagaccattcagcacagccacctgtctgtggcctggctccggcagaaagttggcgagaagcccgtggaggtcatctccctgagccgagatttcatgcttcactccagcagcgaatatgcccagaggcagagcctgggggaggtgcggctggacaagctggggaggaccaccttccgcctcaccatcttccacctgcagccttctgaccagggcgaattctactgcgaggccgccgagtggatccaggatccggatgggtcgtggtatgctatgacccgaaagcgttccgagggagccgtggtcaacgtccagccaactgacaaagaattcactgttcggctggagacagagaagcggctgcacacggtgggcgagccggtggagttcagatgcatcctggaggctcagaatgttcccgaccgttactttgctgtctcctgggccttcaacagctcgctcatcgccaccatgggtcctaacgctgtgcctgtcctcaacagcgaatttgctcaccgggaagccaggggacagcttaaggtggccaaagagagcgacagtgtctttgtgctgaagatctaccacctccgccaggaagatagcgggaaatacaactgccgggtgactgagcgagagaaaaccgtgaccggggaattcattgataaggagagcaagcgtcccaagaacatccccatcatagtcctccccctcaagagcagcatctccgtggaggtggccagcaatgccagcgtcatccttgagggcgaggacctgcgcttctcctgcagtgtccgcacggcaggcaggccgcagggtcgcttctctgtcatctggcagcttgtggacaggcagaaccgccgcagcaatatcatgtggctagaccgggatggcaccgtgcagccaggctcgtcctactgggagcgcagcagctttgggggcgtccagatggagcaggtgcagcccaactcgttcagcctgggcatcttcaacagcaggaaggaggacgagggccagtatgaatgccatgtgactgaatgggtgcgggcagtggatggcgagtggcagattgttggggagcgccgggccagcactcccatctccatcacagctcttgaaatgggcttcgcagtcacagccatctcccggacaccgggggtgacctacagcgactcctttgacttgcagtgtatcatcaaaccccactaccctgcctgggtccccgtgtcggtgacatggcggttccagccggtgggcacggtggagttccatgacttggtgaccttcacccgggacggaggggtccagtggggggacaggtcctccagcttccgaacccgaactgccatcgagaaggctgagtccagcaacaacgtccgcctaagcatcagccgagccagtgacacggaagcaggcaagtaccagtgtgtggcagagctgtggcggaagaactacaacaacacctggacgcgactggcggagaggacctccaacctgctggagatcagggtgctgcagccagtgacaaagctgcaggtgagcaaatcgaagaggaccctcaccctggtggaaaacaagcccattcagttgaactgctcagtcaagtctcagactagccagaactcccactttgcggtgctctggtatgtccacaagccctcggatgccgatggcaagcttatcctgaagaccacccacaactccgcctttgaatacggtacttacgccgaggaggagggcctgagagccaggctccagtttgagaggcatgtgtcggggggcctgttcagcctcaccgtccagagagccgaggtcagcgacagcggcagctactactgccacgtggaggagtggctgctgagccccaactacgcctggtacaagctggcagaggaggtttctgggcgcacagaagtcactgtgaaacagccagacagccgcctgaggctcagccaagcccaggggaacctgtcggttctggagacccggcaggtacagctggagtgtgtggttctcaaccgcaccagcataacctcccagctcatggtggaatggtttgtatggaagcccaaccaccctgagcgggagactgtggcccgcttgagccgtgacgccaccttccactatggagagcaggcagccaagaacaatctgaaggggcggctgcatttggagagtccttcccccggcgtgtaccgtctcttcatccagaacgtggctgtgcaggacagcgggacctacagctgccatgtggaggagtggctgcccagccccagtggcatgtggtataagcgggcagaggacaccgctgggcagacagctctgacagtcatgcgaccagatgcttccctgcaggtggacacagtggtccccaatgccacggtctctgagaaggcagctttccagctggactgtagcatcgtgtcccgctccagccaggactcccgcttcgctgtggcctggtattccctgaggactaaagctggggggaaaaggagcagccctggcctggaagaacaggaagaggaaagggaggaggaggaggaggaggacgacgacgacgacgacgacccaacagagcggacggccctgctgagcgtgggcccagatgctgtctttggcccagagggcagtccttgggagggcaggcttcgcttccagaggctctccccggtgctctaccggctcacagtgctgcaggcaagcccccaagatacaggcaattactcctgccatgtggaggagtggctgcccagccctcagaaggaatggtaccggctgacggaggaggagtcagcccccatcggcatccgtgttctagatacaagtcccaccctccagtccatcatctgctccaacgacgcactcttctacttcgtcttcttctaccctttccccatctttggcattcttatcatcaccatccttctggtgcgtttcaagagccggaactccagcaagaactctgatgggaagaatggggtgcctctgctgtggatcaaagagccacacctcaactactcccctacttgcctggagccccctgttctcagtatccatccaggggccatagactaagcgggtgatgccccagcggatgttggccacggaggagctgaggctctccctttctctgtgattggacagttgacagcacccaaactctggggtgcatgtgtgtggaaagttgtcagacttgaaaagtgttccaagttcccagtcagtcacagagacagactgcctctcggtggcagtcttggttggttagctatttgcgcgcaaatgttgtgatcctgccattatagatttcttgtttctgtttttagtaatgtagtgagtagctccaggtgccacatctactcacagatttatctagtattctcagatagatgttacagggcttcttattctttgtaatgtactctttttaaatccctttagtttaccctttttggattccttaatgtggacgaatttctcttacgtacaactgacagcaaaaggaagggcgaactttctagtgacaaggaatctcttccaagactttgtttttgcacatttgaaaatgccacccatggatcaaaatatacccaaacgttttttactttcttaacaagacttaagaattgtgtgtagtgtgggcaaaatttgtatgttgtcttttccctcagctggagttattggaaccactttgtagtcaagacgaaagcactgaattttgcttcaaagaactgtgtatgtacaagagaaatcctgcataaccccattaggagtagatggtgcccggcctatctgtcagggaggcaaaaaaggcttcatcccatccttgccaaaaaataagaaaactgtcttggagaatgggtcagaagccccaaacggcacacactttccaaattaaagtgggcaggggctgcttttagcagctgctgacctgcagatttgtcaaagccagtgactagagaaggaagggagaaaggctggctgttggcttgctctgagctgcaaggatggtctctaactgattaactgtgagcaggtgggcctgtgtcttcaggtgctttgccaaactcttaaaagaaagtgtccagtgaacttggaagtgggcccctgagctgagcacagggccaaagcagccatggcagacacctgacggagggcacggggctggctgacactaagtttggtgggacagtgaggggtgggaggggggtttccagggcctggtgttggagagtgcagagaaatatctacctccctggaggtgtgaagactaggtttttcttcttccttccaattagattttccttaattatagtgatgtcttccttattcatttttctctccctgcctctcactgccataagaatatcagcctgggggcagtccagacgcagccctttgtcatcctttctgtttgcctagtctcagcagactgtgatcacaaggcattgtctgtgggatttttcctttccctttcttgatctctcttgtggttctaggttgtttggttgttcattgttatggtggctttttattttaacgccccttgagccccatgatggctggtgtcaccctgttcttttacactgttgggccaggtgctgcttgtccttcttagggcatcatcaattgcaaatatttccttttgctccctttatgaagatgttcttatacccttgctttcccatatttttctggccaagcatgccatctcctttactctgggaacttacatcctgaatcccaagagggggtcacagtttggaaaaagtcatcagggattctggaactaagtctgataaaagattccagtgaagccctgttctgagaacgagcagactgcaggggaggccatgggattccccaggccagtgtctgtgctgatccttcaagggtctgcaggtatgcaggtggcctgggctgctcggcagatactttgctgattcccagctgaggggagcatggtggcgattgctcagccattttctgacagacacacagacctgccttttctcccccaagtataccgtaccctcctgtgagacagtgtgtgcaggcaccaccaccttaatcctgctgttgcctgacatgctgattctcatttattatgctgcatcaacacattagaggtacaggagcggctcagtcatgaaaaaagaaggtcttttgccccatttctttatttcagagatgtgggctttcagtgggaatttgctgactcctactttataggctgagtcaatgagggaagatgactggcgtttcctctgtctaaatgggaggttgccagagcgctggctgggactaggatgtgtaactaagatttcagtttgaaatcttagatttcagttcacggcgataaagaagtaggtgctgcacacaaatatgtaaagcaattgtaggaaatttgaaaggaaaaaaagaaaccgaagccagtattttaataattgctttttctgtgtattttgtattgggctgggggatagcatcaaaggttgaactttttgagctttctatgaaaaaccccaggaccttctttctttggccatttctatggaaatgcgatgtcagatggatggtaatggtgccctccagtggctgtgagacctcattgcgcattgtctactggagctttagtcttctgagacggaggaaaactgctgaatactctggattcatctatgtctacaatgttgcatttatgaaaaactacactgtgctaggcgcattctaggacatgaatatgaccacaccctctttcaccgggtgtttctgtagcaagttttcatattcttttcaaacaatggtttctctgcgttaattattgaggaaaaaaaaagatggggtaagaaaactacccatgcatgatgtagagagctgttgatttgtttctgtttttttaaaggaaaactatttgtaagatgttgcactaaaacattttatatacacttcagagacctgtagtaaattatgttgaaaatacggctgtttacatttactgcagtcttctatccttctttccccttactaaccagcccccttcctctgtggaactgtgctgtgggagcctacagttctgcccttggcattggcctgctaggctcaaggtctgtgaattgcagtctttattattacaccccataaccttcaaatgataaaaacacctcttcctcaagacacttc

SEQ ID NO: 20 - protein, 1184 aa, Homo sapiens
MKCFFPVLSCLAVLGVVSAQRQVTVQEGPLYRTEGSHITIWCNVSGYQGPSEQNFQWSIYLPSSPEREVQIVSTMDSSFPYAIYTQRVRGGKIFIERVQGNSTLLHITDLQARDAGEYECHTPSTDKQYFGSYSAKMNLVVIPDSLQTTAMPQTLHRVEQDPLELTCEVASETIQHSHLSVAWLRQKVGEKPVEVISLSRDFMLHSSSEYAQRQSLGEVRLDKLGRTTFRLTIFHLQPSDQGEFYCEAAEWIQDPDGSWYAMTRKRSEGAVVNVQPTDKEFTVRLETEKRLHTVGEPVEFRCIAQNVPDRYFAVSWAFNSSLIATMGPNAVPVLNSEFAHRERQLKVAKESDSVFVLKIYHLRQEDSGKYNCRVTEREKTVTGEFIDKESKRPKNIPIIVLPLKSSISVEVNASVIGEDLRFSCSVRTAGRPQGRFSVIWQLVDRQNRRSNIMWLDRDGTVQPGSSYWERSSFGGVQMEQVQPNSFSLGIFNSRKEDEGQYECHVTEWVRAVDGEWQIVGERRASTPISITALEMGFAVTAISRTPGVTYSDSFDLQCIIKPHYPAWVPVSVTWRFQPVGTVEFHDLVTFTRDGGVQWGDRSSSFRTRTAIEKAESSNNVRLSISRASDTEAGKYQCVAELWRKNYNNTWTRLAERTSNLLEIRVLQPVTKLQVSKSKRTLTLVENKPIQLNCSVKSQTSQNSHFAVLWYVHKPSDADGKLILKTTHNSAFEYGTYAEEEGLRARLQFERHVSGGLFSLTVQRAEVSDSGSYYCHVEEWLLSPNYAWYKLAEEVSGRTEVTVKQPDSRLRLSQAQGNLSVLETRQVQLECVVLNRTSITSQLMVEWFVWKPNHPERETVARLSRDATFHYGEQAAKNNLKGRLHLESPSPGVYRLFIQNVAVQDSGTYSCHVEEWLPSPSGMWYKRAEDTAGQTALTVMRPDASLQVDTVVPNATVSEKAAFQLDCSIVSRSSQDSRFAVAWYSLRTKAGGKRSSPGLEEQEEEREEEEEEDDDDDDDPTERTALLSVGPDAVFGPEGSPWEGRLRFQRLSPVLYRLTVLQDQDTGNYSCHVEEWLPSPQKEWYRLTEEESAPIGIRVLDTSPTLQSIICSNDALFYFVFFYPFPIFGILIITILLVRFKSRNSSKNSDGKNGVPLLWIKEPHLNYSPTCLEPPVLSIHPGAID

SEQ ID NO: 21 - DNA, 3210 bp, Homo sapiens
gcggcgcgtcccctgaggcgtgcgcctggatggactgaaggacggtccgacgcgcgcggagggagagggccaggggcgagaaatctgctcgcgctggggtaccgcttcagggctgccgaacgccaacttgcttcgtgtgccctaggcaggcgtggggcaggtggcgcctccgtgacctaccaccatggatggaaacggactttttggtgaagaaacccaaacggttgatgccaggcagggtgatttggccgtcaaaggttttgacgaaacctgccctgttctctctggggaatccgaatgagggagatcacagacaccttcactgagaagccaaggacatttctgtataatcagtggatgaaaggattttctcagacccttttttccgtgcttctggaggattaatccactacagtctgcaatttcagtggaaactgcaaggcacacgatgtggcaggagccgggagcgacttccgaattgttgtggacccttcctgtagcataggggagttttcacacttgcctccactcctccccttccccccaactccctccttctgatctcttctttttaatctgttcccattttccgagttaagttctatttccaaaactgttctctggagctataagtggattgccagaaatgagagattaggagctgggagaagaggaagcgccttgtgttgtgtctcctggaggctgccgacatgaagtgctttttcccggtgctgagctgtctggctgtgctgggtgtggtgtcagcacagcggcaggtcaccgttcaggaaggacccttgtaccgcacggagggctcccacatcactatctggtgcaatgtgagtggctaccagggaccttctgagcagaatttccagtggtccatttacctgccttcgtcgccagagcgagaggtgcagatcgtcagcaccatggactcttccttcccctatgccatctacacccagcgcgtccgcggagggaagatcttcatagaaagagtccaggggaactcaaccctattgcacatcacagatcttcaggcccgggatgccggggagtatgaatgccacacacccagcactgataagcaatactttgggagttacagtgcaaagatgaacctagtggtgatcccagactccctgcagaccactgccatgccccagactctgcacagagtggagcaggacccgctggagctcacttgtgaggtggcctcagagaccattcagcacagccacctgtctgtggcctggctccggcagaaagttggcgagaagcccgtggaggtcatctccctgagccgagatttcatgcttcactccagcagcgaatatgcccagaggcagagcctgggggaggtgcggctggacaagctggggaggaccaccttccgcctcaccatcttccacctgcagccttctgaccagggcgaattctactgcgaggccgccgagtggatccaggatccggatgggtcgtggtatgctatgacccgaaagcgttccgagggagccgtggtcaacgtccagccaactgacaaagaattcactgttcggctggagacagagaagcggctgcacacggtgggcgagccggtggagttcagatgcatcctggaggctcagaatgttcccgaccgttactttgctgtctcctgggccttcaacagctcgctcatcgccaccatgggtcctaacgctgtgcctgtcctcaacagcgaatttgctcaccgggaagccaggggacagcttaaggtggccaaagagagcgacagtgtctttgtgctgaagatctaccacctccgccaggaagatagcgggaaatacaactgccgggtgactgagcgagagaaaaccgtgaccggggaattcattgataaggagagcaagcgtcccaagaacatccccatcatagtcctccccctcacagataactgggtagttaaagtcccccagcaccaccagctcctgtcccaaggccacttggagagcagcatctccgtggaggtggccagcaatgccagcgtcatccttgagggcgaggacctgcgcttctcctgcagtgtccgcacggcaggcaggccgcagggtcgcttctctgtcatctggcagcttgtggacaggcagaaccgccgcagcaatatcatgtggctagaccgggatggcaccgtgcagccaggctcgtcctactgggagcgcagcagctttgggggcgtccagatggagcaggtgcagcccaactcgttcagcctgggcatcttcaacagcaggaaggaggacgagggccagtatgaatgccatgtgactgaatgggtgcgggcagtggatggcgagtggcagattgttggggagcgccgggccagcactcccatctccatcacagctcttgaaatgggcttcgcagtcacagccatctcccggacaccgggggtgacctacagcgactcctttgacttgcagtgtatcatcaaaccccactaccctgcctgggtccccgtgtcggtgacatggcggttccagccggtgggcacggtggagttccatgacttggtgaccttcacccgggacggaggggtccagtggggggacaggtcctccagcttccgaacccgaactgccatcgagaaggctgagtccagcaacaacgtccgcctaagcatcagccgagccagtgacacggaagcaggcaagtaccagtgtgtggcagagctgtggcggaagaactacaacaacacctggacgcgactggcggagaggacctccaacctgctggagatcagggtgctgcagccagtgacaaagctgcaggtgagcaaatcgaagaggaccctcaccctggtggaaaacaagcccattcagttgaactgctcagtcaagtctcagactagccagaactcccactttgcggtgctctggtatgtccacaagccctcggatgccgatggcaagcttatcctgaagaccacccacaactccgcctttgaatacggtacttacgccgaggaggagggcctgagagccaggctccagtttgagaggcatgtgtcggggggcctgttcagcctcaccgtccagagagccgaggtcagcgacagcggcagctactactgccacgtggaggagtggctgctgagccccaactacgcctggtacaagctggcagaggaggtttctgggcgcacagaagtcactgtgaaacagccag

SEQ ID NO: 22 - protein, 826 aa, Homo sapiens
  VARIANT (1)...(826): Xaa = Any Amino Acid
MKCFFPVLSCLAVLGVVSAQRQVTVQEGPLYRTEGSHITIWCNVSGYQGPSEQNFQWSIYLPSSPEREVQIVSTMDSSFPYAIYTQRVRGGKIFIERVQGNSTLLHITDLQARDAGEYECHTPSTDKQYFGSYSAKMNLVVIPDSLQTTAMPQTLHRVEQDPLELTCEVASETIQHSHLSVAWLRQKVGEKPVEVISLSRDFMLHSSSEYAQRQSLGEVRLDKLGRTTFRLTIFHLQPSDQGEFYCEAAEWIQDPDGSWYAMTRKRSEGAVVNVQPTDKEFTVRLETEKRLHTVGEPVEFRCIAQNVPDRYFAVSWAFNSSLIATMGPNAVPVLNSEFAHRERQLKVAKESDSVFVLKIYHLRQEDSGKYNCRVTEREKTVTGEFIDKESKRPKNIPIIVLPLTDNWVVKVPQHHQLLSQGHLESSISVEVNASVIGEDLRFSCSVRTAGRPQGRFSVIWQLVDRQNRRSNIMWLDRDGTVQPGSSYWERSSFGGVQMEQVQPNSFSLGIFNSRKEDEGQYECHVTEWVRAVDGEWQIVGERRASTPISITALEMGFAVTAISRTPGVTYSDSFDLQCIIKPHYPAWVPVSVTWRFQPVGTVEFHDLVTFTRDGGVQWGDRSSSFRTRTAIEKAESSNNVRLSISRASDTEAGKYQCVAELWRKNYNNTWTRLAERTSNLLEIRVLQPVTKLQVSKSKRTLTLVENKPIQLNCSVKSQTSQNSHFAVLWYVHKPSDADGKLILKTTHNSAFEYGTYAEEEGLRARLQFERHVSGGLFSLTVQRAEVSDSGSYYCHVEEWLLSPNYAWYKLAEEVSGRTEVTVKQPX

SEQ ID NO: 23 - DNA, 7380 bp, Homo sapiens
aaatctgctcgcgctggggtaccgcttcagggctgccgaacgccaacttgcttcgtgtgccctaggcaggcgtggggcaggtggcgcctccgtgacctaccaccatggatggaaacggactttttggtgaagaaacccaaacggttgatgccaggcagggtgatttggccgtcaaaggttttgacgaaacctgccctgttctctctggggaatccgaatgagggagatcacagacaccttcactgagaagccaaggacatttctgtataatcagtggatgaaaggattttctcagacccttttttccgtgcttctggaggattaatccactacagtctgcaatttcagtggaaactgcaaggcacacgatgtggcaggagccgggagcgacttccgaattgttgtggacccttcctgtagcataggggagttttcacacttgcctccactcctccccttccccccaactccctccttctgatctcttctttttaatctgttcccattttccgagttaagttctatttccaaaactgttctctggagctataagtggattgccagaaatgagagattaggagctgggagaagaggaagcgccttgtgttgtgtctcctggaggctgccgacatgaagtgctttttcccggtgctgagctgtctggctgtgctgggtgtggtgtcagcacagcggcaggtcaccgttcaggaaggacccttgtaccgcacggagggctcccacatcactatctggtgcaatgtgagtggctaccagggaccttctgagcagaatttccagtggtccatttacctgccttcgtcgccagagcgagaggtgcagatcgtcagcaccatggactcttccttcccctatgccatctacacccagcgcgtccgcggagggaagatcttcatagaaagagtccaggggaactcaaccctattgcacatcacagatcttcaggcccgggatgccggggagtatgaatgccacacacccagcactgataagcaatactttgggagttacagtgcaaagatgaacctagtggtgatcccagactccctgcagaccactgccatgccccagactctgcacagagtggagcaggacccgctggagctcacttgtgaggtggcctcagagaccattcagcacagccacctgtctgtggcctggctccggcagaaagttggcgagaagcccgtggaggtcatctccctgagccgagatttcatgcttcactccagcagcgaatatgcccagaggcagagcctgggggaggtgcggctggacaagctggggaggaccaccttccgcctcaccatcttccacctgcagccttctgaccagggcgaattctactgcgaggccgccgagtggatccaggatccggatgggtcgtggtatgctatgacccgaaagcgttccgagggagccgtggtcaacgtccagccaactgacaaagaattcactgttcggctggagacagagaagcggctgcacacggtgggcgagccggtggagttcagatgcatcctggaggctcagaatgttcccgaccgttactttgctgtctcctgggccttcaacagctcgctcatcgccaccatgggtcctaacgctgtgcctgtcctcaacagcgaatttgctcaccgggaagccaggggacagcttaaggtggccaaagagagcgacagtgtctttgtgctgaagatctaccacctccgccaggaagatagcgggaaatacaactgccgggtgactgagcgagagaaaaccgtgaccggggaattcattgataaggagagcaagcgtcccaagaacatccccatcatagtcctccccctcacagataactgggtagttaaagtcccccagcaccaccagctcctgtcccaaggccacttggagagcagcatctccgtggaggtggccagcaatgccagcgtcatccttgagggcgaggacctgcgcttctcctgcagtgtccgcacggcaggcaggccgcagggtcgcttctctgtcatctggcagcttgtggacaggcagaaccgccgcagcaatatcatgtggctagaccgggatggcaccgtgcagccaggctcgtcctactgggagcgcagcagctttgggggcgtccagatggagcaggtgcagcccaactcgttcagcctgggcatcttcaacagcaggaaggaggacgagggccagtatgaatgccatgtgactgaatgggtgcgggcagtggatggcgagtggcagattgttggggagcgccgggccagcactcccatctccatcacagctcttgaaatgggcttcgcagtcacagccatctcccggacaccgggggtgacctacagcgactcctttgacttgcagtgtatcatcaaaccccactaccctgcctgggtccccgtgtcggtgacatggcggttccagccggtgggcacggtggagttccatgacttggtgaccttcacccgggacggaggggtccagtggggggacaggtcctccagcttccgaacccgaactgccatcgagaaggctgagtccagcaacaacgtccgcctaagcatcagccgagccagtgacacggaagcaggcaagtaccagtgtgtggcagagctgtggcggaagaactacaacaacacctggacgcgactggcggagaggacctccaacctgctggagatcagggtgctgcagccagtgacaaagctgcaggtgagcaaatcgaagaggaccctcaccctggtggaaaacaagcccattcagttgaactgctcagtcaagtctcagactagccagaactcccactttgcggtgctctggtatgtccacaagccctcggatgccgatggcaagcttatcctgaagaccacccacaactccgcctttgaatacggtacttacgccgaggaggagggcctgagagccaggctccagtttgagaggcatgtgtcggggggcctgttcagcctcaccgtccagagagccgaggtcagcgacagcggcagctactactgccacgtggaggagtggctgctgagccccaactacgcctggtacaagctggcagaggaggtttctgggcgcacagaagtcactgtgaaacagccagacagccgcctgaggctcagccaagcccaggggaacctgtcggttctggagacccggcaggtacagctggagtgtgtggttctcaaccgcaccagcataacctcccagctcatggtggaatggtttgtatggaagcccaaccaccctgagcgggagactgtggcccgcttgagccgtgacgccaccttccactatggagagcaggcagccaagaacaatctgaaggggcggctgcatttggagagtccttcccccggcgtgtaccgtctcttcatccagaacgtggctgtgcaggacagcgggacctacagctgccatgtggaggagtggctgcccagccccagtggcatgtggtataagcgggcagaggacaccgctgggcagacagctctgacagtcatgcgaccagatgcttccctgcaggtggacacagtggtccccaatgccacggtctctgagaaggcagctttccagctggactgtagcatcgtgtcccgctccagccaggactcccgcttcgctgtggcctggtattccctgaggactaaagctggggggaaaaggagcagccctggcctggaagaacaggaagaggaaagggaggaggaggaggaggaggacgacgacgacgacgacgacccaacagagcggacggccctgctgagcgtgggcccagatgctgtctttggcccagagggcagtccttgggagggcaggcttcgcttccagaggctctccccggtgctctaccggctcacagtgctgcaggcaagcccccaagatacaggcaattactcctgccatgtggaggagtggctgcccagccctcagaaggaatggtaccggctgacggaggaggagtcagcccccatcggcatccgtgttctagatacaagtcccaccctccagtccatcatctgctccaacgacgcactcttctacttcgtcttcttctaccctttccccatctttggcattcttatcatcaccatccttctggtgcgtttcaagagccggaactccagcaagaactctgatgggaagaatggggtgcctctgctgtggatcaaagagccacacctcaactactcccctacttgcctggagccccctgttctcagtatccatccaggggccatagactaagcgggtgatgccccagcggatgttggccacggaggagctgaggctctccctttctctgtgattggacagttgacagcacccaaactctggggtgcatgtgtgtggaaagttgtcagacttgaaaagtgttccaagttcccagtcagtcacagagacagactgcctctcggtggcagtcttggttggttagctatttgcgcgcaaatgttgtgatcctgccattatagatttcttgtttctgtttttagtaatgtagtgagtagctccaggtgccacatctactcacagatttatctagtattctcagatagatgttacagggcttcttattctttgtaatgtactctttttaaatccctttagtttaccctttttggattccttaatgtggacgaatttctcttacgtacaactgacagcaaaaggaagggcgaactttctagtgacaaggaatctcttccaagactttgtttttgcacatttgaaaatgccacccatggatcaaaatatacccaaacgttttttactttcttaacaagacttaagaattgtgtgtagtgtgggcaaaatttgtatgttgtcttttccctcagctggagttattggaaccactttgtagtcaagacgaaagcactgaattttgcttcaaagaactgtgtatgtacaagagaaatcctgcataaccccattaggagtagatggtgcccggcctatctgtcagggaggcaaaaaaggcttcatcccatccttgccaaaaaataagaaaactgtcttggagaatgggtcagaagccccaaacggcacacactttccaaattaaagtgggcaggggctgcttttagcagctgctgacctgcagatttgtcaaagccagtgactagagaaggaagggagaaaggctggctgttggcttgctctgagctgcaaggatggtctctaactgattaactgtgagcaggtgggcctgtgtcttcaggtgctttgccaaactcttaaaagaaagtgtccagtgaacttggaagtgggcccctgagctgagcacagggccaaagcagccatggcagacacctgacggagggcacggggctggctgacactaagtttggtgggacagtgaggggtgggaggggggtttccagggcctggtgttggagagtgcagagaaatatctacctccctggaggtgtgaagactaggtttttcttcttccttccaattagattttccttaattatagtgatgtcttccttattcatttttctctccctgcctctcactgccataagaatatcagcctgggggcagtccagacgcagccctttgtcatcctttctgtttgcctagtctcagcagactgtgatcacaaggcattgtctgtgggatttttcctttccctttcttgatctctcttgtggttctaggttgtttggttgttcattgttatggtggctttttattttaacgccccttgagccccatgatggctggtgtcaccctgttcttttacactgttgggccaggtgctgcttgtccttcttagggcatcatcaattgcaaatatttccttttgctccctttatgaagatgttcttatacccttgctttcccatatttttctggccaagcatgccatctcctttactctgggaacttacatcctgaatcccaagagggggtcacagtttggaaaaagtcatcagggattctggaactaagtctgataaaagattccagtgaagccctgttctgagaacgagcagactgcaggggaggccatgggattccccaggccagtgtctgtgctgatccttcaagggtctgcaggtatgcaggtggcctgggctgctcggcagatactttgctgattcccagctgaggggagcatggtggcgattgctcagccattttctgacagacacacagacctgccttttctcccccaagtataccgtaccctcctgtgagacagtgtgtgcaggcaccaccaccttaatcctgctgttgcctgacatgctgattctcatttattatgctgcatcaacacattagaggtacaggagcggctcagtcatgaaaaaagaaggtcttttgccccatttctttatttcagagatgtgggctttcagtgggaatttgctgactcctactttataggctgagtcaatgagggaagatgactggcgtttcctctgtctaaatgggaggttgccagagcgctggctgggactaggatgtgtaactaagatttcagtttgaaatcttagatttcagttcacggcgataaagaagtaggtgctgcacacaaatatgtaaagcaattgtaggaaatttgaaaggaaaaaaagaaaccgaagccagtattttaataattgctttttctgtgtattttgtattgggctgggggatagcatcaaaggttgaactttttgagctttctatgaaaaaccccaggaccttctttctttggccatttctatggaaatgcgatgtcagatggatggtaatggtgccctccagtggctgtgagacctcattgcgcattgtctactggagctttagtcttctgagacggaggaaaactgctgaatactctggattcatctatgtctacaatgttgcatttatgaaaaactacactgtgctaggcgcattctaggacatgaatatgaccacaccctctttcaccgggtgtttctgtagcaagttttcatattcttttcaaacaatggtttctctgcgttaattattgaggaaaaaaaaagatggggtaagaaaactacccatgcatgatgtagagagctgttgatttgtttctgtttttttaaaggaaaactatttgtaagatgttgcactaaaacattttatatacacttcagagacctgtagtaaattatgttgaaaatacggctgtttacatttactgcagtcttctatccttctttccccttactaaccagcccccttcctctgtggaactgtgctgtgggagcctacagttctgcccttggcattggcctgctaggctcaaggtctgtgaattgcagtctttattattacaccccataaccttcaaatgataaaaacacctcttcctcaagacacttc

SEQ ID NO: 24 - protein, 1204 aa, Homo sapiens
MKCFFPVLSCLAVLGVVSAQRQVTVQEGPLYRTEGSHITIWCNVSGYQGPSEQNFQWSIYLPSSPEREVQIVSTMDSSFPYAIYTQRVRGGKIFIERVQGNSTLLHITDLQARDAGEYECHTPSTDKQYFGSYSAKMNLVVIPDSLQTTAMPQTLHRVEQDPLELTCEVASETIQHSHLSVAWLRQKVGEKPVEVISLSRDFMLHSSSEYAQRQSLGEVRLDKLGRTTFRLTIFHLQPSDQGEFYCEAAEWIQDPDGSWYAMTRKRSEGAVVNVQPTDKEFTVRLETEKRLHTVGEPVEFRCIAQNVPDRYFAVSWAFNSSLIATMGPNAVPVLNSEFAHRERQLKVAKESDSVFVLKIYHLRQEDSGKYNCRVTEREKTVTGEFIDKESKRPKNIPIIVLPLTDNWVVKVPQHHQLLSQGHLESSISVEVNASVIGEDLRFSCSVRTAGRPQGRFSVIWQLVDRQNRRSNIMWLDRDGTVQPGSSYWERSSFGGVQMEQVQPNSFSLGIFNSRKEDEGQYECHVTEWVRAVDGEWQIVGERRASTPISITALEMGFAVTAISRTPGVTYSDSFDLQCIIKPHYPAWVPVSVTWRFQPVGTVEFHDLVTFTRDGGVQWGDRSSSFRTRTAIEKAESSNNVRLSISRASDTEAGKYQCVAELWRKNYNNTWTRLAERTSNLLEIRVLQPVTKLQVSKSKRTLTLVENKPIQLNCSVKSQTSQNSHFAVLWYVHKPSDADGKLILKTTHNSAFEYGTYAEEEGLRARLQFERHVSGGLFSLTVQRAEVSDSGSYYCHVEEWLLSPNYAWYKLAEEVSGRTEVTVKQPDSRLRLSQAQGNLSVLETRQVQLECVVLNRTSITSQLMVEWFVWKPNHPERETVARLSRDATFHYGEQAAKNNLKGRLHLESPSPGVYRLFIQNVAVQDSGTYSCHVEEWLPSPSGMWYKRAEDTAGQTALTVMRPDASLQVDTVVPNATVSEKAAFQLDCSIVSRSSQDSRFAVAWYSLRTKAGGKRSSPGLEEQEEEREEEEEEDDDDDDDPTERTALLSVGPDAVFGPEGSPWEGRLRFQRLSPVLYRLTVLQDQDTGNYSCHVEEWLPSPQKEWYRLTEEESAPIGIRVLDTSPTLQSIICSNDALFYFVFFYPFPIFGILIITILLVRFKSRNSSKNSDGKNGVPLLWIKEPHLNYSPTCLEPPVLSIHPGAID

SEQ ID NO: 25 - DNA, 7460 bp, Homo sapiens
gcggcgcgtcccctgaggcgtgcgcctggatggactgaaggacggtccgacgcgcgcggagggagagggccaggggcgagaaatctgctcgcgctggggtaccgcttcagggctgccgaacgccaacttgcttcgtgtgccctaggcaggcgtggggcaggtggcgcctccgtgacctaccaccatggatggaaacggactttttggtgaagaaacccaaacggttgatgccaggcagggtgatttggccgtcaaaggttttgacgaaacctgccctgttctctctggggaatccgaatgagggagatcacagacaccttcactgagaagccaaggacatttctgtataatcagtggatgaaaggattttctcagacccttttttccgtgcttctggaggattaatccactacagtctgcaatttcagtggaaactgcaaggcacacgatgtggcaggagccgggagcgacttccgaattgttgtggacccttcctgtagcataggggagttttcacacttgcctccactcctccccttccccccaactccctccttctgatctcttctttttaatctgttcccattttccgagttaagttctatttccaaaactgttctctggagctataagtggattgccagaaatgagagattaggagctgggagaagaggaagcgccttgtgttgtgtctcctggaggctgccgacatgaagtgctttttcccggtgctgagctgtctggctgtgctgggtgtggtgtcagcacagcggcaggtcaccgttcaggaaggacccttgtaccgcacggagggctcccacatcactatctggtgcaatgtgagtggctaccagggaccttctgagcagaatttccagtggtccatttacctgccttcgtcgccagagcgagaggtgcagatcgtcagcaccatggactcttccttcccctatgccatctacacccagcgcgtccgcggagggaagatcttcatagaaagagtccaggggaactcaaccctattgcacatcacagatcttcaggcccgggatgccggggagtatgaatgccacacacccagcactgataagcaatactttgggagttacagtgcaaagatgaacctagtggtgatcccagactccctgcagaccactgccatgccccagactctgcacagagtggagcaggacccgctggagctcacttgtgaggtggcctcagagaccattcagcacagccacctgtctgtggcctggctccggcagaaagttggcgagaagcccgtggaggtcatctccctgagccgagatttcatgcttcactccagcagcgaatatgcccagaggcagagcctgggggaggtgcggctggacaagctggggaggaccaccttccgcctcaccatcttccacctgcagccttctgaccagggcgaattctactgcgaggccgccgagtggatccaggatccggatgggtcgtggtatgctatgacccgaaagcgttccgagggagccgtggtcaacgtccagccaactgacaaagaattcactgttcggctggagacagagaagcggctgcacacggtgggcgagccggtggagttcagatgcatcctggaggctcagaatgttcccgaccgttactttgctgtctcctgggccttcaacagctcgctcatcgccaccatgggtcctaacgctgtgcctgtcctcaacagcgaatttgctcaccgggaagccaggggacagcttaaggtggccaaagagagcgacagtgtctttgtgctgaagatctaccacctccgccaggaagatagcgggaaatacaactgccgggtgactgagcgagagaaaaccgtgaccggggaattcattgataaggagagcaagcgtcccaagaacatccccatcatagtcctccccctcacagataactgggtagttaaagtcccccagcaccaccagctcctgtcccaaggccacttggagagcagcatctccgtggaggtggccagcaatgccagcgtcatccttgagggcgaggacctgcgcttctcctgcagtgtccgcacggcaggcaggccgcagggtcgcttctctgtcatctggcagcttgtggacaggcagaaccgccgcagcaatatcatgtggctagaccgggatggcaccgtgcagccaggctcgtcctactgggagcgcagcagctttgggggcgtccagatggagcaggtgcagcccaactcgttcagcctgggcatcttcaacagcaggaaggaggacgagggccagtatgaatgccatgtgactgaatgggtgcgggcagtggatggcgagtggcagattgttggggagcgccgggccagcactcccatctccatcacagctcttgaaatgggcttcgcagtcacagccatctcccggacaccgggggtgacctacagcgactcctttgacttgcagtgtatcatcaaaccccactaccctgcctgggtccccgtgtcggtgacatggcggttccagccggtgggcacggtggagttccatgacttggtgaccttcacccgggacggaggggtccagtggggggacaggtcctccagcttccgaacccgaactgccatcgagaaggctgagtccagcaacaacgtccgcctaagcatcagccgagccagtgacacggaagcaggcaagtaccagtgtgtggcagagctgtggcggaagaactacaacaacacctggacgcgactggcggagaggacctccaacctgctggagatcagggtgctgcagccagtgacaaagctgcaggtgagcaaatcgaagaggaccctcaccctggtggaaaacaagcccattcagttgaactgctcagtcaagtctcagactagccagaactcccactttgcggtgctctggtatgtccacaagccctcggatgccgatggcaagcttatcctgaagaccacccacaactccgcctttgaatacggtacttacgccgaggaggagggcctgagagccaggctccagtttgagaggcatgtgtcggggggcctgttcagcctcaccgtccagagagccgaggtcagcgacagcggcagctactactgccacgtggaggagtggctgctgagccccaactacgcctggtacaagctggcagaggaggtttctgggcgcacagaagtcactgtgaaacagccagacagccgcctgaggctcagccaagcccaggggaacctgtcggttctggagacccggcaggtacagctggagtgtgtggttctcaaccgcaccagcataacctcccagctcatggtggaatggtttgtatggaagcccaaccaccctgagcgggagactgtggcccgcttgagccgtgacgccaccttccactatggagagcaggcagccaagaacaatctgaaggggcggctgcatttggagagtccttcccccggcgtgtaccgtctcttcatccagaacgtggctgtgcaggacagcgggacctacagctgccatgtggaggagtggctgcccagccccagtggcatgtggtataagcgggcagaggacaccgctgggcagacagctctgacagtcatgcgaccagatgcttccctgcaggtggacacagtggtccccaatgccacggtctctgagaaggcagctttccagctggactgtagcatcgtgtcccgctccagccaggactcccgcttcgctgtggcctggtattccctgaggactaaagctggggggaaaaggagcagccctggcctggaagaacaggaagaggaaagggaggaggaggaggaggaggacgacgacgacgacgacgacccaacagagcggacggccctgctgagcgtgggcccagatgctgtctttggcccagagggcagtccttgggagggcaggcttcgcttccagaggctctccccggtgctctaccggctcacagtgctgcaggcaagcccccaagatacaggcaattactcctgccatgtggaggagtggctgcccagccctcagaaggaatggtaccggctgacggaggaggagtcagcccccatcggcatccgtgttctagatacaagtcccaccctccagtccatcatctgctccaacgacgcactcttctacttcgtcttcttctaccctttccccatctttggcattcttatcatcaccatccttctggtgcgtttcaagagccggaactccagcaagaactctgatgggaagaatggggtgcctctgctgtggatcaaagagccacacctcaactactcccctacttgcctggagccccctgttctcagtatccatccaggggccatagactaagcgggtgatgccccagcggatgttggccacggaggagctgaggctctccctttctctgtgattggacagttgacagcacccaaactctggggtgcatgtgtgtggaaagttgtcagacttgaaaagtgttccaagttcccagtcagtcacagagacagactgcctctcggtggcagtcttggttggttagctatttgcgcgcaaatgttgtgatcctgccattatagatttcttgtttctgtttttagtaatgtagtgagtagctccaggtgccacatctactcacagatttatctagtattctcagatagatgttacagggcttcttattctttgtaatgtactctttttaaatccctttagtttaccctttttggattccttaatgtggacgaatttctcttacgtacaactgacagcaaaaggaagggcgaactttctagtgacaaggaatctcttccaagactttgtttttgcacatttgaaaatgccacccatggatcaaaatatacccaaacgttttttactttcttaacaagacttaagaattgtgtgtagtgtgggcaaaatttgtatgttgtcttttccctcagctggagttattggaaccactttgtagtcaagacgaaagcactgaattttgcttcaaagaactgtgtatgtacaagagaaatcctgcataaccccattaggagtagatggtgcccggcctatctgtcagggaggcaaaaaaggcttcatcccatccttgccaaaaaataagaaaactgtcttggagaatgggtcagaagccccaaacggcacacactttccaaattaaagtgggcaggggctgcttttagcagctgctgacctgcagatttgtcaaagccagtgactagagaaggaagggagaaaggctggctgttggcttgctctgagctgcaaggatggtctctaactgattaactgtgagcaggtgggcctgtgtcttcaggtgctttgccaaactcttaaaagaaagtgtccagtgaacttggaagtgggcccctgagctgagcacagggccaaagcagccatggcagacacctgacggagggcacggggctggctgacactaagtttggtgggacagtgaggggtgggaggggggtttccagggcctggtgttggagagtgcagagaaatatctacctccctggaggtgtgaagactaggtttttcttcttccttccaattagattttccttaattatagtgatgtcttccttattcatttttctctccctgcctctcactgccataagaatatcagcctgggggcagtccagacgcagccctttgtcatcctttctgtttgcctagtctcagcagactgtgatcacaaggcattgtctgtgggatttttcctttccctttcttgatctctcttgtggttctaggttgtttggttgttcattgttatggtggctttttattttaacgccccttgagccccatgatggctggtgtcaccctgttcttttacactgttgggccaggtgctgcttgtccttcttagggcatcatcaattgcaaatatttccttttgctccctttatgaagatgttcttatacccttgctttcccatatttttctggccaagcatgccatctcctttactctgggaacttacatcctgaatcccaagagggggtcacagtttggaaaaagtcatcagggattctggaactaagtctgataaaagattccagtgaagccctgttctgagaacgagcagactgcaggggaggccatgggattccccaggccagtgtctgtgctgatccttcaagggtctgcaggtatgcaggtggcctgggctgctcggcagatactttgctgattcccagctgaggggagcatggtggcgattgctcagccattttctgacagacacacagacctgccttttctcccccaagtataccgtaccctcctgtgagacagtgtgtgcaggcaccaccaccttaatcctgctgttgcctgacatgctgattctcatttattatgctgcatcaacacattagaggtacaggagcggctcagtcatgaaaaaagaaggtcttttgccccatttctttatttcagagatgtgggctttcagtgggaatttgctgactcctactttataggctgagtcaatgagggaagatgactggcgtttcctctgtctaaatgggaggttgccagagcgctggctgggactaggatgtgtaactaagatttcagtttgaaatcttagatttcagttcacggcgataaagaagtaggtgctgcacacaaatatgtaaagcaattgtaggaaatttgaaaggaaaaaaagaaaccgaagccagtattttaataattgctttttctgtgtattttgtattgggctgggggatagcatcaaaggttgaactttttgagctttctatgaaaaaccccaggaccttctttctttggccatttctatggaaatgcgatgtcagatggatggtaatggtgccctccagtggctgtgagacctcattgcgcattgtctactggagctttagtcttctgagacggaggaaaactgctgaatactctggattcatctatgtctacaatgttgcatttatgaaaaactacactgtgctaggcgcattctaggacatgaatatgaccacaccctctttcaccgggtgtttctgtagcaagttttcatattcttttcaaacaatggtttctctgcgttaattattgaggaaaaaaaaagatggggtaagaaaactacccatgcatgatgtagagagctgttgatttgtttctgtttttttaaaggaaaactatttgtaagatgttgcactaaaacattttatatacacttcagagacctgtagtaaattatgttgaaaatacggctgtttacatttactgcagtcttctatccttctttccccttactaaccagcccccttcctctgtggaactgtgctgtgggagcctacagttctgcccttggcattggcctgctaggctcaaggtctgtgaattgcagtctttattattacaccccataaccttcaaatgataaaaacacctcttcctcaagacacttc

SEQ ID NO: 26 - protein, 1204 aa, Homo sapiens; identical to SEQ ID NO: 24

SEQ ID NO: 27 - DNA, 83710 bp, Mus musculus
  misc_feature (1)...(83710): n = A,T,C or G
agcaatcatgggattggttatgaccaaggatgtgagtgtcagtaatggctgtggattccaagacgacaaaattaaacccagtgtgagttcacaacactttcttctgtggccaccttggaggccatatctcgaagaggataatgccctgagacagaaggagcctgggtccccactttggtacttggaggagttttgtcaaatagcattccctgattaagaaatctactttgagtggggtctgggtgagaagtcagatcttaatgctgtctatcctatctgtgttagtactgcttagtgggctattaacttactgactagattgaggttggtctgaagataaatggatggcaccaagttcacaaatactagtgtggagcatgatctgtcattgtggtcatattgatcaatacagagttgcatgagaagaaagctgtttgtattagtcagggttttcaagaagaagagaacttatagaataaaatctatctgtctatcctctagtttacataaaaatatatacacagaatatgatatatacacatatattcatatatgtacacacataaatataaataaatgtaaatataaatagtataaatgtaaatattcattagaatggcttagaggccatgatcctgataagctggatctaccaatggaaggttcaagaatccagtagctgttcatcctatgaggctggatgtctcacttggtcttcagtatatgcctgaatcctgaagaagcaggctctaatgctagtgaaggaatgtacttgacggtgggattgagaacaagcaggcagagggaaagcttccttcttttatgtcctttagacaggctgccaccaaaaagtgtggctcagattaaaggcggaccttcctacttcaaaagatccagattaaaagtgggtctttctacttcaaaaaatttagttaaaaaaaaaaatccctcataggtgttcccagttgcttggattttagttaattccaaatgtaatctagatgaccaccaaaaatatccatcacaagttgaccaccatcacactctgtcctgggaaacttagagaccaaaaggaagtcaagctaggatggagtgtgcatgacagtggcagggagcaatgaatgaaggatgcggctcactgtacaaatagacctaggtggctggagtggaggacctatgtggagtgacaactgaggaagaagtggagagatagttaaggccctagggaggttggatgtggaaggtatcatgagtaacatgaagcatacatctagatccacctttctcctcctccaggcacaccacccaggctgggaatggaggcatcagtcttcaatgatgtgtctcaatagacagttcccctccctctttgccaattagctttctgactctgtggagctagtgctagcagcttgaggcctctgtggtgttttgaataagaattgcccctaataggctcatgcatttgaatgcttagtcactgggaactgtttgaaaggattagaaggattaagaggtgtggccctttgttgggggtgtgtgtggtcttgctggaagaagggtgccactgcaactgagctttgaggttttaaaagcccatacaatacccaggtgttctgtctctctctctgtctctgtctctgtctctctctctctctctctccattcttgctgcagatcaagatgtagctctcagctactctagcaccatgcttcctgccatgataataatggactaactgcctgaaactgtaagccagccccaattaaatgctttcctttataaaagttgttttagtcatggtatctcctcacagtaatagaccagtgactaagatgagaccctacaagcaggatagggtagggagatgggcagatagtttattttgtgacttgtcatggttacaaaaagtattctgagacttccatccatgtccataattctgatgaaaggaggtaattgggtatttttatagattcagctacaactatataatttttttttttttttttttttttttgctgtgtgtattaaaagtactcctgacttgtgaactcggaaatacatttttttttcaaaagtcagcaaaaaatttcatacattccaatgcatggctgactgtacctgatgatgtcacacagagaaatggatttacatgctaagcaaagagaatctaagcagtcaagccaagacactaccatacatacatataaatatcttgggcacagatacaaaagagacagatgaacccaaaatcaatcatctaaagccctcttaaatgcaatgtgtaaataatggcattacaggacaatttctaaaatgcagaagtcaaataattcatagctcagccatcagtgacaagattgagaagcaaataagactagcattcagaagataaaaggaagttaccttatatacaactgtgatggtttgaatagaaatggcccccatagactcacatctttgaatgtttggcccatagggagtggcactattaccaagtgtggccttgttggaggaagtgtgtcattttggaggtgggctttgaggtctcttatgcccaagctatgcccaatgtgatacacagactccttctgctgcctttagatcaaagtatagaattctcagttctctctctctccccccccctctctctctgctttgtgcttatggatcacaatgtgagctctcagctgtttctctgtttcaccatcatggactctagccctccaagttgtaagctaaagtaaagactgtcttttataagttgtcttgatcacggcattttataacagcaataaaaaactaactaagaaaaaaaaaaacctgatagaacaaattcccaataaagtagtggcttaaaagtaactaaactttgggtccagagagttatatctgccgttaagagacaattttcagaagacccaggcccagttcccagctcgcatacggcagctcacaaagcagttttatcttcagctccaagagattcaggtcattttttcggcttggatgggcccccgttatgaacatagtaagtacccatacacacatgtatatacattcatacacataagataaagataaatcttaaaaaaaaccagacacatacatgtattctatgtttgaggaagagcagaagtccaaagtgaataccaggagtgctaaatcagtacaccagcaggctcacacttcccttggaagccatagagtagaatccatccccagctcctcccagcttctatgactgctagcatcacagtgatgctatggctggaccactcccatctatatgatgcacatcttcagaccctcctttgttgtattcaccatgcctctatctgtgtacaaaacacccgtgtccttcctggaaggagataggaagtctcatttggtacctatgacagtcaattaggatcaacttccatttcaacatcctcaggcaaatcctatgtgctcgacattatttttaaagcatgtaaagttacattaacaaatcccagggcttagggcaggagttgttaaaacaacattttgaaaagtgttttacttgactttccacacctgtgatgggaatacccaagagcataatttatatggatttgtctatttgttttgggtcactttcaaagggttccaaccatcatcaccccatgcacttgagcagaatattctggtgttaggaacaagcagagaaagaggctgctggcttcgtggctgataggaagcagaggagagacacagccagaggccatacaggaacttcaaaggcactcccagagaagccccgcctcctgaagtctcccccaaccttcgcaaataaggtctccagctggggagaaggcagtctcacgtgagccctcgggagtcattccatttttaaaccacacaaaggaacagaaaacagtggcaatgcaaaaaagagtccttgatagggaagggatgtccctattacccaactgggtgactttcatcatcttaatgcagtacaagtctttacatccaaggtaaacaaaagctgaagacaactttgctaaaactaatgtgataataaaagaactcaaaccaaataactattgatgaacagcaatggggaaaagtccaggctctttgccaggaagggatcacgagggatacctgccttggagattgaatccattagcgcatgtgtggggaactccctccaaaaccatcgcggctgctgctgtccgcttggcttctctatgaagtgacagagaacttagtcctgactattatcttgacagaacggagagaggagagaggcccttgccaagagttctgctgttacaaaggctgagaggaaacgggaagaggaagaagtatttcgggaaattttaaaactccagagtgcaggaaccaaccgttcagtgcatggagaaaataaagataattgtgcagtttgtggaataatagaaatccggtctatattatctttgcctctgtttttttttttgttgttttttttttttgtttgttttttgtttgtttgtttgtttgttttcccttgttgctcttcactcccagctgtggtcttccagtgtattcacacccattagatagctcagtataaaagccgttggaaatgcaggaatcatgaatcctgtggtttttattttgtctaggttttctgaatatttccaaagcctctacatgctgagaggagcatggggttttacacccatagtttaggtgtcttcacgtttgtaatctactctcacagtggtaagtatttactctgagtattctgggggtggggtgattgttgtttttgtaacaggctcttacaacagctggtactcactctgtcacccaggcaggcttaaagtcagccagtccccctacctcagcctcctgagtgctgcgacaggtgcatatctctaatctaaccttgcttgttttcatttattgggcttctttattttaggggtggggcagaatctcatggcgtagcccagattagccttagacttttgaattctctgatttagtgcaaggatttcaggtgtatatcttgccgcacctccttcttctttgaagttcattggattcactgttgtgggggtggggatgatgaggtcagaggacagccttgtaaagtggacttctctcttctcatctttatctgggttctgggaatggaccgaggtcaccagacttctcttcaagcacccttgtgccccaccccagccccccatgagccatctctcaagccttttttctttatttttgaacacctttttttttttcctttttaccaatctgtttatttttgtgtggacaaagggtgggtctggatgttacatgccatagagcttgtggaggaccgtgcagtgggcagggactggtgctgtcattccactgtgtgcatctcagtgattgcaagtgagtcaccagacttggaggtaggcacctgtaggagctgaatgccctctctgtcctgtctttattttaaagtgagccctaggctactttgactttgaaacatacgtgtttattgggtcaagtatttgtagagtggttgaataaatgaatgaacggacgaatgaacaaatgaatgacgaatagcccaaatgcactcagagggtagtggagtggtcctcttcagagcatcccgagtaaggaatagaaacctgtgggcgaagaagtggcagctacaggtggtgttcttctgatcaactgtcggggaagaccgggaaagtacgctgtgcaaatacagtgtactcgtacatgaaattaactcatacacgatttaatttgtaattaaaattaatttcaaaagttgcagagtggagcagggagaggagggcagagtctctgtgaacaccgccctgtggatgaagaactcacgggcatgccaaatgcagatgtagcttcccaactctaacccagaagcctaaagttcatggtgaggattacaaaagctccatccttgatgacagtgacactcgtagcaatttggtaggaaactgtttcctaaaataacacagcttagtgaacagattccatttggtctgaagtgaagccagcttgtgtttttctgtcttccgtttcttgagccatggcttaggctgagatgaactgctaggtgtccagggctggctgaatagctagctgccctgctgttcattgttggcaggaattcttggtgtggccctcgtgtcaaatgaggtggtcgtacccacacaacacagatcccataagcctctgtgaaatatgaagtccctggccttaaaagacaaaaagcactaacctgaagctccaactgaaaaagagcggggcacataaagtggccaatgtcatgtgaatgtatgctcttaggtgactaccttgagtagcagttatctagaaacttttctcttgctcaagaccagataagattcccagctctggggtagtctttccagtcttctctggaatttgaacggattctttttttaaaatcttatctttactttatctcaacacttctagcatattccatctatgaactccctccagtgtaaattctcagggttctctttctgttttaaatttattgattcattaagcaattcataagcatttgttgggaactggagaacagattctagactttgtactcaaaacggaagatgacctctattgttaaaaaatcctgccaggcgttgtggcgcacgcctttaatcccagcacttgggaggcagaggcaggtggatttctgagttcgaggccagcctggtctacaaagtgagttccaggacagccagggctacacagagaaaccctgtctggaaaaaaaaaacaaaaaacaaaaacaaaaaaaaaaatcctagaggtattggtcaaggacccagtgtgaatggctgctcacgtagttcattggccagggcctagtgaatgggagccagtcagggtggtccttttgtatcatctacatcattcatcaaaagcttatccaataggaatgattaaatctaggtgggtgatgattcattagtctccttgtgggaagagatctttcaaccagggctgccttgaccctccctgtgagtgggacaaggaatgagaagggttttcctagttgaaagcctcttgctgcatactctgcattccactgtcagggagagaaaggaccaggcgatggtccagtgctgcaatgggaattccataagtgggatctcatggaagccaccctgccatgttgagcctaggtgtgtgtagggcacacgcttgctctgctgtctcccgggagagattcgttttttacctctgtcaattaggcaatcttaatatgttcatcctgactaaatgaagacatttgggctagaactggaccttaggcatgaaattttccacaacacacacacacacacacacacacacacacacactcacattcacaccatgtatgtaagtgtttcgtttcttctaggaaaggaaatacactgacataatgagttcctttcggtatttcagtgcgagtggccgttctcagtcctcctgcagcactccccccagcaaggtctatgacgtctgataggtcagagaatagatgaagccctcctatgtctatgcatccaggcagggtagaggttacagaaatgcatatgtcagctggcctgaaattaaaaaaaaaaatctagtttgactttataatacatatattctttcaaatagtttttccctccttttttaacatgttgaagaaaatttgacatctcttttgccttttgtttatggagacatacctcaaaaggcttgcttatcagacatctggtggaatctcagatgatctttacagtaaaaaggaggagggagaactcaggggctaacggtgatttactaaaggaaaaacaaaacaagcaagatcttgaaaagtttaggatatttcagaatatgaaatcaatagctgcaaatggacctgtaatttagaagacagaactctttccatttttgcctcagtgctgtttcatgagaaaaatctcacagatgttagagatcagtgggctatgtcgacattaaagggtttcttttctttctagtgtttgtttagtttgaaatttagaacggtttaaagaagcatttctcagaatgtgttccatggaagaacacaagttcttcaaaaatacatcttgccaggggctggagacatggctcagcagttaggagcactggctgcttttccagaggacccttcattttctggcacctacatggcggttaccaactgtctgtaactcaagtctcaggggatctgacaccagcttctggttctttgggcatcatgcacacacatggtgcacagacatgcatgcaggcaaagcactcatatacataaaagtaaattcgaatagagaactcaccaaaaaaaaaaaaaatacccagaagattaagacaggtgtggggagtgaactgacagatgaactaaactgggaagttattctgtagtgtgtgttctctcttggaagctcacagtgtcaggatttgaagactttggaaagaaagaaaaagaggtcaatagagaagattctaattgtgtgtgtgtgagtgtgtggtatgtatgtgtatgtgtgtgcatttacatgtgtgtggaggcagaggatggacaaacttggctgccattcctcagacagacaaccatcttggctttgctcttaactcgccaagtgggctaggctgaggagttggtgagcttcaatgatcccgttgcctacacctctccaacactggcattccgagttttataccattatacttgggcttgtttgtttgttcgtttgtttgtttttttttttttaatgtgggtactagtaaccaaactcaggccttcgtgcctgctgcaaggcacaaacttactaagccatctccccagacagagattttaatgttatcttacctagaccatgggaattgctctttggaaaatgctaagcctttaataatcatttaatcttgaatattccttctctttatataagaaaatctgtgcagtgcagtaactacatggcccttcaactcagacaccaattctgctactgccagctgcgtgtccttcaccatctctataacaggcagccaaatagaatcaattgcatgggattgtgggaaaaaatttgtatgctagtttctataaagtaccttatagaaaatactatatataattctcaaaacctccatagctacattacgtttgcattgccattgtcagcaatggctagtgtttgcaacttggctactcataagaagttgtaatcctctatgcataccttcactccctaccaatgacatcattgctaatggctctctggtagggccagccattacagctgctatctgctccaaagctgacatactattcctaagtttgcagagcatactctcgttttgggacaaactctcagactttccaaagttccccctccccccctcactctccttcccctttttcggctttcctgacctggccagttgcttcgcatttccccttctgccttccatctacctgccttggactacctggtcctgtaactctgtcactgactgactaaatgatccttaaacttagaaactcctccaagtatcgaactctaagatatgatttccgcagagggcagaaatggaatgtttacataatttgaaggaaaagaggaggagaaaaaaaaaaaaaaaacaacaaaaaaatcacgcttagcttctttggcaagcaacctaataaaatagtgaaatttaagaagccctttggctgagagagcccggctgctcacacagcaagaagaagccctagatctgatggcaaaggttgcgttttctatcgtaagcacacctctttgccaagtgatttctctgaagctgacagaggtttggcaacatctccacctctcccaacccccacccctttgctgtattggccgataagctcaagccctgttttatatttaactcgctccagttcagaaggggcaggcctggggagacgctgtttatatagcgctgagccaacattctcatcagtcctcctccttcaagtcagcttctcttctgcgtctccatcctactccttggtctccgcattcatcctggagtggccggtggggacgagcaggaccgggaagagggagaggtgtgggaaagcgaagccaagctgccagggatcggacgccttccaattgaaaagggaagtcagctgacaaggaaagttagttaaatttaacatcctttcatgtgtaacatctgacttcgggggagaaaatgaactttgcagaggaagagccctccaagaaatactgcattaaaggcaaacacgtggccatcatctgtggagtagtggtggcagttggattaatagtgggactttctgtgggtttgaccaggtcgtgtgagcaggacacaaccccagctccttcccaacctcctccggaagccagcactgccctccctcctcaggaccagaatgtctgccctgacagtgaagatgaaagcggagaatggaaaaacttcaggctgcctgacttcatcaatccagttcactacgacctggaggtgaaggccctgatggaggaagacaggtacacgggaatagtgaccatctctgtcaacttgagcaaacccactcgtgacctatggctccacatcagggagaccaagatcaccaagctgccggagctaaggaggccctctggggagcaggtaccaattcgacggtgcttcgagtataagaagcaggagtacgtggtgatccaggctgcagaagaccttgcggccaccagtggggacagtgtctatcggctgaccatggagtttaaaggctggctgaacggttcccttgtgggtttttacaaaaccacctacatggaggacgggcaaatcaggtatgtgctgtgtggtgctgtgtgtgttactgtgtgtagtgcagagctgtgttatgctgtgtgtggtgggacgaggtgtgatacagtgtggtgctgtgctgtgttgtgttgtgttgtgttgtgttgtgttgtgttgttttgttctgtgtgcggtgcggtgcggtgctgagctgtatgtgctactatgtgcagtgtggtgctgtgttatgctgtgtgtggtgggacgaggtgtgatgcagtgtggtgctgtgctgtgttgttctgtgtgcggtgcaatacagtgctgtgtggtgcttcctctgaacccagtttctgcagtgtttatttttgccttttctctttgcttcccatctcttgtgttttgtgggtctgatccctatctgcccttgctttcaattctgcttgttcatctgagaagtaagatgttttgccttcttgtaatttgaaaatgtatcaccaactcgaagttgtaaatacaatgccagttgtagagaattcagtaatagtgaataattgtaaatacaatgccagttgtagagaatttattaatgacaccgggataaatcgcaactgcatctgactctacacatccacacaaagtgcctcagaggtttatgaatataagtatttgataaatttcactactggtgttttggggctatatcacagtgatttcacaagggatgacaatttcatttgcaatgacaattacattaagtgtcaattgttatttcgtgcagtttactggagaagaatcgtaacgaaaattacaaaagatatgacgggtccttaggtgttcatctaagaagaaaagcctggctgtgttttctcttcttctgtgatcagaactatgtttctaactaggctttcggggaatgcttaaaacctggatcagtgatggcatatggataaaccttggagctgccaactatcactaagcaggcaatagtaatgctaaccaagcctttaccacataacaggcagccacaagtatttttcttccctgcagtgtcccaagcagaagtgtttaaaatatacattaaataattataattataaaactaatatattctacctaatctattactttctatctgatattcacgtgacccagtggcttttatcagttcttggtaaacggtgtaagctccttccttgaattcacaaaaccactgccctgtgagaggtgaccagggacccaggccatgctacacttgagttgtctctggacttgaacttgcttagacatttgcctccagagattctgcagagttaaatgactgaaaaaaaaaaagctgcatgtcacctttcaaaactggagccagggtcaatcctctgtgaattcctttcctctgttgtctggagcatcctttggagcaaaggaaaatctcttggtcaaatttcttcctactatttatcagagtgaggactcagcctcacgttctgtgtggtgcgtgggcacactaagtagaaaggataacggaaggaaaaccatgataaggaccacagagatctgccatgctagccaccaaactcattgacccctcccctcccattaaaaaaaaaaataacagcatagcaagacgtagaaccatttttacagctcacccactaatgtgttaatccgcacatactttcctaggcaatcaaacttgaggctgagttacatttatacgtcggtatctatctatatggatttaaaaatttaatatataagccttttcttttgtcttaattatttagaagagcctgatattaaaaattgtgcactgtctcatctcataaatgcattgaattctctctgattctattgttgaacttctgtgcttctaatattctatgattttttttttttttaccacatcagattttttaccacatcactgtaaatccacctgtatgtgcacatctgcttattaccctgggttggttattatcctaaacgttgaattccctggtcaaagggtaccagtatgacgagagacttttaactttatacatgaataatacacagtcattgcagggaacctaagaacaaaccagggaaagatttaaaaaacaacaacaacaacaacaaaaacccaaacctccgccaatgagttgacttgttctttaacattcttccactgaatgatacactggacgcatgcctcgatacaacatagtgtaacacacttagtttttccattagatatggctatgaagttgctcctacacaatgtgtagaacaactgtgtagatgatcacttatgacaatctccagtttgacttttttggtgtctttcatagtcctggtagtgtttaagctgaatctttgatattacagtggggttcacacagaggcaaacaagaaggttaaaaagccaggaaatcccggtgggaagaagaaagcaaatttgttggcgaggtttctgtaaagaggcgaattagaggtaactgtgggaaagacacttggagaagggaggtctcttgggataaggaaaaagtgcttcgagtgactcggcgtcagggatggtgaaggacagagctctccatccaaggataggagagatgctgcaatgatcagtggggagaggagggcaagtcaggtgacatcacaaggggggacaaaaggacacacaggggaaaaatatggaggaaaaataactcaggtctggtggctggctgatggtggctgaagttatgggctcaagacatccaagatctagcatcgtgtgatggttatgatgttcgttgatactggaaactggacaaggaattggtggggaagaaaagttcagttttagacctgtcgatgcctcgtagacataccgggtaggattctagctaactgcggctgaagcaaaatagtaaagtttatgataagatttggtaggtgtgtgagaacagtgtatatacggaaaacatattattatcacatacacacacgtttataattggtcatgaagttttgatcttgaaattttagttgtagtcagatgtttctccaaacattgaacgttattagtgtagagtgaggtctgtgaggtggtctatgcttggtgcaaggctgccaattctgctttcttttggatgcaagaaaaattgacttggtctcctctgcataaaaagtaatgtgattttgacttaaataatgaactgactcattcagtccaccattcaactccagtgggatgtgaatgaccatggtgcatcaacggagcaggccttgagcatgactccggaaccctctacagactgtggacagggtgctggtagttgctaccactacatcagaagcctttctactgaagggtttaacccaagttttattgtttgtcttgctggctccagttattaagtggctgaacacagctgggggagtcattactggggagcatggtgccagcggttttgttttctaaagttgatacagagtagccatggttgtgagttatagcactacccctcctgcctcagctttctcaaaagcaccttggtggggaagacacacataggttctcccggatggtgagttagtaagctatgaggagtgagattttagagtgctcagtcaagtgaatgacttattacttattacggtggagggaggcctcatcgagaagtggtttgctcagcacatttgcctgctataatcagttactcagaatagtgcagagtaacttccaggtctcctgctgctcttgggcagttctcgttcatttgcagtccaggtcagatttcaaaaggacttttaattgtgaagtaaagattgtgctataaaatcattttataattgctctattatataccttattttcaaatttgcttagcgtgtagaaaagtctggtgacaatcgaaagagttggtcatatgtcaacagagttttttgagctctgcagtagaccaaaggagaaacaagttacttttgttgttgctgttgttttaaaagacagtctcactaagtagctctggctaccctggaaatccctgcatagatcaggctggcctcaaactcacagagatctgtctgcctctgcctcccaagggctgagattaaaggtgtgcttcactacctagcacacattatcatttttaaatatgattgtattacctgtaggacttacacaaaacatatgttgttttttccccccccaatgcatagtccagccagataaatgggttttaaataccttagattgcaaaaagcaccatgtcagaaagtctggacctggtgtggtagtgcatgtgttaatcccaaagatgcgtgggcaaagacctctgaccggaatcatcatggccaaattaattaatgaaagcttttttggctcatgtgcatgagctatctacctgtaaagattgacttcaagtaatcagcagtagacatgaagaagaccaggtttttatagctcaggggtagttgggcctcagacctgggacaagtggctgaggtgcctatttcaaataccaaggcagacctggcctccgggttctcccagcattccctgccctctacactgaactttccaacccaggggctgggctctgtctcatccagcagctcttcactgtataatccagacattgtggttctcccttcccctctcccctctccctccccctctctcttcccctcccctcccccctctctcctctgtctctcttctctctctgtacctgttccttccactctgctctttctccctctgtgtggcaatgtcactgacccccttctgtgtggttggtgaacttgcctgagaacttgatatcaatggggtgtttcaaaatgggagatctgtcgggcaaaataggcagggttctaggagcagactgtaagcataacaagttagtcataatgacctcctgaaacagatacgactgcaaggtggtcgtaacaagaggtaggtagtcataggtggatataatataatatatgatatgatatgatatgatatatagtatataatacataatacataatacttaatacataatacataatatataatataataatgggttaacaacataggtggttataaaaagcttttgaaataaagacttggtacctgtatcatggaacagaaaccattataattatagttacaggtagggtatatcccaatccttgagaaacagagttttaaccataaacaggaaagaacctatttgtctttactataagatagtttgtaaagctaaaatggaggcaggctagtccatcacctgcttataatcccagtacttggatgactgaggcaggaggatgaggggttcaagacctgcttggatcacacagcacggcccttcttcagaaaggcaaaggttacataatttatcttctagatttataggggtgtgtcttgaggagttacttcacttgatgatccccaaggtgtgacaggcaaggctcactctggtgactaggttctacccaccctgaagaaactaaatggggttttacaacttgctgaaggtcacatgtgggaagacaaatggttagaatctgagaatttctcctcttagaagagtttgagctttaaaatcccaggcctcttcatttagacaaggaaaaaaaacaaacaaaccaaggaaaaacaacccccaaaacaatacatattttgcctgcctgcaccccggagattgacatcattcacttcccgacatagccaggctaccataactgtcttagactccaatgactcccgagaagaccccaaagcaaaacagacccactgcaccaagacactgcagctctccagtgttctgtccacaaatgaaaccaggaactctccattttaggagaacaattggtcagagtccttttaaaggagagaatgaaaaaggattaaacattcttctctcacctgggttctctggagggagtgtattcgctagtgtccagcagagagaggactttttgaaaacctacatgatgagagggtctcacctggaagggccgcttgactttctaactattcagtcattttgcctgagtgccagatccctcccaatctcttctctgtctctctgtttgtgtttctgtgtcactgtctctgtctgtctgtctgtctgtctgtctgtctgtctgtctgtctgtctgtctgtgtctctgtgtctgtctgtctgtctactgtctgtctgtctgtctgtctcattattttgttggcttatttctaaggtggattaaactgaaacatgattcctttggctttgcctttgagagggtggaataatcacaaatcaattttttaaaaaggtagctgagcaaaaatgggtggtcccttgctgtatcatgtcataaggccttcctactctagcaaaagtgtgaggggttcttcagagtctggtgtatttacaatccaggaaggtttgtttgtttgtttgtttttttccagaccttgattgggtataccttcgcagaggcagagggcagagggcagagggcagagggcagagggcagagggcagagggcagagggcagagggcagagggcagagggcagagggcagagggcagagggcagagggcagagggcagagggcagagggcagagggcagagggcagagggcagagggcagagggcagagggcagagggcagagggcagagggcagagggcagaggcagaggcagagggatcgctgcaaggccagcctggtcttcacagtgagtttgtaggcagccagggctacacaatgagaccctggctcaaaaaacaaaacaaaacaaagcaaagcaaagcaaagcaaagcaaaaacaaaacaaaacaaaacaaaacaaaacaaaacaaaacaaaacaaaacaacaatgaaattttggtttactgaactactaacatcacactaattaataattattctgttgtagaattcttggctaaagtttttctaggtaacttggtttaaagaatttcagactcacagacacattacatgttattgtaatggttattaggatggttatttagaacttctaaaaataatttacccagattcactgaatatttaccttttgctctcatttgccactcttctctctctctaaataattcatttctatcttaacatcagggtatatttaatgctacgcattctctaactgtttaaaaaaaatcagagaatttagcatcagaataattatgcaactcagggttcatacgcagatttcttggggtaactcagtagtgactggcagttttcttcctcttttcagcatctgtccattttgaacgctggccagtacctccacctctttcaacccaaggccccccagccttgcctcatttttctccatgtcagtagttctgaaaaggttgggccagctattttaagaatacccctcagtttccattcctgtggctcctttatgatcttttaaaatgtcagagggacatttctatcaggaggatcagagaagcaaggctgtgtagtggctcaggaagtgatattaccaggagacacagcccttgtctctactgtcataagccagttattgttggtggtattactttttgtttgtttttttaagccagggtttctctgtgtggccttagttgtcttagaactccctctgtagagcaggctggcttcatactcacagatctgcctgtctctgatgttccaccccatcacccccccaccccccccaatgctgagttaaaggtatgcaccaccatcacttgtgatggtgacattatttttccaaaccttgtacttcaggtaatttgcatgcattttgcagaatatttgaaacatgcaaatatatctatacctgattcttttgacatttttagaagatttccattttaaaaaaagatttatttattgttatatgtaagtacactgtagctgtcttcagacacaccagcagagggcatcannnnnnnnnnnnnnnnnnnnnnnnnnnnnnnnnnnnnnnnnnnnnnnnnnnnnnnnnnnnnnnnnnnnnnnnnnnnnnnnnnnnnnnnnnnnnnnnnnnnnnnnnnnnnnnnnnnnnnnnnnnnnnnnnnnnnnnnnnnnnnnnnnnnnnnnnnnnnnnnnnnnnnnnnnnnnnnnnnnnnnnnnnnnnnnnnnnnnnnnnnnnnnnnnnnnnnnnnnnnnnnnnnnnnnnnnnnnnnnnnnnnnnnnnnnnnnnnnnnnnnnnnnnnnnnnnnnnnnnnnnnnnnnnnnnnnnnnnnnnnnnnnnnnnnnnnnnnnnnnnnnnnnnnnnnnnnnnnnnnnnnnnnnnnnnnnnnnnnnnnnnnnnnnnnnnnnnnnnnnnnnnnnnnnnnnnnnnnnnnnnnnnnnnnnnnnnnnnnnnnnnnnnnnnnnnnnnnnnnnnnnnnnnnnnnnnnnnnnnnnnnnnnnnnnnnnnnnnnnnnnnnnnnnnnnnnnnnnnnnnnnnnnnnnnnnnnnnnnnnnnnnnnnnnnnnnnnnnnnnnnnnnnnnnnnnnnnnnnnnnnnnnnnnnnnnnnnnnnnnnnnnnnnnnnnnnnnnnnnnnnnnnnnnnnnnnnnnnnnnnnnnnnnnnnnnnnnnnnnnnnnnnnnnnnnnnnnnnnnnnnnnnnnnnnnnnnnnnnnnnnnnnnnnnnnnnnnnnnnnnnnnnnnnnnnnnnnnnnnnnnnnnnnnnnnnnnnnnnnnnnnnnnnnnnnnnnnnnnnnnnnnnnnnnnnnnnnnnnnnnnnnnnnnnnnnnnnnnnnnnnnnnnnnnnnnnnnnnnnnnnnnnnnnnnnnnnnggaggaggaggaggaggaggaggaggaggagaaaagtattcatgagttcatagtttattcaatgggttgtaattccatccattgatcttaatgttccagctcccataggtttggcaaatactaatcttgtctagaaaacacttgtgtctcctgacttgttcccatgattatttgagaaatttttattttcttggggtgacaagatgatctgggtcatcatggactttgttttgttttttgaggggatttctctgtatagcaggcttggctgtcctagaactcagtatgtagactaggctggccttgaactcagagatctgtctacatctgcacccaagttttagaattaaagctatgcaccactaccaaatggctactcaaccttagacgaaaccccttctctaaggagccctggatcctgttagtggagaatggcatttggaactcatcatttgggaacagagtagtgtctgcaaagtgtattggtaggagtatggtgtgtgtatctgtgtgtgtaaggatggggcttaatagtacctttagaataataaaaagagctaataacttagcttttgttgttgttgtggtggtggtggtggtggcggcggcgttggtggtggtggtgtgtatctctctctctgtctgtctgtctctctctctctgtgtgtctgtgtgtttttttgttttggaatttgttgttgttgagacagggtctggctctatgtaccagactggcttgagactaaaagtaatcgtttcccaagtgttggaattacaggggtaaaacaccccccctggctctttagcttactattctttgtgacatagcttctctagttcatgagaacctatgttagtcttgcacaaattgttggtggcatcaatcaatgttaccttatttctactgtttttaatttctgttccatccaatgagcaaatataaatcatattcttttactgcaacacacacacacacacacacacacacacacacacacacactgtattttctcttttaatttctagaaatgttaaacattaacagtaacagctagtgcttacaagcacatacctagtagcagccataaggaatgctgctgtcttttcaaaagtgagctgagtgactatgaattttgagattatggtgggccttgcacacgtcaagtggatgatctactactgagctatgccctcagtcctcaaaatggggcctcagagcaggttagcatgtacttcaccagggcaatggctcagcaccaattttgcctggaaatgaacatgagttctgcccttggtgtagcataagcacaaaggaatgttccgctgggcagagggagggtttgagaagatagatactcccctgttccatgacaggacacacctgctcacagctcccaacacttagaagcaggcagctggggctgcatgtgtttgccccgttgttgctcagaggttttaggtcgagcaccctcagaattctaaaacgtgttgacagacatttgatcgtttcttagacagagctcatggaaatgtaaatagttataataatgtagcccctattttctataggcgtagaaacacaggaactgtcagcagggctgcatgcattgtgtttctgtttattcctaaggagcatagctgccactgaccatgaaccaacagatgccaggaagtccttcccttgtttcgacgaacccaacaagaagtcaacttacagtatatccatcatccacccaaaagaatactcagcactttctaatatgccagaagaggtaagggtctttaaatttttgttctgcacacactcggtttgcaatactactcaaactacttgatttactatagaagggaactctgaagcctgaaactaaatatgctatagctatcaatttaaaagattaagaatacaccttagcaatcttttttttttctttgcctctaggaaattgtcaacttatgacatcacagttcagcaataaattcaccttgaaatttttaaggaagaaagaatataatacatagagatcggctgggggctctgcttagtcacacaaaccactagtcatgaaaaaaaatcaatgacacacttaaagttttctaggctggacttactatttagacttttcggttcaaaacaagccctctttttaaaattgataaagctgtgtaaaaaaaaaaaatcattactccaattcttggttcttcaattcagtgagcaccatgcctgtagattttcctgcagaaattcaagcattgaattagtaatgggctgcaataacgctgcctgggcacttgttaatacaggactctttcctgtgtttcctcttcatgatgggtggcattgttaactaaagaccattaccctgaagttattgtttattatgcacatcccacatttcatgcgtaaaagagtcaggctcactcttcagtataattgatctctgcctggaaattatacctcccatttttttctgattcactattggaaatatcactgaaacccatcctcctaaaataaactgatccttgaaaaggcacaaaccaaagacagcaaatgtgtaaagactaaaatgtaaaatgtccccagccccagaacaaatccattttttcagatcgttttctttgggaaattcagtttgcattgaagaagaaagagtaaagggtaaaattttaagtttgacacatgagttaaaacatgtgatgaaggcacaggtgtcatcagagtgccttggagtagatgaggggaaaggaaggtggggcatcaaaaagacaaactgacaccccttccctgagacctagtcatcttcaaagactatatatctttaattctgctagattcagatactaattgggagacggatgagtctctgggttgtcagaagaaagacctaaactgacaccagtagacttttattgtgaggtaacttttctctatggagcatgcatgtacccacaaatggtaagactgtttgcatctagagagtggttatatgcagccatgtgaatgtttaaggagcaggagttcggatgagggctggtagttgatcgacagaaggatggcagaactggtgtggataaagaaaccagataagttagtagttgggtcaaacaatggaatccgtcctgacaatggtaaccagggccttgaatttagtgtccgtaccttggctcttcaatgtagatagctggagttggggaagaaaagctgacactggttattgacacagtcattactctccttacacatggtgaaaccagttcctgcctgtttagttcttccttctgcaagatttagcctattcttcattaagggatcaaatcttaaaagatggtcagcactgtgcattttttttttcagaaagataaactcctgcccagttgatatgccagttaaacttacttttccccgagaaatctgatccaaggtgtgagtcagtcatttccagggtgttgacaaagcaaagtgacttttctacaggcccttcagtgttaccactttgcatttgaggtctgggctttaaaaatgaacttctgagtagggagtggggcttaggggactcatttgtcttattcatggttgatcttgtgataaataaaagctgctcttctgtttcccatagaaatcagagatggtggatgacaactggaagaaaaccacttttgtgaagtctgtcccaatgagcacttacctggtgtgctttgctgtgcatcggttcactgctatagagagaaaatccaggagcggcaaaccagtgagtcttactagattccagacactcaccaccagtgtgtttgcagttaactttctggctcttaaaaaatacttgcttattagtttcccgtacaatagtcaagaaacctaatgggtcaccaggttctaggagtgggtgatcaaggaacaaaagtgacagccatgcctgtgcgcagccttgaattattttaaaaagagactcaaagctggctcctacatagaccagtacaagtctgtcatactttatgaccctatccaacttcactacaaggcgaggcacctgtgttagaaggagatcctcaggagagctagggtggggaggggaatattctgcaagcatccaggagctgaacagttcacggttgtcatttctgtgtgtaattaaaaccaggccgcagcttctggagatcctgatgcaaaacaaaacaaaacacaaaaaaataatcaacaaaccagcacagaacacttaaaaaagttgacaacatatcagaagtagctttgaaagtatgagactatttgtattttaaatgacagcttcagtaacttcctttaaattttttttggtatttatttatttagtatgggggttgagggagaaggtactacagcatggtggggaggtcagagggcacctagtaggagtttactctcttcttctaccacataagatctggggatcgaacccggatctttagagcggcaccaaccccctttcctgatgatttatcttgctgtcccaatgacttcttttcgacaaaccaaaaacattttaatctacaaatttttttttggtgagggggagggttgaggactagagagagggctcaaaggttaagagcaccggctgcttttccagagcttctggattagattatcagcacccacatggtggctcacaaccatctgtaactctagttctaggacatatgatgcccttctctggttacctcaggatccaggcatgtgcatgatccacagtcatgtgtgtgtgtgtgtgtcttttcacagtatgtattaataaggaagaagtcattaccccatcttacagatgagaaactcaaagccaacagagttaaaatgctttgctcagggaccatctggggagtggtaggagtggattcccatcctgtattctttccaaagcgtcacattctgctatgttgtctgggaaatggagtgttctgaaaatcgcactaccttaccatcagtcattgagtgatcatcagtgagccaggtgcttctgcttcccacgaaactcgctcctgggaaaacctgccttcctttagctcatcagtggggttgatacggagacaggcaaagcctgggttttcaatatagaagttatcgtgagtggggaacatacaatgaccttctgcttgggactcgggaaggccggtccagcacaactgtttctcacacctgtgtcactttgatgtgactgttagtgtgagtgagggcaccaccagttcccgaagctaataaggtgtgttgggggaatggcatcaatagaggaaattgcttttctagactgttctcataggcagcggtttgcttgacataaagttgagtctattagtctgcttcatggttttcttcctgtgtcatagcaaatgtgcaatatttattgagtgctttctttggaacccacgataaacgaccattgtcatatacaggtgtctgtcccattacgtttttacaataggattacattctgggtacttttgttttctattttgagtagaacatcgagacaaggaagaaagtttgtgctattcctctatgctcacgtaggcttaagagtcaggatgcagccaagcggccagccgcggacattccacccttagtgatgttctaatagcaactgtgagctggcgtttcccaatggctcccttgctgagtctcccacgcagctctgctgcctgagtgaccattatggcttggatcatcgtttggctagattctacggatggattttatgtaaaggaatagaccaacatagtggaaaaaatagcatttagcaaaagacctcaacagtagtaaatacctcttaaatgactctcctgtgaaagctgacagcagaatgctctgtcttaaatcagcagtgcctcccaggcttcagaaggggagcgaggatatgctgtcacaactattcctttctggtctgtttcataagagactaacagaactgaactgctttctgaaattccccggatgctctagtcagaacccagcgaggtggtgacactggagctgactccagggggcgccttgccctccgtctcttctgctacaatgtgggatagtccccctaaaagttggactgaacttcacctgagaacacgaggcccctaatgtgcatgctagtgcttcccaaaacttccttttgcccctgccagctcttcacatgctcactctgaattgaaggctaacatcggcaccccagaaggaaatgcgcccagtgtgagactcacttcagagagacatacaaacaaacaagtaaaatccagccgtcttagacccacagatatgttacagagaggaaacccaccaagtcttataactcttctttaaaaaatggactataaatagttagttgaaaaactgcctcggaatttttggtgtaagagtcggtcagtcaatacagcctcgtgaatgatgtcctggcctgttggtttatagcctgcctttcactgactctcttgctacgatagtgcaagtgtctccggtggttctcaggcagaggagaatgaatgtctacatggccatgtcgcttccattgacagtctcccaggttttcctgtatcccgtgatgagctctctccaatacagactttcctggatcatagccggagatatttatcatttggaatttcttaaagtatttctaaacagaaagagaaaaacagttctccatctaaaaccctccattgtccctcctgtacgatgattttctgttagttttactcatttaacctcgactcttacacattcttcaatttttaaaaataattttaaaaatttaattaaaatatcgttacgtcatttccccttttgtctctttcctctgacccgtaccgtgtcccctcccttcatttgtcctgtaatcctccttactcccgcccaaactcaagtctaataattttgggatggcgggggctcgagacacagtttctctaggcaacagtcctggctgtcctgaaactcaactttgtagaccaggctggctcaaactcacagacatccatctgcctcaacctcatgagtgccgagttaaaagcacgaactgccataccatgcccagtgttagtaattctttctaaaaacttttttatacagtatattttgattatgatttcttccccacctctccaatgtctttcccacctccttacccaactttattctgtctgtctgactgtatgtctgtctacctgcctgtctgtctatatatctatctgtctatctgtctgtctgtctatctatctatctatctatctatctatccatccatctatctgcctgcctatcatctacctattctttctctctctgtgtctttcaaaatcaaaacatagaaattaaagtcaaaacaaactagccaaagaccaataggataaaaatataacaaagccaaaccccaaaaatggaaacaaaaagtctgctaagaacccatgggactctttctgtgttggccagcgactcctgggcatggggcctaccctggagtatagtagatgtacccagttacaatctgttggagaaaactggttctcattttgccggtgggtgtcaactgcagacagcttcttggttaggtacgagatcctgtagctactcggtaagctgaccactccaacttcacccactgcttcttatcacaagctctgtagagactcatcagttaacgccctcctgtgtcttatgggtctcccactttgtattttatccacccactgctgcatgctgggagccatttcaaataaatgtcacaggtctttggggggatggttttacattagaaatcacatgtttggatttgtatgaaggcaatgttttttcaagtactaatgcattgatacatttcatgggacctggggtagtacctgataaagaattcatgtagacatagtgatgtgtgtgtttgtgtgtgtatgtgtgtgtaacaggaaaaagaaaagatatgaaaatccacctatccatctatcaattcaggtccaatgacattgccaaatgagttaatttagttacataaaacacttttgatttccagggctcttggaacttctaatagtgaataagaggttgtggaagcaggatccacataagagtttcagtaaaatgatcagcagttacgtcaactatggcattctatttgtagttgttcaaaatccataggcctgataggtagcctaagaagctccctgcaggagaagagctaacatcacctgcagtgagactcttaagcgaatgttgggaaggtttatacaaggtttggggtttggatacaaatagggttggggcaaaggatggtatagagactcattaagtagttcttagttggtccaccatgatagccaagtccgagagactagagacactggaacgaaaggcatcgtattaaaaatgctaaatgcctgctttatggggctggagagcttgcacagcagttaagagcacttgctgctcttgaggaagatccaggttcgattctcaacacccacatggctgctcaccaccacctatagctaaggaatctttctgacactccctctggcctgcttagtcacacacatgatacacagacatgcatgcagtcaaaacattcatacacataaaatatgacaaatgaacttttacaaaactaagcctgctttatagtagggtccagtataagagaaaagctatttattccctttttgtcaacttggcttcccactccaaacagacagcacaaagcaccggggtggggtggggggcgtagtgtagacggcagggcagtgtcaagagagacagctctccctgaaatgtctggtagagaatgattgtggcaagtctagcatactaactcactgacagacgaaaggttctgagcctttctatggacagcaaggcagtgccaagctgccatgctggctttgatttttcatgccaggccaccagtattctgcttagtggctgccaactgggcccttgggttcagttatcacttggagaaggtctgtcattgctcaacaagaggctgggagaagggagtagaaatggatcatctcatctcttctggcaagtaaaggctaaaaagctcaatgaatgttgagaaggtcactggctgcggtggggggctcatttctctttatgccaaaaaggtgggatgatcagctaaaatggggagcacaggtcatataagggacactttcattatctgccttttatagtgtaggagttctccagagctctcttctaagaagcagggcagggggtgtatgctcaaatgaacatcaacattgtagtaacgccatgggaacaggaaatgagtaatcttgaatcatcaggtctagttgggtcaacagtcttgaacttaataaaatgactgaatctcaccattgctagagggttttggatcaggtcttgggggtaccatccgtacctcacttgactttctcacaaatgtagcggactctagtctgaagcacttctcccacttccacacactgaaactttctaaacgatcggaaggttcctcagcacagatcctagcatccagggacagcatctgttcgtctgcttagaagaattcttaataatatatatatttaataaagtcatggatgattagagttgggacaaaaatctgcactcagtttggtttgtaaattaggtcacaggaacataaaataatctgccagcacctcagaggatggaaggttcttactcactccctcttgggaaaagtttgagtcatcgtattttaggctctgggagtgaaattggagcatagctgggccatttagaaaagcagagtgtaatgtcacaaagaggaaagaatgaaatgagtttgcttcctcacagggaactgtgtacacaggacaaaccagtgggtataaggaaaaataaatagagacatagacaccaaaaagacaatgcaagggtttgtttttttgtttgttttaaaaaatgatttgtttatttttattttatgtgcactgatgctttgcttacatgtatgtctgtgtgaaggtgtcagatctcttgggactagagtcacagacagttgtgagctgccatgtgggtgctgggaatttaacccaggtcccctggaagagcagtcagtggtcttaactgctgagccatctctccagccccagacaatacagatttttaaaaggcgatgatatattttaatgtctgacacgctatcaggctttggtagcaaacttatccaatggtttgcatgccaatcactgcgccttaagctgtttctactcactaatgtcacacagttacatcctaatgaccctttttacccaagtcttagagctgagaagtgatttgtgcaaggctacacagagcaggctggggcttcagacgcgaagctggctgcaagggcctctggcggtcagttataccatgcctcacggtttgtgggtgtgtgtgtcatcagatgaagccttatcttcctgaatgtctgtgtttccttactagctcaaggtctatgtccagcccaatcagaaggagacagcagagtatgcggcaaacataacccaagctgtatttgattacttcgaagactacttcgctatggagtatgcgcttcctaaactgggtgagaaaacacttttaattcctcatttcaagttgcctttgggttttttgtttgtttgttttgttttatcttttttttttaaagcctaagttaacctagtgtgtctaattctatcaccatgaattactgatcatctctgagtctttttagtatgtgcatgcacttcgtgtctgacgggaactacaagctcaaagatccacgctggagtctttcaaaaataatagccactctctcctcttatatgaggaagagctaatctttgattcagaaagcagctcctgcggagcttgctcacggtggggccaaaacagccacctacatcattagatttaaaaatcaggactccgccaatggtttgcatgcctggccctcctaagggagttggaaaacagtaagggtcagcgatgtcgtaagaggctcgtgtgcttcccacccgacccttgttgtgcaagactttccagccccgggaatgaaatactggagctccttctagagtttccttttcttcagtgtggagagaaacacatcttatttttattttttggtaatatgcaaggaaagccatattccaaatgtatggacatgctgtctccatcaacagcacagacaagcttgagtgaccagtttgaacagagatgtaactgtaagacccttggagacacttgaagggaaggtcttaagaaaaccaaccaactgcctgggctgtggtggtgcatagctttaatcccagaatttgggaggcagaggcaggtggatctgagttcaaggccagcctagtctatggatgagtttcaggttagtcagggctacacagagaatccttgtcttggagaaagagagagagagagagagagacagagacagagacagagacagagacagagacagagagacagagagagaggcagacagacagacagagagagagagacagagagagagaggcagacagacagacacacagagagaggcagacagacagacagacagacacacacacacagagagaggagagagagagagagagagagagagagagagagaaaaccaagaatctacttccctatctagtatctaccaccttaataaattccgtagaaggcaaaaggcacggtggctctgtgtgtgtacacccccacatctcattttcacttcaatggtcctttataccacatataaattatgagaggaaacagaaagacaagtagctttctaccagactcagaggaaaattccgaatgttacaggaactggaatgcagagttcattgtctttgtctcactccttgtgatcacggtgaccccagatgcagaattcacaccagtctctctctctctctctctctctctctctctctccctcttctcttctctcccatgtgcttccctgggtgtctttaacactttcagatttatctgtatactagagcctttggaagtgatgtcctcactcatatcaaaaggtaattgaattgacattaattaattataatgtccgtgttcactagagaagagattgcatgcatttgctcaaggatttgtgcaaattgtactttccaacattgtaaaaactgttggctatagggtcatactttcccaagcttgagggctattcttatgccacagtaagagcgacccctacaatgagaacatgacaagaaaatcacgactcttaccttgattttcaatgaatatatatatatatatatatatatacactattctttcatacaaatctttaagaaattttaatcaaaaaggcctctttcttacatgttagaatgaaatttcacttatttaaaattttgtgcctcatttaaattatagtagtaataaaaattatattcaggttacagttcattagcttgggaagctgtattccctgataatcggtgtttttcctgtatgcagatttaatgtggaagtgttcaatgttgcttccctttgttgggtgttatttctaaaatccagagaaaataggacagaaattcctgtgacctggataaaaaaatagagagagaaattggtcaattccatgtccttctagcttatttaaaatacaaaggaagatggcaaagggaaggtggaggaaaagaggaaagggacattagattggccgagaatcagactgtccttaaattgtacatcactcgggtttctaagtctgtgtccttgacatgcaagctgtctctctgaactcacatgttctgtcttctcagttctcatttaaaggcttcactctttttttttccctaacactgtatcccccaaataggtgctgtttataaccaacgtcataaataaaagatgggggaaagtaataaaaatgaattactgtaaagagaagaaaagacataaaaccagagaggcttggaataaaagagcagtcatgtaatccttcagagaaaagggagggctagggagggacgacacactgaagtctggaggctacaggaacttctccgtgggaatgttgagagcattaggactgagtttgtgcacaaacgatttctgcctctcactctgaaacattatttttagccttaaaaaacaaagtcaaccaaagaagttaatttggtaagagacgctgtgaacaagtggaaagaatgcatttctcaccagactgtctttttccacagataaaattgctattccagattttggcaccggcgccatggaaaattggggacttgtcacttaccgagaaacaaacctgctttacgaccccctactatcggcctcatctaaccagcagagagtggccagcgtggttgcccacgaacttgtacaccaggtagagagggcctccctgaaacaaatccacttgctttttaaaactggcctctttccacagcagtaatacaaagtgtggatgactaacgaagtgaaacagacccactcagaacatcccacgtgaaagctagtctaagccttcactaatattttactgcacagaaactttccagcggttctcaacctgtggatggtcacccggtgggtgtcaaatgaccctttcacagaggttacctaagaccatcagaaagcacagatatgtctattatgattaatagcagtagcaaaattagagttacaaagtaggaacaaaaaataattttatggttggggtcaccacaacgtgtgaaactgcattaaagggtggcagcattaggaaggctgagaaccacagttttagactgttttgcatttaataaaaacacaagagaccttcctataacattatatattccttaaattatattaataaactggagaatttaacattcctcaaatcaagatgaagtgggaaatacatgttaggtacaatactgattgcttctgtgtcagttacaaatccacgccatgaaatttcctagcacctccctactgcgagagtaagcatctatttccccgttgcttttcatttcagtggtttggaaatactgtgaccatggactggtgggacgacttgtggctaaatgaaggatttgcttcgttcttcgagttcttgggagtaaaccacgcagaaaaagactggcagatggtgagtcctaacacaatctgaatctgtttcttcgtggaaacccaactgaagcctttgacagaggtctaggatcagtgtcaaatatccgttgtgaaggtagtcagaagccaggagccaggaacttcccctgagctgctctttgccaagagcctttacctggtcattgaggcagtagggagccatagacaaacacctgtctagatgggggatcagggcagaaagtgtaagaaacgcccaccttgcatttccaggaagtagggtgtcagcccttcccaagtcttattttataagctctttgacttgagctggttgctgcaaggctgtgatgtggtgaaaacttagcagttaggtgcaagctcacatcctaaatgcatcagctctcagatgcacagcaggaagcctggccacaagcgaggtgcacgctcttctctgggtcagctctccctttcatgtccgatgagagcattgttcagtatcaagtaagcgttcaagttgtcaaactgtaggcttagtgaacgttctcagtgtgctctcaagggacctggaataaaactttccaggattgctacagaattttctttaggaaaattaagccttttctgtttgtatttagatcgtgtaagtattcgtctctggctgaatatatgcatgtgtgttcactccatagatgtgtatacctatctctgtgtagatgtagattaccatgaagtatgtagaatactgccctctactggactagtttgtgacattgagtaacttaccttgtctgcatccctttaaaaagaactgcctcgtccagttgttgtaaaggcgaacaataaagtgtatttaaagggcttagtctcccacgtgaatttgataaagaaataacaagactgctcaacttggagttatttttatctttctctgacttctgaaagtatttttaagtgacctctaaactccaatgcttcctaagtgtcgctgaaaagctactaaagggcaaatttaaaaatacaggagcacaccatccaacagaagtttaacttccctggggcgcaagagtctataacagttttcctttttcaactttaaaacttttttttttccctgcctcctgcctcttccccccatctcctcactgtcccaacttttccttctcaattttatgtccttacaaaacaaacagcaaacaaacaaatgaaaatacactcgggtgtaggaccagctactggaacatggggtagactttccagggccacattcctgaagaaaaatggaaccctcccctgcatagctgccatcaatgggggtggggcagctcctaagctaggggtacatagcataagctctccccagtccaagctgggaagtttggttgacttgatcttgtccctgtagtcccagctgctgatgtaggttaaaaagttttaagaagcaattgttgtaaatcctaccccccccccaggactccccctccccgcttgaatccacagagatctgtctacctctgcctccagagtgccgagatgaaaggagtgtgccatcagcctgtcccttgggaaatctatcttttacattaaatacttgcatcccccctaaccttctttgaaaggtgaggggaactgctctgcaaagttgagtctttaaacaatttacatcagggtttttccacccgggaactattaacatttggggcaatgctttgtttcatgggcctccctatgcagtgcacactagccagttcctgtcacactctctactgctagctcccctgtcccagtggtgacaaaggctaggaatagagataaaaataaacaagtaaaaatcttcagttgccgatcatcatgacagtaaacattgatgaattcgtaattttttgaaaataaactacacaacgggtaaataattttgtcttttattttttctattaaagtattttggtgacctccctttatcaaattctgatattaaactgtaacatttgaatagtcagttaaactccaattttgatgtttcaaaacaccattaagcccagcttggttgtaaacgccagtgaaccctgcacttgggagattgaagcaacagaatcaagagttcaaggctagcctgagattcttagtgaagccctgacttagaaaaccaaggctgtggatgtatctcagtgatagagtattttgctagcatgggcaaagtcctaggctcaattctcaggaccgggaaggggtgggggtgggattggtgtattctagaatttattactcactcttttacccctcagtggaatataatcacataaatagctgtaatttgccccccctcccttcttcctatttattcatcttgcatttacctaagagcagacaatcaagtcatttgataaaaacatttatttagtcctcacggagttcccagtttacggccttgtgtggaaaggagtctggtaaataagttagaaagaaaaatcccatgaatacctctgtgacttacttcatcagtgacaactttttgcttgaagaagataataacactccccaatgatgtgagaggcagggtacattcagaaaaacacgggtttttcttctcacttaaacctcttgacatgcaaaccgaaccaaccaacccacccaacaaacaaaattcaagtcaaactgtgattgtgggcatcatccaaccacagaaccttgtctattatgaagggcaaccatgacactgggaaatataagttaacatgacaagcaccctttttggaaatattttaagctagtagaagaactaaagtgttgatgttttttgtttttttgttttttttttttttaattagtactagtttaacagggtgagtttgcagaatcttcatccatatgaatcaaagtaacaatgacagacaatttgcagagttcccctgcgtacccagtactatgtatcaagtgctgcacatgaactggagttttgagtcctgtgcacaagtccaaagaggaggggctctcactgctagtgaccagggatctagtttaagttatgaatcaagaagagagaaagactgtgctctcagccaaggaagcccaaccatactgtgaggatcatagccatgcctctcgactgagaaaacctatggccaaatcacaattgatccctagaactaaagaatgagcaagggctttctttgattgattagaaactgttcacattccaaggacaagtaaccggaaacaacatctttggccaattgagtctctacgtcggtcaatgttcatggtgacccccaagaggggacatcaggtttggtgcagtttaaagtgcggagcagtgagaattacagaaagaggagaggaatcagcgagggcacaggcttgatcgtacagcattcatttgaaaacccagagaccttgttacaccatctgagccattgccgcttctgtccccaccgctttgaatccgtagcatgttatgaaatagaaagccgtccgagggaagtgctaactctctctgctttctgtcagctcagtcaggtgctgcttgaagatgtgttccccgtgcaagaggacgactccctgatgtcttcacatccagtggtcgtcaccgtgtccacgccagctgaaataacatctgtgtttgatgggatatcatacagcaaggtaggagatacacagcattggtttggaacatcctttggttgaccgacttttagtcaagctcctttacccgctaagcatcctaccagttcttatcttgattttttttttttttttggagagaaaatatgtcttacttttctgctgtgtggtcaacgaggacagccaactaactacatgggcattctaatggaagaacactttgatgtttagaacaagcattcaaatgcagcttagttgagggtgaaatcttcatccattgtgtgtgtgtgtggtggtgggggggaaggaacggagggacagagggagagagagagagagagagagagagagagagagagatgcctgtattttgtaggcaaggcattttttagactaaaactggatgagatactgctaggaatgtgcagcccaagttcctgtgacattctctctctcacgacatttcctaccatacctcatcccacatgtgttccatacttgtgctaacataatttaaatctgtgtagcttcctgtctttgtcactcacaattcagccattgtattaagttactgaaaagctactgttatgatggatgaaccccgacatggttgtttttataactattaaaatgatgtttatcaaaatcagcctaagtgacagcagttaccacgtgaagttgataccataattttctgtgtctcctctcacctccccccggcccccgtggcatcttttctgccttcttttaaatgattgattatccgtctgaggaactcacaaaggaaggctcagactcaattctctaagtcctgggtatgccaggggcttaaaatagtgtcagaaataaatatgtttctaagctttattcttaccgtgtccaaatgcaacgtaaaatacttgggaaattgtaatgaaaactactaagtgggaaggcaatattttcatgtatattagttgaaaactgatagaaaaatctcacaagtagtgtgtcttagtattaacccacatggaagatgctgggaatcagtgcatgcctcaaattcttgagatatataaagcaaaatgaaacaaaacttttgatataaaatatttttgtgcctacattacatatctatccatactaaaatattttggtagatattttctttttccttctgttaaaaatacttatcatttcttatgtggaggtatacttaatagtttgccagaatttcaccttgaaattagcgcttcagccaagaatgtgcggtgaggaccatttttctcttctttcattaacagattgccacctgccgtctgactaggggaagtgcagcaaccatttagacaccatttagtcactgacaggatggcaatttgagcaatttttcttcaacacttagatatttagaaacacacatacatggaaagggtgctgtgtgtgtgtgtgtgtgtgtgtgtgtgtgtgtgtgtgtgtgtgtgtgtgtgtgtctgtctgtctgtctgtctgtctgtctgtgtgttatcacggcacaataaactctgtaattcatcagaatgatcttcagaaacgctggaacacaatcatgaaatgttgcagtaatgctcagtgatactgttccttgcagtttcattaatttaattgctctcttcttccatcctagggagcttctattctgagaatgctccaagactggataacaccagagaaattccaaaaaggctgtcaggtatgattgatttttttgacggtggcaaaagtacactctactgataattcggctgacaattgtggctggctgattaagaacaattgtttgtttgtttgtttttactttcactgaacatggacagataagcaagagataaaggtatgataaaagataaaggatgactttacgtcaagttaaggctctacatttcatctgtaatgatcatttaccagaaatgtcatggggaaattcaagtggatctcttacagatgctggatactctttacatgtgtggatattctttacatgtgtggatactctttacatgtgtggatactctttatatgtgtggatactctttacgtgtgtggatactctttacatgtatggatactctttacatggctggacctgcaattaaaagatagcctagaccaggtagcttaaacaaaagaaacttattttcccacaacactggtaaaatccagggtcaaggcgctgcctttcagttgctggtgagggtccttttgtcctgtggacagcctcactatgtcctcatgaggcacagaggacaaatatttctgtatcttttgtaagagcgtgggtcttaccatgaggtcactttctcattacttcatgataaccagaatgcccttcgaggcccagatgaatttaggacataattcactacatggcaacatgacagagacatttaaatctgtctctactggtcttcccactcagaaagtagaaagccttttccttattattgatttggaagatctttaatataaacaatcatattcttataaagtcagtggctatggatacctttgacctttgggaagatctgtaagaattcatttctgaagttctgcagacgtcctatgttaacacaccactccatcctttgttaacacaccactccatcctatgttaacacactccatgggatgtttcacttcatgtttgttcttctagaatgtcctatgccaatcatctcagaatttgtgtctcctgatctttattgaggttactataatgtgtctttatagctgccccgtcttctggttgggcccattcccacctagaaatagaatcacattccagctgctccccttctttctccagcttccatctgtgacaacccagggattcaatacagccatttctagtggcttctaatccatagagcataaaagacaacatttgtacacagattatcagttctttgtcatgctgttttctaggatcatggcactacaggacaatccctcccccataactctcctgttgccatgtcttcataggtgacatttatttaatgctttgatatcttaaatgtagtggtccctattttggataaatagtaaaatgcctatgtgtctattaaaacaagagaagaaaatatttagaaaatatttagggtacatacaaagatattttgttcattaacaaaacatcctgtggggatatgtggtgcagcagctatgagcatgtataactccctatgagcttcagactcaattctcagcactcctctattgtgagcatcttcatgtagaccctgcctcccatgcccttaggtgtgcttcagtgcctgtagaacttttcacatattacgagatatagaagatgtttgttgagtgaatgtctataatgtatagggttggacatataaataaataataataaaaaaccctgggcatggtggtgcatacctttaatcccagcatttgggaagcagaggcaggcatatctgtgagttcaaggccaatttaatctacgtagtaatttcaggtcaactagggctacacagtgagtacacagtgagaccctatctcaaaataaattaaaaaatactttttaaaaagcaagagaaaagaaagcgttccttaaaaacttattatacttctattcatatagtgttcattttaaactgctgttaagacattctcagtatcttaagagctgagtttaaattaaatgtttcttcatactaacttttgtagagaactatcagaaaagtagacagccaggataaccactcaataaatcctcagaccattcaacaagttctcagtcctccttaacctagtgtgttgtcattaacttaaaaagcctcacctgagactaatatttctcaagttacaacagtctctagccatgactacaaatggtcctacaaatttaacctggctcaatggctaataggcagtatgtcttatacaattaaagtgttatggagtggatatatttataggaaaaaaaacatcaacgcactttttctttctttcaattttcaaaccggaactggtattatcaggtatctgtgtagctctaagatcacctgggacattcaccctgtcacctgactcacccttgaacacacctgtcatcacaccatggctgttgccccaaagtcccatggtctgggaaactggcgttcaaggactttcctttataaattctagctttctacccaggctgattctccattaggaaaagtgggactctgaaatttgggtcgaccagttgtctccttttctgtgttcgtcttaccaagtacagcgtcacacaacagaatgatgctgtcattcactgaaagactcctgggccacaattgcgcattgtaaaggtgcaatagatggtgagacattagtaagaaatgtatgagaaatgtatctatcttctcttgttctactattacctgggtaaagatgaatggctgatctgggaaggcctttccttcctaggacactaacagcacacactgttccttttccgtctgtgctcaccagtaccagctaacgagggagctatggcctggcttgtcatgtgatttagactcaaaagttaacatgactgtgataaggagaagaaaggaaattctgagtgttgactattaggaagcactgacctggcaaagataaaagtggtactttttggtactgtttatgtaagattcaatctggcttatatttcatgagaaacaataaactgcaatggagaagaaggagaagaaggagaagaaggagaagaaggagaagaaggagaagaaggagaaggaggaggaggaggaggaggaggagaagaagaagaagaagaagaagaagaagaagaagaagaacaacaacaacaacaacaacaaagctaagtggttgttgttgctgcaatgcttggcctgtgactggttttatttacattttggaataaagaggagacatgtccttggatagggatggaaacaacacatggtaaaagcagatggcggttggcccaaacaccannnnnnnnnnnnnnnnnnnngaaaagccaaactaatacccacacattgatccagcagtcagattcctgctaaccagtctcagacacgcctctcttcctccaaggacacagggccatttctttcattacaaaaacaggagcattatattaagtaatatttaaggccctatctagttccaagatggcttgcctatttctctgctgaaaaaatgttgcaagtgtccaaaaaacaaacaaacaaacaaacaaacaaacaaacaaacaatatttagcaagatagacacaaggtcaaggccagcctggactacacagggaaattctgtctcaaaagtaaacaagaatcagcaaaacaaaacaaaacaaaacaaaacacaacccactgagcaaatgaactcctctacgatgcttttatgaaggcattgctccctagaagatggtattaacctgtagctacagttagaactgttattatatactaagtgttactatatactaagagtctggaatgaagatcagaaacacacttcttccttcctttgtctgccctctggtggtagtattgagtagtgagttaaccaaaagaattaacataggggcaggattccaaggcagcctcagccatgtttggaggggttctgggattggaagtttgttttatttctaagtgcccagaacaaagaagaatatagaagataatgtgacctacatatagtgcttcctgaaactttaaagcaacttagagattaaatgttatatacaaagttacgccctgggaacacttgaaaagtttgatttctaggtaagattcccacacattaaatcgcacaggacagggagagagcagaaacactggcaagtctccaaagaccaaccccccagcactggccaggtaagggatgaggaaagactgagatagctctcagggtgggggtggggggctgtctcagtgcttctgaaattcccatgcagagatcttgtgagcaaaacttccaaagggacagctttctatttaaaagatttatgttttaaaagtatttgaagaataaagacttgctctcctaagtgagtaacttctcctatctactcataaccaccttgatcattattcaaaagacttcatgcctgttctcttccttagcatggcaaattcgacccactagcatttaagttcaagaactgaggaagtgtccacctttaagacggctgaaaaatggaaacaatacttaatcatatgaaaatcaaacagcactgaaatatcagtgtctggaaatgatgttttactgcaagaaagtcactgctgtttcttggatggtgtttgtgtgtgtgtgtgtgtgtgtgtgtgtgtgtgtgtgtgtgcttatgttatctcatgccatggaaacaccaggagcagttatgggaggtttgggtgaaggaagactggcctttaaagtactcatcttttacagatttacttgaaaaaattccagttcgcgaatgcaaaaacttccgacttttgggattcactgcaagaggtgaggaaggccttgtccgctcaattccgaagcaatttacattttaatatcactaattatttttaatttccccgcatttacaaactaatggagctccattgtcctcccaaccacaggcaagcaatctgccagtgaaagaagtgatggacacctggactagccagatgggttatcctgtggtcactgtgagtggaaggcagaacatcacccagaaacgctttctgttggactccaaagctgatccttcgcagccaccgtcagagctcgggtaaagatgactcactttaaaagaacaggagaaattactcagcagaaatactgctcgtacacttaggtcctgccttcgtggtatgattggcatgtgacagtgtaaaggtacagcctttaggcaacagagaggtcaaggctagccaagtggcagaactgagcgtttgcccacgtttatcttctatgtggacatggacatcaaagaataaaagagtggaagcagtggaaaaaaataaagccaggtgttgaacatgagtgggcggggctgtgggcagtatggaatgctgggagaaaggctaaagggaaaatcatggtccaaagggaactgggaaagatgttgacagataattacagtgacctccctaggcaggctctgcacttacagtgtgcagtgcacaataaagaatacagaggatctgaaaaatgggttgagtagtgagcccaggctgtgcctttcggacctactcctccgcttcattcccacccatcactcttgccctcactgttagagaactctcagaagtctggcagtgacagcaggcaggaatccagatggcttgttccccacccccttccaaatatactaaaacagtagaggacagccaaagacttccacagtggaggctccggagcaaagccatccttgcaaggagcatgggctgggcttcccctacgactgctcacgggagaggcttgtttccaaaacctatcttcctcctctgtagaaggggtagcatccaagccctcaagagtaatcaattccgttttgagagatgatttagttggtaacagacgtgccatgaaagcttgagggtccgagtttgcatccctagaacccatgtgaggccagatagagcagcacgcactggcagccccagtacctctatggtaagacgcatagtggcctcaggacattccccagaatcctcagcccgtctgcatacgcgaaagtggacaacagagagaccttgtctcatatacggtggatggtaaggatcctctcacgtccacacaagtggatatgcacacccacacacagatgcacacatcacacatgcagactcagaacaacaacgtgatcaactcaactctcctttcttaaatatgaatagacagtggagaattagaagacacatgaaaaatggctaagcatgaaagcttaaacaatcccaggtggacaaatgaaaaagtcccgactctacggacattaatcaggaaccaaaaatgggaagaaaaaaaggggggaaagaaagaaagagaaaattataagaaatattcagacttaaaaaaaaaaagctatgtgcttattgtacaagacacagtgccttcgaaaggcaaattgagaacccagaaggaagactaaaattttcaatgaagtaaatttgggagaaattctccaaaaatgtaaaactgacacaacgagatggtaactatgaagaaggcaaacctgaaagcctagtgtccgaagaaggggtgaacagctaggcacagtggcagagtctgtgggcgagtgataggacctgacccagtgtggcaggagctggatccttgccagctggcagggatagtgtgtgtagcttgtccttgggtcccatgggtgtatcacatggaaatgaacaaactctgtgaattgacctctgtgaactgagagctggttgtgaaaccctcagtggctagtggcatgtcacagaacgacagtcacaccaaaaaaggtggggcaagactctcccctagaggtccacgtgtgacccagggagaagcttgagaatgattttattttgaaaatgtttactgttaaagggaaacagaagtagtaacatgagggaactagcccgtgcctctcgtggttaaagtagaacatattgggtaatgttagtcaagttaaactggagagccaggccagaagcttgtgcccaaggaagggatgtgacagcctagggttttcagcaccagctcttcaaactttttattaattatgaacttatgtacaaattgcccaaggcaaattcccctgaccatttaagcagcacttcactttgaaatttaatcaaattatcttatatataaaacacataaacttatacatgggaccaagttcatctaaacacttctaattaaaactttatttctaagccagacagtggtggcacacacctttaatcccagcacccagtggggacaaacagacagatttcaagaatttgaggctagcttggtctacagattgagttccaggatagccaaggctatatataaagatatcttgtctcaaaaacaaaacaaaccaaaaaaaccccaaaactagtaatttcaaagtatgaagattcaactaagatgtacaaatctgtatcatctacatttttatttcttgtatatttttataaatctagttaaagcacaaattatagggtcagtggcttagtgggggagggcactggcagccaaatctgatgacccacatggaaaccacacagataggagaggatctttggatctattttatgggggggaaatgtgaaaatcgaggcagaaagcggttatgcaactcattcaaggttgctcagagaggaagtgatgggaccttcatttgaatgcaggcagactagctacaaggctgcataggaagactgggggggtgggcaaggaaggagagggagggaaagcctgggacagggatgcaagccacaatagagggtggagacattggctaggatagtgagaaatcaagggaccggagggagaacactgacagatgacatttgtattttcccaagttccctccagtgacaacatgcgcattggatgttacagtgagtaaggcagcaacatcctctgtcttgcaaaacaaccttccactaggcaggtttcccagtaattgtttcctcctgtcatgggtagccactgatttattaagcaaagacagctcttgctttgtttgagctagagggattggagtaacaaacaaacaaacaaaccagaaacaaacctcctggtttatccattctggtctatacagacccttcccctaaaaaaattacaactaagtgaaccaaacacatcattaagaataaaatccctttttgttaccataaatttttaaattttattcagcaagagattacagttgtagcattgatacttaatctttttcttaagtttttaaccagatattgtatgcatcttattgtgattcctacaggcatgaattttagcctctaaaattatcataaagtagatttatttgtgttggatttataaaatagaattatatactcacaggaaaagaaacagaaaatctgctctttcttcctcactgagaacaatttgttacaaatcaatagtagctgaacaaagaagcaagagatttccaaacggaaacgagttttcctcatgtttctccttatcaaaatattagacagcaataaatactttcaggcatcctgctatcttgtataattagcatatgtgaataagaatgtctaagcagcaccttcacccacagtggggtgggtgggactggccctttcctaggctaaggcttagccctccctcttccaagctgctcttttgtgctctcggttacactgtgggctgactgacctcttctgagtgtctttctgtttgcttaatccaagattaggagaagcatagagcagaaagttctctcattcagatgaaccctatgtgagtcatattgtggtctccgccatctcttcaaatgtctcatctctgtctgtgggatttcttcctatcaggaccccgggtgcccattccacattaagagacagaagattgggagtaggggtgccatcatagaagattaagtcagtgtcagcggcaaaaattagactggccatatttagcactgatggagcctgtaagacagtcagaacactagttacaccttcaggaacgacccctgatactgctgaatttagataacatgtaacagccttcatttacttggctcctgctcttggacatattatgctcccaaatctttttctttactcagcggagattaggtacaatatcaggattctaaaattagaagagagcagtagcgccactgccttccttcattttgacttacggcactcttagacatcccaggatagcgtgttttatatctgtttccagtaacacatcttctaccagcctttagtgtggtagagtcccagggaggagaacaccctatatgaagactgtgctcatagatcatgaagcccccagctgttccaggttgggtcaggctggcactagggaagatggggaagctcgactgttcttccggttagccctgcactagcagcacggcaagaatatagaatgggatttgttacagtctgctttgttcctcttctgagaagtcgtagagctccctaaaaacgtacctggagatggcaagtgaaggagggagcagggatgggggtgggggcacctgcaggagtgctgtacgaagcgggatctgtagagactcgctggctgccaactacagggaagctctggagcctgctcagatgtacttggcagattaggtaagataggttgtcaccacacccatccaccacgaaggaagaagggccacattcagaggaataagtttcctggatctttgggctttcaggctccagcagcctgagggcatctgccacgcagccagtttggaaagcatacccagtcagggaggggagagaaatgtaaggaggtggcattgggtaagcctgaagcatccacaacagtcactggagaaccaagggagccactggtctcctgaactatgtagctattctactggagacaggagggtggcaagttcaagacttgcctgggctgcagaatgagttcaaagctagcctgggaagtctaaaggggctttgtctcaaaataaaaaattaagtcgtagctcattgttaaagggcatccttggcatgctgggggtgggggaggctagaatcaaccctctgatttcacaaaactgacacaaacagtagaacaaaatcggcacccctttctcctcccctgatgtgactgaaatactaaatagcaaaggaggccactgaaataagcttagggggtgagtttcccttgcagcaccgatgtcatggctgcagttagttactaagcgaactttagagacgaacacgtaatgcttagtgggaaggaaggcagaatttcagtataatttgataaaagaaaacacaccatgcttgaacctacataggcttgaatgcagaggatctccgtgctatgattccaaatgctacatttatacaagttgcattgtgcaaaaatatttctttcaaaacatttttttactgaatattggattttcttctcccttatctaatttcatgtacattttatagatttatagaaacagaactctctggcatgacctatcttcttcccagaagtacattttacagattgtgtgtgttgtgtactacgcactgccaatcatttataaggaaaaatgtgttcatcggttgattttgatacttaagcttcccatgattaagtgtttccttcttaaaatttttagttacacatggaatattccagtcagatgggctgataatgacaactcaaggatcaccgtgtacaataggttagacaaaggaggtaagtatttatttaacacattcatttcttctgtgaattgatgcatttcaggaaacaaacagaaacacagcaaggccaaactttcagccaaaacttgtgagtttccgctgaaagtcatctctcagctaacttacccacaaatctaaacttttgtctacgatgagaacttccccaccttgacacgatcctttagtgatttatcatggcagacaagaaaaaatcgccagagccaaaggaattttacttacctgtcaatcactgggaaatcaagccgttaggttccgacctttcctggcttcctccctgcccccacccttccgtcctttcttccttttctcctctctcttctgttctttatatcaaagaaggaagacattgaaattcttaaaatattacacgaatggcctgatttttacatgttttctctcagttagaaaaatcaggggcagatgtgtttcttcttctctctccgttgacttttcttctccttatttgaaaaaatttagggttctttaaaatcaaggaggtgttattacaaacctccaaattgttgggcgggggtgacaataagtaagagattttagcatcaatcccaggggaatcttgccttttttgtttgttgatttgagttgtttttatcttatcgtttctttctttctttctttctttctttctttctttctttctttctctctctctctctctctctctctctctctctctctctctctctctttcttatttgtgcactttgcccttctagctagaattcaagtctcttgagagcagagaccatcttagtacatcttgtatcacatgtactaagtcatgaagaatcttgctttttatgctttaaccatcgtaagtgttttgtgttgcaaaacacttcttatctaagtcaaaatagatttcttctttctgtcccacgaaattgtggtctcagaacagcatattctgtaggctttctctagggtttcttgaagctaaaagcatctgacatttctttatctcttctacctggttatttgtcctcacgtcgcctaactcatgtggataacctgagctggggttttagttcaattggtccaatgcttatccagcatgcacggaactctgggttcagttagcagcaccacatataacgagatgcagtggtgaacagctgtaatcccagcattcaggagctagaagcaaaaggatctcaaagtcagggtcattatcagcagctaccttgtaagttcaaggtcaccctgcggtcaagggaagcttgtatgtagctctgcctcaaaatacaaagtttaaaataaagtgtatcatccaaccctcttggataagttcatagctacatgctagcatcctctgtcctccacatacccaagcctcaagcaactgctgaacttatgccagtgagaacttagcttattctggagatcagttttgtgaattggtataacactggttttctactgtctcattttaattaacatagactttccagggttcattcatgttgcggcaaggatcaatccttccttctcttacataatgataatagatatatgtttatatatatatgcatatatatgtatatagaattctattttcatgtggatatgtcttctcttctttacctgtccttcttttggattattttaaccctacagaatactgttagaatcgtttgtgcagtagtttttctgccttgggtgtttttcatctttgctatttcttttttcttttttttacttttattataaactctcttacatgttcagttctagtgtcagctctcccatattcctattatgaagttaagactcatctccgggctgttcctgacagaaaacatattcataggaaatcacacccctttcttaggaaaccacaccccctccataggacaccacaccccttcttaggaaaccacacccccttcatcgtttatgctaatgattgtgatgacattgtggccaatgactctgaatccttccagaaatcccaaatcggtgcctttttgtctcttttggtctgtctgttggccattttcctactcacaggcccatgtgccaacagaaagtgaagagggcagaaagagaaataatacaaatgtcccctgtcattcataaaaagcagaacaagaatgttgggatttgagcgccttcggttgaaccgtcagcacacattgaccctcagtaaactgttggtcactgtgttcagctgagggtcagaagactgtcttggcagtcgcttgatttgctctttacccatttaaaaacatgaataattcatccactctaacacagttttccccccagtgtttggatggagtgagcatttcatataagagaattttgtagatagtagaagctcactcaagtgcctcagaaaacaaatatcaagagttcagaacaaatattcttctagtatttgttatatatttattagaaagaatttctggaatattcaatccttaactcattagctcattctctgaggcaagtttttggtttgctttattttaagacagaatctcacgtaaggcagcttagcctcccacttgttacgtagtcaagggtgaccttgaactcttgactctcctgatgcaccttgagagagtgctggaattttgggcctgagcctgtattccggctttatgccatgctgggggagaagtcttaagatgtcacgcttgctcggcgagcaccatgagctacattcttagctcaggaaggtatttttaaaaagtagttttggggtcagtttgggaatgaaagctggaagactgaagtgtaaactttcctatcctgcagtcttgctgcctagggcagatctttggatgcacaggttctgccgtgagaggctgttgccatgacgcaggtggtaaaaaggcacccactagacaagagccagggcagataaatgggcccagggaaggttgctatggaagaaaacacctaggtcaagtgctcagactagagttttagggtaataggattgaccaagtatgggggtggggtagtgggatggggaggtctgtggctcagtcagggagcagagtgtaaaagcaagaggagagaaggcttcctgcgcccttcttcctctcagggacgtctaaaagcatttgtgtcgccattgaagtatctatgcctttctcccttaaagaatattctttcgcggaaatgagcacctttctggtagatgatgctgcactgtttcatcagcagacactgaggggttgtttatcatatgaaggagtgaataaatgaatgaagtgggctcaatgttcacggagctaacaaacctgccttcagctgaaacttcagaatcaccagaaacaaaacaaaacaaaacaaaacacaaattagacacctcttccgacttcaaagtgcctgctccatttttaggctgtgccatgagttcctgtttcctgtttgaggacatcttgggctcagggcacagatgacgaatgtgtcccgagtatcctggatgggcaagcagctcaagttacctgtctcacgaccccgctcctggacaccctgatgattcatcagttagaaatgcccccagcaataataggacttccgggatcttttatttacacaagttgtatgtgatattttatgtgatattttaagcactaggaaaaaaaatatgtcgtttctaagaaaagaagtaaatctcacacaaaatgtttcctggctattctaacctacatccctaccacccccccacccccccacccccaccgcccaatcaccttcatttaaattgtcttaactctgttaaagtgagcttattatcaaaatatattttcctatctttactgctgctatttgcagtcattgggattttcttctaggcctaatcattccaaatacttttcttacatagctgatgctggcagctttgtcaatcttgtgattcctagtattaatgtttggaaaaattaaccattgctattgaaacttcgtttgctgtcttttctttttcaactaaattataagctccttgaaaatttaaaatactcttggcatctttcattctctttctattataaatagtgcaaggcacatggtaagaatttggtaagcatgcgcccagtggagggttgtttgcctagtctgctcttccaagatcttgtgttctgttatagtaatggtacagctttctttgtctttgatatcagttgctatttttgatataatgattcacctacatctaataggatgctatctatatgcttcaatttgttgccttcgaacatttaggaggaatgaaggttgtcataggacaaaggagttatcaactttgtctaaacatggtgtatctgtagacattactccaggactaaaacattacttcctgtgtggagtcaaagagttggcctaagacatcccaacaggagtgggcttatgtgttgaaactgtagctgagggttgagggagaagtgttatccgttcaaggccagcataggctatacagcaagtcccagaccagcctgggccgtggagcataatcttgtctcaaaaaaaaaaaacaacaaaaaaaaaaaaaaacaaagaacaaaccaatgaagccaacttcctttgcaggcaaatgctctgcatcagtcgctgacatctgggagaagctctgaaagtataactcacacaatcatgactcaattcctcacttctcccttcttcccccatctctcttctcttctcccttgtatcattctgggttcttacaaggttgcctaggctagccttcagctcatgattcacgatcctctgataacagtctcttgaaaagctagggttgtgcatgtagcacaattttgttgaagacatttttttcattgtgtgtgtatctgcacactatagacgtgtgtgtgcactggcacatacacattcaaccatgtatatggctatagacgtcagaggtcatgcactctccatcttatttttttgaggcaagatctctctctgatcctgaagctcactgttttgggtgttttgggtaaactggctggccataagccctgaggaattcacctctgcttacccttagtgttgggcttacagatgcgtgcctacgttgtggtgttgggggtcccagcatgagttttccatctgtatagccagtctttttctcactggaccatctcagcagccctgagagggaaatttcttagaaagagcccctacccagggatgatttcttcaacgtttgcagcacataatcatttatgagagtcctttgtggtcattgtgcatacattttcaaatatgtaaaataaaatttcgtagtataatttcaaatgaccaaagattactaatcttagaaagagtaggtagagtatcattgtgtgttttatgtctgcttatgcacacatgcagaaacctctcatatgcatacatacaaagaaaaattaaaaatttaagcttaatgagtaattttttatattattgtgtactttgggggggttggttttgtttgaaacacggccaatactgtagcacaggttagccttgaatttacagctatcctgtcttagcctctcgagtgctggaattacagtaccggcatgcaccaccctgcctggaattctttatactttacttttcaagaaccccatagagaacacatgctggtgttataatcataaaacaaactagaagcaaatgtccactcttctgcccataagcaaacaagggttgttcagttctacttgcttcattacattatggaacaaccctagagttggctgttgtcagctgttctcaaagaagcatgaacttggaaggtccttaactactgacttccggggtctcggcttcctcatctataaagtgagaaaaatcacagtcacgttagacaggcttaactgggtacacagaaagcgcagtaaattactgcagtatttagatggattgccaggaacttctcaacgatatttatatttgcttggctatttctagaactggcagcctatcctgtttcataataatggggatagctagcatctgttggtcacacaacaccaaacgaagtggccccgtgttatctgcgttatcttacttaatcttcacaacagtcccagaaggattttttatccccgtttttcctcctgggaaactgggacacagggaggtcaagtgatctggccagagttacacagcttgccagtcttgtagaaaggactttatcccaggtctgtcaaactcctgttctatcttcagtaacatacggctttacccttagcaagaaactttcctcccaatacaaacattcaaagagcgaggttgccaaaagattagcttcctttcaacaacttccccatggccaaatgacaaaggaagattaatactgcaccagcgaggtgagggtttatattttgtcaagtacctgttctgaaggttcctaagaaaacttactgtcatgttgaagacttggcttctatattatgaagaactgctgggtcctggagatcttccagaccttgcaaatgcttccaaaatttaaatcacctttcctcccaaacttgcctccttctgttctgcgctggcaacaccatcactccttccactgtgcgagccttcgcccctcccccaaggcaggaggcaggctatgctgcgtttacctctaacatgtctctgctctgttcccacggtggtcacatcagtccaagttcaaactctttcttgtcctacgtgactacagttgggttccaagtgggtcttcttgcttttagaatctaacccaaaatctctcccatggcactgtcaaaaattcgttttctggaaagcagacttaagcatgtgatttccttgtttgacaatcttctcgatgttttttgcctcccagaagatgaatgccttggcatggcatgcatcattaacactaaagccctgggcttcgtttctagcctcgcctgctatctctcagacctattccctgcatggtccctatattaaactccttgaagactctcacttattgtaaatttccatactattatttgaatgatttattttccatgcaggcaaaatgtatattaatgagaaagtatagaagtgatactgatgaatacttgtgatgttagagcacagtttattgttattgctattagttattagaagataatcttgtaattatatttacatacagagaacttagcagtgtacattgtaacccagtttagtggcaagttctctagcctttgccttttccagcttggtaactcaagccacagacttaggactcaggacattgcctccctagtggtgtcggatctcactgtatttgtcgttgtgattggtcctaatagcttccatcagcttagccagagcaccattgtcttccaagttaacctgtgtgaaagcaacagtggtacatgtcttcctgtagaaccaggcatcctagcctggcctttcccttgatgttgccgtaggggatcaccatctttcggtacagggcaggcaggaaaacctcctgctcaatggagtttacatcatgggcaatcaccaccagctgagccttcttgttctccaccaaggtggtattgaccccctgctaggaggatggacatcccctttgccagtagctttcttctcagcaccagccagtagcctttgcttcttctcctgctctgtctctggcctgtacttgtgggcaagcttaagcagctgagtagctgtctgccttccagtgcctatgtgaactggttaatggcaggaggtgctttgagccggttatagaggatggctctttgccactgcagcctgatgtagcaggaccacttgatgaagcgtgttagatctcttttggactggatgtcctgcccaatgccgaagttcttgggccttttcttaaacaaaggattgactacctctttggcctcctgtttcttcacgaaggcgggggctggggccaagctcttccccttgtcctcctttgggcatcttccttggctggaaaagagagagccataggtattatttttaaggtgtatatttgacctaaactttaagttcctctccctttagcattgggtttctaaaagcctgatccttgagccctatgcgtgtattagatgttactctgggaagacagtcaatttgctaagtccactgatgaagaaacaccatttcatccagctgaaactgggctgtagacggccttgcaaaggcaaatctaattgaaagcacaaggaagacgtgatggccaagtaagaacattgcatttgagttcccagtcaattgtagcatgtccttaacacctcaaattgtagtgaagctcacattattgttctgcttagcagtacttatttccactacctccaatgttaatatcttttgttttgggaattagacccaggggctccctcctgctaggcaagggctctaccactggttcacatctccagagctattctagttttattttgagacaagctctcactaggttatccagactggctttgaactcactgtagcacaggtaagcctataagctgccacaccttccgagtagctggaattgtaaatgtatgccagcaggtccagcttccgtgatggttttgagaaggtgttctttaaatgctggcatttcagcccttcctggggctgtcctagtgaaaagccttcacttcgttgatccattacacttgggaatggatggatcacttccaggaggcacggatttctttgtccaccactgtttttcactgctagactggccagcttgaagttattgcactcctgtggcctgctgctgccagggaggagtgtaagctacaaacagaaggttgctggttgacattacttatttcctgttcatctcgctcaccccagtgacattctaaagtaaggcaactaaataagaattaggcttagaggctctgggtctaaatcaaacttgactctgtgagctaatattgcttttcttccctattttttccctttgccctctgggtctaattgcgccgtgtttacagcgtatgcaaacatgtttctcattagtgtttatttactgccacaggaatcactctgaatgctaatcttagcggagatgcttttctcaaaatcaacccagatcacattgggttttatcgtgtaaattatgaaggaggaacgtgggattggatagccgaggctctctcctcaaaccacacggtaaggcaccgcgtggttaatgaacgattgccattttgttgcaagaacagcattttcgcaatactaatttttcttcctcaatgctctttgctttgagaatcatggcgtccctgtttcttcttccagagattctccgctgctgaccggtcaagttttattgatgatgcttttgctttggcaaggtatgttttaaactaagattgggtcactcaaaacaccctgagttttcccatatgtctttagaattaattacaatcacatttgacttcttaattgaaaacatccacatgtctgtattttaagcattattgttattatttttttttttttgctcactccctttttaaattcacacgagccttatgacaaatactgatgctagctattcatagaataccttcccatcccaacccccttccctgttagaatggagtatgagttactctagatcagggtctttgacttcattagtgatgtttgaaagggatcagagtgtaccttgagctgataagatgactcaaaggataaaggtggcctctgccaagtctgctgacctgagttctagcccaggacccacacgacaggagaagagacataattccaatatactgtcctcttacctccatgtgtgcacagtggcaggcccatccccctaaaaaaacaagtgaaatatcaatgacatagttttaaaatataccttcagaatttgatttaacaaatgcatagtgtatttcagttttgtgagtccacacttactactagatattttgaactagaattgtcattcttatctaggtttttgggacaagaacaagccacggtaagctagcattggctagcattcggacaccattttagagatttgactttttttttccttcatgacctgagagtaactggaacttagagaaagataagcaatctagattggggagtagaggaacagtgaccatggcttctcgactttttcaggtcccctgaccctaataattatcctctgcaggagctacatactcagctgattattggtatcaaagtttttcagaagctttgcaccctgctaacatgagagtagatagatgctaattcctttggaagcatcttctgggttcttcctgagcaaagcattaatttttcactctgtgtcttttccaacagtactgtattgtcattgcttattagtatccatactgcccaagaaacactcttatgaggatgggcatctgaaccccgctcaggagaacgtgtgactgttagagatgttgtccaatagctactagccaagcatagcgatagctggttggctaggataacaaggagaaacgtttcacatgaaccccttagataacttacgggaagtcaaaagatgccatcagtcttcccagggttaaattccaagggttagcccttcttccaagggctttgagcttgcctaacatcctggttctgtagaagctggagcaagtctccttcctcaccactgtctgggtcaatctcctaatagaagattggagatgacttcagaagactattgtaaggatcagggagaagacagatacatggaacctcaaagatgatttttcgtacgagttcctactaaattctgtcacttgatcgaaatacatgccccttagatttttaacagcaaagatgtgtctcaaagctcttctgcactgctccctgaaccttacagggagacgtagagatgtgtgatttagggctgagccttcagtctccatttatgctcaggaacttgagcagccatgtcttcctcactcaccactcttcaccacagagaggtgagactagcgttttcttggatatcaacattcgaaatacaagctttaaagactgtttttctatttgattttttttttctcaagtactcctgaactataacttaaaaaaaaaaaaaacttttccatacatttttgtagaattgactactatggtatcatggtatcatggtggcatcagttgagtctcaacaatgaatgcaatttcttttctttccttttttagtacttactttattatttttatttgtgtgtgttggtgtgggtacactcacatatgtgtggggcacacagaggtcaggattgggcattggatcccctagagctagaattctaaacagctctgaggctactgagaggggggttgagaactgtggtctcctgcaagaacacaaagtgcacttaaccaataagccatctctctagctccgaagtacagtgtttttaattacttagcagaggaattctcacgaacatgaaacgctagggtcaccacactggtccttttcagttgaaagtctggttttcaattaattgtcttatttactttctctctcagagctcaacttctgaattataaaatagctctgaacttgaccatgtatctcaaatcagaagaggatttcctaccatgggagagagtcatttcatctgtaagctacatcattagcatgtttgaagatgacagagagctgtaccccatgatagaggtgacgttaatgttattagtataccacaaatgtaaatgtttagtcgattggggtggcttctaggggaaggacctcttggggaatctctatctaccacatgaagttaagagatgaggtcatgactggtcctgcagatgggttgtgtgatcttttgcactttaaaatatttagtatttgtgtttctgtatgtctccaaaaggtatcaattttaatatcaaagtgaatataagactgttttatttaaaaatttaacacattataaattagaacacgctttgaaatggagttacctgctaaatttattttaacaaaatacagcaaagtaaaaaaaatatattacctccacattgatatttttgttttatttttcatctctacttaccttttctttgttatttccatagcactttggcaagctgcttgcaattttaaacaaattctttttctaagcactgatccaaacctctcaggtctagtaggggaaagattacaaggggggctcttggttgacaggagattcagagacgtagcaatttcttactcatggtgtcctgtgcttctctttcagacgtactttcaaggccaagtgaagcccgttgcagatttgctgggatggcaggataccggaagccacatcacaaagttatttcttaccttttaaaaactaatattcacttaacatttgtgtatttgtgttttaagatatagtgaacatttgctgaggccctggctctgtgcttgtttgtttttgaaggttactccgggcctctatcttaggattcgcatgcaagatgggggacagagaagccttgggcaatgcttcccagttatttgactcctggctgaaagggagcgcaaggtgactacttatgttgtttgcctgtggagaagatttgaaacaaagtgtgaacaaacacagaagatgcctgaaacattgtttcttcttgcagtattccggtaaacctcaggctgcttgtgtaccgctatggaatgcagaactctggcaatgaggcagcgtggaactataccctagagcagtatcagaaaacatcgcttgcccaagagaaagaaaaactgctctatgggttagcttcagtgaaggatgttaaactcttggcaaggtaatctgttcccggtttgctgtttgctttctggtcctggggattaaatccaaccaatgctttgtctgtaccaggcaagcctttaagcattactatgtatacttatgtgtaatttattttttcacttctttctttctttctttctttctttctttctttctttctttctttctttctttctttctttctttctctctctctctctctctctctctctctctctctctctctctctctctctctttctttctttctttctttctttctgtttgttttccagatagggtctcacaggatggccctgtaggttaaccttaaggcaatctccctgtttctgctttccacgaggcctgacatgttttaatgtgtactttaaaataaatttgaggaactggagagatggctcagcagttaggaacacttggctgttcttccagaggaccccagttcaactcccagcacccacatggtgactcacacctgcataactaccacgggagttcatggcctcttctggcctctatgaacaccaggctctaaagtggtgcacagatatgtacacataaaataataataataataaaagattaaataactaaagtaaaattggtttcgattaactaaagaacatgaccatcttgacatttgtcaacacattatgctaggcggcatggtgctaattatatgtgttaaagaatttagcaactactttgcgtgctttagcaagacctggatgcatgtgcaggagaagattgcacaacaaagaaaaaccgattgccttcagggcccacggtatcagtatagtttctagaatttcggcggcttagtgtgtcaaaatgtttcctaagacattccttgagaaagacaagttgtacccccttatcgtatctgctgtagaaagtggtttgagtggttaatgatttttgtaatctacttgtgagtttgaagcaatatattttagaccttgagtgatgaccataacacagtgaggtttggtagcaagtttggagtgaagtgaggggttctctggaactccttgcttttctgagcacgtggtaaacatgctgctgcatttcacacgaaaccaggtttatgcgtacaactgcaagagcctaaaaaggtagccacctctgctttctatctgactgggactaaaagtcaatataatgaggaaccacggatgctggctgtttttgtctgcaagtctgttttttaaataaattgttaaaccctagtttatggagtctatgaaagtaagtatcggagagtttcctcactcccatattttccttttatacaaaggagacacacatccttttgtagtgatggagagagggatgctctgtttttcttcctggtcttcctgaaggaattgatctaagttgatcctgggccaagtctactgggttttaaccagtcacattttacctgctagaatactgtctgtcttctagagaggaatgctgtggtcagtcatgtcttctgatcatgaagtgcttgtgatgtataatactttagtttgcccaagggcttcttcagtatccctgaatatcttttttaagagactgaaaataagtctagggttcatctacacagccaacaagccaaagcaacaagggtgttcctgaaaccaattaatatagtcacctcatcttgcctatgaggtatatcatcctgttttgctcccaatccatgctgggcattgcacaactaaatattgatctacagtactttcccttgtagaatgaaaggacaccatggcattttcgaatgtcccacagaatatgagcttaccttaaaacttgagttttcttctgtctcatttatgataaatttcttaggtcaaatgtcttccttctctactgcggtgccagagcacccaagaaaacaacttaaagtgaggaaatattaattttgactcatggcttagcgatctgagttcacattccaatactctcagtcctgacagaaggcaaaaacatcacagtagaagcgtcaggagaaggaaggctattcatcacatgtcagccaagaaacagggagaaacagagaaggagagacagcatgcacccctcaaagtgatctacccctaagcaggacctcttcacagcctattgagttaagcattcatcacaatggatgaatcgactgatgaaaatggcaccatcatggtgcaaatacttttgatacattaccagctgaggaccaggctttcaactatagacctttggggccattttacatctagactccagcattaagtatgctcaactttgataaagtataaaatgtcagaaaaatctatacatttcattctttttggataaaagctatttctctaatctacctcacatctcaagttgaacagtaatcttttaaatgtatttattaactcttctttcccccaaaaatatgaatcgtttaagtcaaaatgcaggaagccattgaatgagacaagaagattattaaaatgaatctgattattagcagtagatatttttgaggtgcctttttcacagtaaacaaaacatgtggtgacttcagatagaagtaattctaatagcaatatagacttagaaggtcaactctagttaacaccacagcatcacaattgataaacatctatttgtttttctttaatttattctagatttatttgtattaaactataattatacctagatagcttatattagcaaacaaagtttaagttttgtcccatagaataagaccttaagtttttctttacatatactttttaaaaattaagtaagtaattcagcaattaagtaagttcttgtattcaataattggtctttatcagagcagttgttcaaatttagtttgttttgatatttctaaaatgatttaagttttaaattaattgaattttcaataaccattttaatattcaatattagctaaatttaaattattagatttaggtgtttgtatttcagtactcaccaaaactagaggttattctttttttaattatttatttaatgtatgtgagtacactgtagctgtcttcagacacacgagagggcatcagatcccattacagatggttatatccactatgtagttgctgggaattgaactcaggacctttggaagagcagtcagtgcccttaaccactgagccatctctctagccctaaggttatttttaaagaacagttaaatacgctgatatgaggtccgtaacacacatacacttccaggtctgtgttcattcagagatgatgcatctatccctgaagagactggaggccccagggagtttagaggtcatgtggggtggggggagggggcatccacgtggagagggggtggggggaggnnnnnnnnnnnnnnnnnnnnnnnnnnnnnnnnnnnnnnnnnnnnnnnnnnnnnnnnnnnnnnnacaaagggtggatgggggggtggggaatggaataatggagtgttaaaaataaatgtaaaataaaattaaattaaaaaacaaaacaaaacaaacaaaacccatctttccccagttgccatatttaactcactctgtcagctgacacctcaagaattgaattgctgggttgaaagctgggaaaactttaagcaacagtcaatattcaaagttcactttgaagccgttttcttcttgccttctcttaggtatctggaaatgctcaaagaccccaatattattaaaactcaggatgtatttaccgtcatccgctacatctcctacaacagttatgggaagacaatggcctggaattggatacaactcaactgggactatctggtcagcaggtgagatgatcagataacggcctcttgtcctccttgtttgacacaccttacaggtgccatctttttgtcttggctgtgctttctctgacctctgtaccacaccaaagtggcatattgctaaggtaaagggacacactactgttctgggtgtgttcatttagacacaattcatttttctttctttcttttttttaattagatattttttcatttacatttcaaatgctatcgcaaaagtcccctataccttccccccgccaggtaacccaatcacaaaagaagtaacttggtatgaacaattcatttttcttaaagttactgcttctggttgatccacaggattctgagatctggagagagagaactaaattgcactattttttgtttaattaaaatgagttaatatggggctggagagatggctcagtggataagggcactagctactcttccagaaaatccaggttcaattcctagcacccacatggcagctcacaactgtttgtaactccagcttcagggactatgacaccctcacacagacacgcatgaaggtaaaacactagtgcacataaaaactgcaataataaatgaattaatataattcttcacactatatcattgcatagcaaaatgtcagataggtgtttagttctcagctcctatttgctgaaaactagatgaaaattcctggagttgagctccaagaagagccctatgttctcagaactttcatctcccttgaccagataataaactctaagtattctgaatattttttaaaagagatctacattttttaggcgatagtactttgggaggtggggtgggtggagacttggtctagtcacctctgtgtgtgtgtgtcatgtgcgtggtgtgtgggtgtgtggtatatgtggtgtgtgtgtgcacctgcgtgtgcgcacgttcatgtccatggttcacctgtttgtaattacttcagtgaaagacttggtttaaactgagcaaatctattcaacaagcacatgccatctgagcatatgagttaatcttgggcgaggagcactttctgtttataaagatgggttacctactatatgttctcagttagctgaaacactccgagtctatatatggtgcaagaaatttatataaataaaacacaatgtttacctttgagttattgtgaaaagataaaaatatcttgtgtttattatataacttaacaattaataagtagaaaaagaccttatagggaccataaacatctggctttagagtaaacatgttagatcttataaactaagcctttttccaagggcagtgaattgattgaccattgtcagagctatgcccagaagcctcgcctgaggcttttaatatttcttcatcattggctgctctaacattcatgagatattattgcagatggacccaacacacacacacaaatcatacaatagccacatgtctgttacacaaaaggcattattaattatgtttggtttgaagaaatagaatttccctatgaaaaattgtaaaagacaagttaaatagaaatgagccaaattttattcaaatatttccaaacttctaaatgctttccaaattttggattgagtgctgtttctgcctgtgtttcagaacaatttatttttagcctcaaatacatgatctgtttttctactaagctttatgactgctgtttgccagatcactgctgtgttttccagtttaaaccttgaacacaaagctccaatctctatgggaaatgactcttcaccctgtgcctcctcaacccttaggtacaactctgaggatcagtgagtttagttgggcaacagtgaggtttgatcaaatttgattttagtttgtcacggatgaaaaaattcattaattttgacataatgaacatggcgtaaacatctcaagaaaatttaataagcacgttattataagttttgaatatatcaaaataatttctatatgatctaatattaggtttacacttgttaagtcgaagcagacgatctcatctaagtttttcaagccatttaagatatacttgaattcttactgtagttttagctactttgataaagacatagaacgcttctgcacttcctgtgatattgggcccttgagatgaacacaatttgttgcagcattggtagtgtctatataagtatttgcagtttttattcgttgcatttgttgctaactcccaagtacttctcttagtttttagtttataagactcaaacaagaataataatgcagaaattatagtccatttaaaaaactatgacttgcaattagcagctgttcatgggactcgtagactctcactgcagcaacaaacacattttgccttttaaaaattcccatcttcctcttacaacaccagtatgtatactcttcagaaactgggtggtagtagtgtttaagtaatctataaaatggaattggtcagaaataacttctgccatcagatcggtgtctattcttgagtcgtttctctatgaatgcttattagacacatgtggaatcacgctagccacatgtttttatgttttactcttttcatagcatattgctactgaataaaagaattttacggtttctggtaaatggcgctttacagtaactgcccatttcccaggaagctcccgtacttagtgttgttcttaaatatcctcattatcattttctttcttcatttttaatttgaaatttattttactttatatgtatgcgtgtttggtctgcatatatatatgtgtgtgtgtgtaccatatgcatgtctgatacctagagaggccagaagaaggcatcagatcctctgaaactggcatcacagatagttgtaagccaccatgaaggtgctcagaattgcaccctggtcttctagaagagcaacaagtgttcttaactgtcgagctatctctctaacccccaatacctcattttaaattgtaattcttccctctagtgagtaatgtagggcacacattatgcgctaggcttgatctttggtattggggctgcaatgaggaagacaaacagacccaactttctgcttttgcagaacttaatgtgttggtgagagcaatgttattatagcaagagttacacagatgcatgcatgaaaccttagtcattacccaggaaagaggctcaggggacagcaaaataatgcaactaaggggaaactaagcaacctgaaagaagttggcggcaaggtctccctaaggaagttcaggctgaactgaaggaagggcaggaatgagctgggtaaacaaaaccttgaggatcttggctgaagctaccaggaaagaaagggataaaggtcaaaagggatagagtcgtgttaaagtttgacttttagtccaagaacaatgataactcagtcactagaagtttgaaacaaagtgaaatgatgggtttattctgaaaaagcatgcttgggtcggcgatagggaagtgtaggcaccagggagaccagagtggagttcagaaacacaatcagcttctttaataggcccagcaaaaggcaatggtcaactggcagcaaaagacagtgagacctataccatggaacaatagtaaagatgaaagattcacaggcatggaggggcatggaagtaggagaggaaagaggtgaccagggcaagcctgggtttgtagcagggttcagcttgctaagcattcatttatctatatatctgtctgtctgtctgtctgtctgtctgtctatctatctatctatctatctatctatctatctatctatctatctatctatctatctccttcctccctccctccctctccccctccctccctcccttcctttttttttttttgtttttttttgttttttttttttcaagacagagtttctctgtatatccttagctgtcctaggactcaccatgaagacaaggcctgccttgaactcacagagatctgcctgcctctgcctcccaaatgctgggatgaaaggcgtgagccaccaccaccatcttttttcttttaagggtatgaggggagttgtttttgttgttgttgtttactgcttttcgtttttcaagacagggtttctctgtatagccctggctgtcctggaactcactttgtagaccagactggcttcaaactcagaaatccacctgcctctgcctcccaagtgctgggattaaaggcatgcgccatccctgttttgtttgttttgttttttgtttttttgtttttgtttttttttaaagaaaaatatggcctcttgtctgattccacttaaaaaatttgagtaaactgaaaatcaaaaaaaaaaaaaaaaaagccagctagatttattgatataaaagccattagtaactctagaaagagctatttaggacatgatggtcaaagctttcaagagccagttccttttttccactgtgtgtgagcgcctgactcaccagcaataggatccttctgcacacgtttattgggagagctcaattacagaggcgaaaagaccctgagccaagaaatggcgctgcttatataggcctaggagtgacatgtccatacctgattggttatgctaccagtacctcattaatatgcatcgggccaggcagtgactcggcaaaaaactcttatgcacatgcgcacattggttgtttacccataatcatgggcggtggccagtggtagccagcgccatcttgtagtggcgtttgcggcttcccacaactgtggaattttaggattggactcagggcatcaggtttgcatgacttgaggttttttattccctgagacatcttatatcttcctactgtgtttagtttcctttgaaagctactttacacacacacacacacacacacacacacacacacacacactcttgtatacacacacactcacatgtacagtcatacacacatgagtgtaccacctgtgcacatgcatacacacgcatacacacacttgtgcaaacacacacacacacacacgagtgcgcacacctatgcacatgcacacgtattcacatgcacatacatacacactcacatacatacacacacaagtgtacagagctggacactcatacatgcacacatgtgcacacatgagtgcgcacacacacactcgcacacaaacacacacctttgtcatctagtaaaagatttcatgcttgaaaacgaatattctgatttattctcctccatttctctacagatttacaatcaatgacagataccttggccggatcgtcaccatagctgagcccttcaacactgaactgcagctctggcaggtatggaggccgattccattctgcttgtctaggaagaaacaaacttgaactttcctccaatcaaatcccagatgcaagaaggggggaaaagcccctatatctaattaattatacactactttctttcctaacctgaaaaatgattcaaatgacaaagaaataatgaggtttaaaaactgagaaacgtaaggcctgggaaggttggggctggctcatggaagtgtctttcctatccaggtggccgtctgtgactctgagataagttgggttgagatttgagtccattcagaattgagagtttgggatgtttgaaactaataccaattctctgaaatcccagcaaaggaaaaaaaatgtcaataggacaaagagatgccatgaagtttccatgtctgtgtattagatagtgcaatgttttgattcttgtatatgttaagaaacaaaatcattcttacttttgaaaatggcagcattactctggtttaggggtaagctcaggagagaggggtaagacagagtatagaactttgttgaagagaaatttttcttataagtctttaggaaatgaaagcatatgaaaccctccagacccctaggataaaagctggagaaaactgatcacatcacagatcacagcgtccacagaatactttagtaaatgtgcagacaatagggaaatccacagaagtgggtggtgacctctttcccgatcaatgcctcttgtggttacgccagctcacagggaccctcaagccagagaagtgactgctcatgcacctggcaggcttgttctgagtgctgcaccaggagatgccatccaaacagatcccccataagaagaaacagagctagtttccaaatggaacttctgaagaagcaggcttcgaatggtttttctaactactccccctgccttttctagatgcagagcttttttgcaaaatatccaaatgctggcgctggagcaaaacctagagagcaagtgctggagacggtgaagaacaacatcgagtggctaaacgtgaacagacagtccatcagagagtggttcgctagcctgccgtaggacggacagtgaaaacacgtgcaagggtgaaggcacgtcatctgtgcctctgctgcaccgtgggcggagcctgagatggcctgttttacagaccgcagaggggagccttcgaaaccagttctgcttttgctaagtactgtatttatgtcacgcaaagcttttaaattattcctctttgtttttgcaggaagatactaatagagtatttaatatactcagggatttctgctaagtgttcttcatgggaaagtctttacaaactgaagggtttaatagtcacattaatgtctttaaatatcattccttgtatcttagatctgtgaaaatggagcaatttggtcctagctttacatttttagtaccaaagaaacaccacttaatcttctctcttgattgatttttaaagtttaaataccagtacttgcagggtgtattgccatcttaatctttattttattattcagaattacatagacctaatatcattttattcacaaatgtctcactgctttaaatcctaccaaagtaaccttggcttaagttttgatcaaggattgaaggaatgagccaaagaaatgactgactgttgcctttggtcttacaaaatcagacaatgctgtattcttttttttttttaaataaatttaaattattaccttgaaaaacacattgtttcccagtatcaccttactcctgagtgaatgtgacggcaccattccccaaataatttagcacattacaagtgtgcttcaagagcctgaccttggtcacgcatgatgcactgctgtctctcctgatgcgtgcaaagttcccttcaaatgagctatgaaattagtgggcatgggggcgcttaactgcgctccatggatttttatagggaagaatgaaagtaattggaaactgttcaggaaggagagaaggcggatttaaatttaactttgccctccctagcagcaaaagtgtgaaaatggagaaagttgaggttgtcctccagcaaagctgcacatctaaggatatgtcttcttatagataaattttatatatacacctttaaatgtaaaccaatatagaagaccactaataaaaattatatatgtagactggtgagatggctcagggtgacaacctatgttccatttccaggctccacagggtaggaggagcgagcccaagcctgctgatagtcctctgacctccagacatgtgctgtggtgtagtgtatagtatgtgtgtgtgtgtgtatttgtgtgtgcaggggtatgtgtttgtatgcgggtatgggtgcgtatgtgcccgtgatcacaggcacacatactaaattaataaataaaaactttaatttatgcgtgagactggacagacgatgttagcttcataggagctggtggccagggtctgttgattgtggcacttgatgatcacaatggcagtccagtcggcagaagagacagaatccctgttttctcatctgttccattgagaaaaatctaaatttacttggaaaattcagagctggtttgaggagaatcgagggcactatgcacgcaataaaagatgccatatttcaatttatttccataataggccctcaaccatgtaccccactgccatacttacagttgtctgagatcaacaagtggctttaaaagagtaatggaggaagtgaacgtggggtggggtggggggacacagagggaagacagggtgcagaaccagggtttcctcctgatgctcctttagaaaaccctggaatagtacacagcaacagataaaagtaaaatacgcatgccctcatggcaattaaagtacatggtttcaagcttggttagatattgtccgttagcactggatcacccagggcaggaatgatagactctgagttttcacccggcttagagtccacagctgatgtccacctgtgtgaagtttggaagacaatcagctaaggggccactcttcccatgacactgaggagaaaagagtgctgtgggcagacaggagcaggcagcctctgaaggaccctccctccccgcttagcacatctgcggtcggggcattaccgttgtcacccctaacttgctcacttctgggtgatattagttgtgtttatttctggatcagaaagagatgggtgtagaaagcccggcactcacctctgtgttgtactcaagtcccttgaatggcaggcaccttcttcattccctctgctgaattcctttctgcttggagaacctagagtatttcttgggctgatcctgaaaatatgcaaactagagtcacagagatgtatttcattttgtatttccactgacccagcacttgtttgctgctcttattcttcatacataaatgctgcaaatagaccccttgtctggtgatgaactaatgaaccagggtgcccccttcacccctatatacacaaagattctgctttagttccaacaagctttagaatatgggagctgtggtggtttgaatgaaaaaagccacatcttctcaggcatttaaatacttggtcatcagttggtggtattgcctggaaaggcttaggaggtgtggccttgttggaggaggtgtggccttgttggaggaggtgtggccttgttggaggaggtgtggccttgttggaggaggtgtggccttgttggaggaggtgtggcattggaggtaggctttgatagttcactcaggcccttttcagtctcctctttctggtgtatgccatcatgcctgtcactggctgcttccacttcaccatcatggacacaacccccctggagcagtaaacccaaatgaacgttttcctctataagtcgccttcattgtggtgtttcattatagcaataaaaaagtaatgaaaaactattagaagggaacataacatattagaagcaaagtaaaatgaaataatataaaatgtttaattaaaaatttaaaaagttggcacaatggctccaaagggcacttgagcagaagtgctggagcccgccccagagccttaggaaggaaagggaaaccagtctggggactcttctgacttcactcatgcatcatgacatgtgcaagcacacacaaaagcatatacatgcctgtgtatatacatacaaaatggacagtaaatcagtaagttgtaaaaaaaaataagtaatgaattcagggacatttaaggaatgtggagtaaggactgttgttccctgtggtaaggagaaatagagccagaactatgttcaacttcttatttattttttcttaattttttattagttattttatttatttacatttcaaatgttattcccccttcccacttttctctctgaaatccccctatcccaacccccctgcttctatgagggtgctcgcccagccatccacccacttctgccgtaccaccctagcattcccctacactggggcattgagccttcgcaggaccaagggcctcccctcccattgttgccagataaggctatcctctgctacatatgcagctgtagtcatgagtccctctatgtgtactctttggttagtgatttagtccttgggagctctgaggtgtctggttggttgatattgttgttcttcctatggggttgtaaacaccttcagctccttcagtccttcccctaactcctccattggggtctccatgcacactctgatagttggctgcaagcatctgcatctgtattggtgaggctctggcagagcctctcaggggacagtcataccaggctcctgtcagcaagcacttcttggcatcagcagtagtgtctgggtttggtgtctgcagatgggatggatccctgtggggaattgggctatgcacagacaggctggtctccagttgatctgaggtctgaacactggaaatggtgataattcacctacatgacacggtaggcattccctcatgctcctggaactctggctcctgcctaagttaccaccccccacagcccccacaagagaagcatggctaaaattcatgtaggcaatggcccaagcttctgaccttcaggctaaactactcctcagttacctagcaacagtaaagaccataaaaagggctgttcagccccacctcactctcttacttgtctctctctcttacttcttactcctcactctcaccctctttcctctctctttgtcttttcctctctctcctctctttgtcatctcttctcctctctctttgtctcctctcctctcctctcctctcctctcnnnnnnnnnnnnnnnnnnnntctccctctcctctcctctctccctcttactctctctttctctctagccttccttcctctctgtcttctcccttctctctttccccctgcctctctataataaagctctaaaaccatagagagtctctgctcatcaaggctgtgctcactatcactggtgttgggaacctctcttctctcatccctctttcccataacccctggtggctttagcaaagtagctccagagctcccaggtagggctgccccttgccaccccctgaagagtgagtcagaggcttagatgcccacctggagataagtagaaggtagatagcagccctcccaggcctgactgatgagagcataagtgaaactctggcagggtgtgggtttttccttccccctcttccccagggaccccctttttagttcccaacagatccccaggtggggcagtctctggatggcttttcctccagtccctacacttccttttgacaggaggaaatctgggttaaaatttttgagatgtttgggtggccccatccctcaaccgggggccgtgcctaacctctgaatatggtctctacagcttctctctcccctttaggggtttttcagctaatggcatccctgatatttgacttttgtatcttgatacttctattgattgagatatattcctgcattgccttcaacactgatgtccccagctctgcaaatgttaaatgtggtcaccaatgatgagaattctattcttaggaatatctccaggaaaatatgttcatacttacacagaaactctgttgttgttgtttgaggcagggtttttctgtgtagccttggctgtcctggaacttgctctgtagaccaggctagcctcagactcacagagatttatctacccgcctctgcctcccaagtgctgggattaaaggcatgcccaccaccacccagccaaactcttatacatggatattcatagaggtgttactcaaagtagtgaaacagtaagtaaatgctcagcaattaataaacaaaagaaaacacagccataaagtagactacagtttagccagggtctggtcaccttataccatatagatagaccctggtctttgaaatctgtaagcctgtaaatctctacagttatgctaatttaaattgagttatttattttcaatttcagtgaaaaaggccctccaaagaaagactctattattttcccaaaagaaatacacacacacacacacacacacacacacacacacacacaactatatgacaaattctatggaaaagaaaactgaaggttacaataaacattgacaggaggaagaatggcaggagggaggggaggaaaggatgacagggagctgagaacactgttataatcaccacggtaacccaggtgtgaataagatgatggttataatcaccacggtaacccaggtgtgaatatgatgaatcacttctttttttttttttatcaataatttgtttctattaggaaaaacacagtcatttgtttttccctctagttgaaaaccaacagagacagtttgttggtctgctttccactgcttgacagcatagttgaaaaatctactttaaaaaaggagatttatttcagctcctgtttctgttcttggtcatctggcctggttgtttgggggcctgtggcaaggcataacaatgaggcagaaggacttgatggaggaggctacttacctcatagtgatcagggtaacagaggagggggaagatggccagggtcccaagatcctcttcaagggtttatcccaatgagctgcatcctccaactgggttccacctccggaaactagtatgggaccaagcttttaacacgcgtgtttgtggggcacatttaaggtggtggggtggtggtagctgatagtaatgttattttgttatcattaaagcagtctatcaatcattgaaattccatggaagaacaagcagaggaactcccttcccctgaactagtcaacggagcacaggaaggacagaaggaagacacaatgaaccagacaacacagagcctaaaagactggctgactcattttgccacgtgtcatactaaatcaaatggtttgaaatgcccagggagaatttttattttaatgacaggtacctttgtccccatttatttaaatcctacagtgtgccacttttcagtgagaaagagaaaggcagccagcggcaaagccagattgtatttccctgaatccacactcttttctggaatgtaaagttatccaaggaaaagaacatggtcttctagtgttcttagcttggcatacagtccgggcgtaaagatgcgtgcaacgtagatttttttttttgaaataataactgttttcttgttttccaggcgtgtcagctaaccagtgtcccttcaactagcgtggcttctgtcatttttctcatttgactactttctttagtatttcaaaagaaaagtcactgaaggatggccagtggcagatggggcagagaaccacacctgtgataggccagtgccttcttaagagcatgggcaatgtcttctatttgagcgctcagctccatcatcattccactctacaaagcattctctctcttctgtcaaatatcccacataatagttggttttcttctcccctttgtacctgtagagaaatggatcattattcttctgagaggaaaaataaaacaacaaagttttcttgatatccttttcaggtcttgcagtatctttaccacacattttctctaaagagctgttggcactcacctaagatctcactttgatcccatcctaatagggctttgatctcaccagtctgctaaaactacatttcctgagggaagcaatcgaaactcagtagtgaattattgaaacggttgtacaggaagtcagagttatggtgtgcaagtacagagttaattcataacataaagccaaattcagaatatccaaatggaagaaacgcattcttcagaaaaatcttactacaatattattttagtgggagtttagtaagtcctatcaaaccaaaatgactttgaatatagatatttgtcccagtgactttaataactcgatgagctagggaccatgctggcaaatacttatgaaagttcaaaggcacctgtctagatagaaatcactctaaaagttgtgaaaggtaatacataaataattctacatccttttgctttaatgtatagaataattagcaaatttcccccaattataggatacagaggaggatttcgattttgcaaaaagctttataaaaatgtggttaagctcctatcttgcccattttcccttagaagaaagaaataaaacaatttgataagcaattcatgataaagtaacatgtaatctataactttagtcaatatatctttccaattaccatttccagatcaatagaatttgtactctaattgaaggatcttgtgctaaaattgtaacaatgattacacttgagcagtgtgcctgattctcaccccaggtgctaaaggtccaaatgtagagaccagtaaaggctcaaataaaggtatgattttgtaaaatatttcctcacactgtaatgagaaatgatgttccaacttttcaaaacatccaaacttgcaatttatctagaagaaagccataaaagtttaacaaagcctctaatagacagacagggccgtaatttgaggtaattaaaaggctgtgattttggtctttcttttaaatataaatgataaactatactctatagccaaccaagattcgtcaataaaacaccaaagtttgcctaaaactttgaaatcaagtgtgtactcacaaattaaagcacaacagaataccatgagatctccgtggtcttagttaggctgggtttatatgtctgagacctagtgttcaactgaaatctaatctttaaactttaatacactgctttcatgcttcaaattactgtaccctagaaactatcctacatcttggtcttgatttccaagctaagatctttttttaaattttccatttttcatcatggcattgaagggaagggatactttccttggggatcattagggagcacaactcaaacatgacaagccctgtgtgtgctttgacattacatggcacttgatctgtttgagttacacctttgactttacccaaaggtttggtgctgtgacaaaacactggagggaaatagtttaacgggaagagagttttattttgacttgcgatttcagaggtcttagtccacaatcacttgactccattgctcctggctccagcgtggcaaggcagaatgtcagagctgatagcgtacagtaaagtaggtctctttgtgatggtggtgcctatgtggtccaaatacttgcccaaatcccatcagatagcatccaagtcttgagcacttggctgggggacattttgtgtctaaatcataaaattctccccaaggctcatgtctatctatctcaatgcagaaatgtggttattctttctccaagagtccccaaacctaaacatttccaataatgtttgaaggtccaaatacacggtttcagtctctgtaaagctaaacaatttatatatgcctgatgcacgatgtcagagatgccagtattctcattctgaaagtgaacaactgggttataggaaagaaagatgagatcaaagcaatgctaaaacacagaaggacaaacattaaatcctacagactagcacacagagcacacagaagcctgatgtgtgctcaacagggcttgatggttctaccactacaggtttttcctgtgcttctctcctctctggctgttttccttggcagatagtccacatccatgacatttctagttccttggggaagggggtctccattaatctttgtcttcattctaatcacttcctgtgtcacccttttctgggctacttaaaggaatcctggccttggacatacattgcctggccgttgctttcagagctaggaggaagcttccatgactttacaactcttgagttcttcattattaacaatattagcgccgggagtggtggtgcacgcctttaatcccagcacttgggaggcagaggcaggtggatttctgagttcgaggccagcctggtctacggcgtgagttctaggacagccagggctacacagagaaaccctgtctcgaaaaacaacaacaacaacaacaaaaaacaaaaacaaaccaaccaatattagcatcacggaaacaatggcaagatcatcagcaataagtagattcacttgaattgtggccttaatgatctctgactacccaggcaactgaacattaaagcaaggtgcccaacaaagacactctgttctcaagggaaagactttcggtgactttcttctttaatactctcgatctggaaatgggttgagtctggccaatttcagaactatattcaaagtatctttcctactgtccctgtgcaaaagacttgtgttttggctgttgatgttttgaaatcatgtggtcagaaactatgtcttctttagctccaactttattccagattttctgatgaaacaccagatttttcaaaacctttccgctctgttttttactcccaattttcattttcaacctgggtaagagcaactaactatactcacacaacaactttgaatgttgggctaccttaaaatatctctacagattaattagaagataatgctttcttcctaccctccctctttctcgctactcttctctctctctctctctctctctctctctctctctctctccctcccccctctcttttctttgagagagggtctctatgtagctatggtggtcctagaacttactatgtgaatcaggctggtcttgaagtcaaagttctgtttctgcctttcaagtgctaggctttgaaggcatgtaccatcacacacttatgataacatcttaaaactcagtctcccatgcagtctttgagcaccaaaataatttagacaaaaaaaatatttttttgatttaacataacaagcatggcttctaattcaactctcaatagaatgtttgttctcatcaagtcgttgtgagcaccatctttactgtctcccttcctatttgcattgtggacttctgaaaacccatcaaaatggtcttctaagctcagcttacagatgctagatctccactggtccatatctccaaacttttctaaattcctcccacaaaccatgagcaggaacactgaacctttgacaagcgtgtagtcacatcagcccccaggtaagacgccatttttctatgctaggcagacttttgttgcactgatgaaatgcctgagagaaatactttgaaaaaaaggaaatgcttattttgatttatgttttcagaccatggttccatgcatggtcaatagaatgttaatgtgctataaaatgtgctgaggtggcttacagcacagggacagaaggggggggtggattgaaagggacatgatattcattcttcataggtctgccccacggcggtctatttcctctaactaggactcatctcccaataaagcaatcaaataatgaatcagttaatggatgaatctgctggtgaagatcaagccctcaggaatccccagaatttaccatctggctgttgagcatttacacttgggcctttgggggaaagccttcatatctaaatgacaccatttgtttggtcagcttccagtcttttataaacctgacagtaacaagacagagaaatgataaagtcttagtgcaagggtgtagcagctatccacgaagaaaactcaacaactagctttttagagacagtaaattgttgttgtttttttctttcaagttttcta

SEQ ID NO: 28 - DNA, 4193 bp, Mus musculus
cattctcatcagtcctcctccttcaagtcagcttctcttctgcgtctccatcctactccttggtctccgcattcatcctggagtggccggtggggacgagcaggaccgggaagagggagaggtgtgggaaagcgaagccaagctgccagggatcggacgccttccaattgaaaagggaagtcagctgacaaggaaagttagttaaatttaacatcctttcatgtgtaacatctgacttcgggggagaaaatgaactttgcagaggaagagccctccaagaaatactgcattaaaggcaaacacgtggccatcatctgtggagtagtggtggcagttggattaatagtgggactttctgtgggtttgaccaggtcgtgtgagcaggacacaaccccagctccttcccaacctcctccggaagccagcactgccctccctcctcaggaccagaatgtctgccctgacagtgaagatgaaagcggagaatggaaaaacttcaggctgcctgacttcatcaatccagttcactacgacctggaggtgaaggccctgatggaggaagacaggtacacgggaatagtgaccatctctgtcaacttgagcaaacccactcgtgacctatggctccacatcagggagaccaagatcaccaagctgccggagctaaggaggccctctggggagcaggtaccaattcgacggtgcttcgagtataagaagcaggagtacgtggtgatccaggctgcagaagaccttgcggccaccagtggggacagtgtctatcggctgaccatggagtttaaaggctggctgaacggttcccttgtgggtttttacaaaaccacctacatggaggacgggcaaatcaggagcatagctgccactgaccatgaaccaacagatgccaggaagtccttcccttgtttcgacgaacccaacaagaagtcaacttacagtatatccatcatccacccaaaagaatactcagcactttctaatatgccagaagagaaatcagagatggtggatgacaactggaagaaaaccacttttgtgaagtctgtcccaatgagcacttacctggtgtgctttgctgtgcatcggttcactgctatagagagaaaatccaggagcggcaaaccactcaaggtctatgtccagcccaatcagaaggagacagcagagtatgcggcaaacataacccaagctgtatttgattacttcgaagactacttcgctatggagtatgcgcttcctaaactggataaaattgctattccagattttggcaccggcgccatggaaaattggggacttgtcacttaccgagaaacaaacctgctttacgaccccctactatcggcctcatctaaccagcagagagtggccagcgtggttgcccacgaacttgtacaccagtggtttggaaatactgtgaccatggactggtgggacgacttgtggctaaatgaaggatttgcttcgttcttcgagttcttgggagtaaaccacgcagaaaaagactggcagatgctcagtcaggtgctgcttgaagatgtgttccccgtgcaagaggacgactccctgatgtcttcacatccagtggtcgtcaccgtgtccacgccagctgaaataacatctgtgtttgatgggatatcatacagcaagggagcttctattctgagaatgctccaagactggataacaccagagaaattccaaaaaggctgtcagatttacttgaaaaaattccagttcgcgaatgcaaaaacttccgacttttgggattcactgcaagaggcaagcaatctgccagtgaaagaagtgatggacacctggactagccagatgggttatcctgtggtcactgtgagtggaaggcagaacatcacccagaaacgctttctgttggactccaaagctgatccttcgcagccaccgtcagagctcggttacacatggaatattccagtcagatgggctgataatgacaactcaaggatcaccgtgtacaataggttagacaaaggaggaatcactctgaatgctaatcttagcggagatgcttttctcaaaatcaacccagatcacattgggttttatcgtgtaaattatgaaggaggaacgtgggattggatagccgaggctctctcctcaaaccacacgagattctccgctgctgaccggtcaagttttattgatgatgcttttgctttggcaagagctcaacttctgaattataaaatagctctgaacttgaccatgtatctcaaatcagaagaggatttcctaccatgggagagagtcatttcatctgtaagctacatcattagcatgtttgaagatgacagagagctgtaccccatgatagagacgtactttcaaggccaagtgaagcccgttgcagatttgctgggatggcaggataccggaagccacatcacaaagttactccgggcctctatcttaggattcgcatgcaagatgggggacagagaagccttgggcaatgcttcccagttatttgactcctggctgaaagggagcgcaagtattccggtaaacctcaggctgcttgtgtaccgctatggaatgcagaactctggcaatgaggcagcgtggaactataccctagagcagtatcagaaaacatcgcttgcccaagagaaagaaaaactgctctatgggttagcttcagtgaaggatgttaaactcttggcaaggtatctggaaatgctcaaagaccccaatattattaaaactcaggatgtatttaccgtcatccgctacatctcctacaacagttatgggaagacaatggcctggaattggatacaactcaactgggactatctggtcagcagatttacaatcaatgacagataccttggccggatcgtcaccatagctgagcccttcaacactgaactgcagctctggcagatgcagagcttttttgcaaaatatccaaatgctggcgctggagcaaaacctagagagcaagtgctggagacggtgaagaacaacatcgagtggctaaacgtgaacagacagtccatcagagagtggttcgctagcctgccgtaggacggacagtgaaaacacgtgcaagggtgaaggcacgtcatctgtgcctctgctgcaccgtgggcggagcctgagatggcctgttttacagaccgcagaggggagccttcgaaaccagttctgcttttgctaagtactgtatttatgtcacgcaaagcttttaaattattcctctttgtttttgcaggaagatactaatagagtatttaatatactcagggatttctgctaagtgttcttcatgggaaagtctttacaaactgaagggtttaatagtcacattaatgtctttaaatatcattccttgtatcttagatctgtgaaaatggagcaatttggtcctagctttacatttttagtaccaaagaaacaccacttaatcttctctcttgattgatttttaaagtttaaataccagtacttgcagggtgtattgccatcttaatctttattttattattcagaattacatagacctaatatcattttattcacaaatgtctcactgctttaaatcctaccaaagtaaccttggcttaagttttgatcaaggattgaaggaatgagccaaagaaatgactgactgttgcctttggtcttacaaaatcagacaatgctgtattcttttttttttttaaataaatttaaattattaccttgaaaaacacattgtttcccagtatcaccttactcctgagtgaatgtgacggcaccattccccaaataatttagcacattacaagtgtgcttcaagagcctgaccttggtcacgcatgatgcactgctgtctctcctgatgcgtgcaaagttcccttcaaatgagctatgaaattagtgggcatgggggcgcttaactgcgctccatggatttttatagggaagaatgaaagtaattggaaactgttcaggaaggagagaaggcggatttaaatttaactttgccctccctagcagcaaaagtgtgaaaatggagaaagttgaggttgtcctccagcaaagctgcacatctaaggatatgtcttcttatagataaattttatatatacacctttaaatgtaaaccaatatagaagaccactaataaaaattatatatgtagactggtg

SEQ ID NO: 29 - protein, 939 aa, Mus musculus
MNFAEEEPSKKYCIKGKHVAIICGVVVAVGLIVGLSVGLTRSCEQDTTPAPSQPPPEASTALPPQDQNVCPDSEDESGEWKNFRLPDFINPVHYDLEVKALMEEDRYTGIVTISVNLSKPTRDLWLHIRETKITKLPELRRPSGEQVPIRRCFEYKKQEYVVIQAAEDLAATSGDSVYRLTMEFKGWLNGSLVGFYKTTYMEDGQIRSIAATDHEPTDARKSFPCFDEPNKKSTYSISIIHPKEYSALSNMPEEKSEMVDDNWKKTTFVKSVPMSTYLVCFAVHRFTAIERKSRSGKPLKVYVQPNQKETAEYAANITQAVFDYFEDYFAMEYALPKLDKIAIPDFGTGAMENWGLVYETNLLYDPLLSASSNQQRVASVVAHELVHQWFGNTVTMDWWDDLWLNEGFASFFEFLGVNHAEKDWQMLSQVLLEDVFPVQEDDSLMSSHPVVVTVSTPAEITSVFDGISYSKGASILRMLQDWITPEKFQKGCQIYLKKFQFANAKTSDFWDSLQENLPVKEVMDTWTSQMGYPVVTVSGRQNITQKRFLLDSKADPSQPPSELGYTWNIPVRWADNDNSRITVYNRLDKGGITLNANLSGDAFLKINPDHIGFYRVNYEGGTWDWIAEALSSNHTRFSAADRSSFIDDAFARAQLLNYKIALNLTMYLKSEEDFLPWERVISSVSYIISMFEDDRELYPMIETYFQGQVKPVADLLGWQDTGSHITKLLRASILGFACKMGDREALGNASQLFDSWLKGSASIPVNLRLLVYRYGMQNSGNEAAWNYTLEQYQKTSLAQEKEKLLYGLASVKDVKLLARYLEMLKDPNIIKTQDVFTVIRYISYNSYGKTMAWNWIQLNWDYLVSRFTINDRYLGRIVTIAEPFNTELQLWQMQSFFAKYPNAGAGAKPREQVLETVKNNIEWLNVNRQSIREWFASLP

SEQ ID NO: 30 - DNA, 106776 bp, Homo sapiens
cagaacagccttgacaagaaataaacataaactgtgagcatgtagctgaatagtttttctacaagtgtgaagagagaagagattttgcttctgtacaaattttagcagcaacagtgaaacatttttcttcttatgtcctgtccatctgagtcattgcactgtaccaacaaagtaagtcctaaaatgaggggaggccagtatgggacagagcagctaggtgatcaccaaagacacctgcttctctctctaagggtagcgttgttgatacctatgtataccagccccctcgatattaagagtagccatatggacagggtgcagtggctcctgcctgtaatcccagcactttgagaggccaaggtgggtgcatcacttgaggtcaggagttcgagaccagcctggccaccacgacgaaaactcgtctctactaaaaatataaaaattatctgggtgtggtggtgcacgcctgtaatcccagctcctcaggaggctgaggtgggaggatctcttgaacctgggaaatggaggttgcagtcaactgagatctcgccactacactccagcctgggtgacacagcgagactccttctcagaaaaaaataaataaataaaaaataagagaagtcatatgattccttatattagattagaatagattagaatggccaatgagtataagtgaaagtaatgtgcatgacttctcggctgaggtgactagtcatccagtggaagctcctcacgttattttctgtggcatccttggaggcgatatgaagagggaggcaccgcaagatgaaaagagcctaaatccctgagtcactgcttggaaaaatgtttcccaatagagttctccaacaaagaatatgcaccttggatgtggccagagtgagaaatcaatttttactgtgttctaccacagatatattggtactctttatcttgacattagactcatcttattaatacacagcataattggccagattggggttggtctgaagatagccggcaagtgaatgatatcaagtgtaaaatttacaggagattagagaaggattgatcattgaggtctgtccggatcaatgaaggtttgcttgggaagagaggtaagttgggtcctgagaatgtattagaaaagagggagaggaaaagaaacccaggcaggagcacggtgatgacaatgtgtagtttataactttaagacataaatagatcagtttggcttggaggtaaatttgaaaagggattttgagaggctaggaaccctttggagagaaaggaagtggggttttgagtcccataccaagaacctatcttatcagtgagtgggactcactgaagatgtttgcatagtgcaatggcaatgtgaaagatgattctaggaaaaagtgaagagataggagagaaaaaagaaaagaaaaacccagccagttaaggtgcaggagaggagacgggtggcaggtagtgaaggacaggaagtgagaacttcctgttctcctcagccctgtctttcactctgccatgagtatcttgcactcaggccatgtttgtgctcctcgaattgtggcagcagtattatcgtccacccaaaagccattttccccttcttatttgccaacaaatattccgactttgtggcagcaatgtgtcctgttctggagatgaactggtgttattcaagtcagtcgcttctattacattcctctcaacagaatatggttgaaattacagaaggaactcgtgattcaggcctggacaaggcgatatcaggggaagcctgctgagggcttctgggaaagatcttcttcactgataaaaggaaagaactacctaagagaaaatattttactcttcctccctctctccacttcttgctttcaaatgatattgtgatagttgaagctgtggcagtcagcttgagtccacacagtagagatggtggaatgaaaagataggcagagcttagtttcttgatagcatcattgagtgccaaggcatgttgatagtctctacctccagactctttttttgagataagatcttactccgttgcccaggctggagtgcagtggtgtaatcacagctcactgcaacctcgacctcccaggctcaagtgactctcctgcctcagcctcccgagtacctgggactacaggcatgcaccatcacacccagctaatttttgtattttctgtagagatagaatctaattttgttgcccaggctgatctcaaactccagggctcaagtgatctacttgcctcagcctccgaaagagctgggattacaggcgtgagccaccacatccggccccagacttcttatgatgagagataattagatgtctttatagattaagccacaattagctaagttttctgttatttggaactggaagaattcctgactactccaaaataaattccttctcaaaaggtattactatctaaagtttttgtatgctccaacccatggtgggctgtagctgatgatttcacacatggagacatatctgaatccagagtaaagagatttaaacagtgaagctaagacccttacaatacatgcacataaatatcttaagcccaggtacaaatgataaaccaagaatgaaagagtcacatgaaaaccctttaaaagctgaatggaaagcgagatatcaaaggaaattatctaaaatacagaagtcaaacagtccaccagactagccatcattgaggacaatagaaataaatgaggcaaagcattcagaagatggaaggaaattactgtacccccaagaaatagtgttattttgccctggatttgtatatcattgaccttaaaaaagcatctgtaatgaaagcttcaaaatcagaggtgggtataagatttccccagatataaatttaatgaaagattcaaataaaatcagtgggagtcatattgcttatacaaaatgacatacagcctgttaactgaacaaataatttattaacactgtaaacaaatattatgccatgaagacaactggaaaataaacacacaaaaatctttgaaaccttgagcaaaatacctcccaaagaacaaaaaccaagttgtcaagtatatctttagaaaatcggaagtgaatgaaaaaagagagtgtgttcttattcaaaaagctaatattctatctcattgtgatcctctttctacttgaaaaacaactattctgtcctgaggctatgttttcatttgtgtttttatttagtgcttttccaacatttgaagtgcctgggacattatggttttcaataaatgtttgttgagtgaatatgtaaaatctgctgtactctttttctgtggctgctgtaacaaattactacagacttggcttaaaataacagaaatgtattctttcacatttttggaggccagaagtccaaaatgaatatcactaggccaaaatcaaggacagcagggtcatcttgatccagaagctgtaggggagaatctgttgcttccctcttctggtgactgccagcattccttggcttgtggctgcatcactccaatcttaaagaccagcaccttcagtagcaccttcaaatctctctctgctctgtctttacatcacctctgtctgtgtgtaaaatctctctgcctcccttttataaggacacatgagatcatatattaggacctatcctaatagtacaggataatcttccaactcaagatcttaaacttaatcatatctgcaaagacactttaaaaaaaactatattttgtaacatgcacaggttccagggattatcaagtggatatcttttggaggggggcatgttttttttttagcttaaggcaaaagcattctaaaaaagtcataaactgaaaacagaagagatgctaaataaagggaacagcaacaggagaaataatgtttctattatccatatggatgactttgatcatcttaatgcagtttaagtctttacttccaaggaaaacaaaaattgaagacaactttatttggttaaagttaatgtggcaataaagaaattttcaaaccaaacagctagcactaataaataaaaattgtaaaattataggccttttctttgaaataaataattaatattacctaaggtaaagaaagggtgtattagaatttttgtggagaacataatccaaaataatcattgctagtataattcacttggactctttatggagtaaaagaatattggatgaaatagtttccctataccaacgttatttttgcagacttctgcagatagaagagaagaaaatattgccaagaattctgataccataaaggctgaaaggaaatgttgagtaaattaaacatttcaggaagttttaaaactcttcagaatacagaactattatttagtgcactgaaaaaatatatataatttcaaaattcttagaacaacagaaatctagactatattatcactattatttttctcctgctgtttttatatccaaccactttctcccaatgcattattgcacattagggaactcaatacaaatgcagttaaaaattataggaatcataaattttttagttttattttgtttgcttttccaaatattttcaaaatctctacctgctgagaacaaggcagggctttacatatatgcctttaagaatattaagaatattcactattatttcttttaaggcttacattttgaagtttatcttagcattccttacctaataaatatttgttggaaagtaaatatttatttagtcaacaaatatttgttgagttattgaatgaatgaataaatgaataaataaatagtggctaagaaacacttttctggcagcagggggtggggggacgggggaagaaagtgaagtgaacagattctctctagagtgatccaaatggctaacaggagcataattcttgcttgtgaaatgacatctcctggcattcagggattagtggtgagagacattatgagcatcagtctgggtatcccagaaaactgcagagaattctcaaatcagcctggaaacaacaaggaatagagaagatagaaacttattgtttcactgatttttatttttattttttatttttttgagacagagtcttgctctgttgcccaggctggagtgcagtgacgtgatctcagctcactgcaacctcaccctctgggttcaagcgattctcctgcctcagcctcctaagtagctggaattacaggtgcccaccaccacgcccagctaatgtttgtacttttaattgagacagggtttgaccatgttggccaggctggtcttgaactcctggcctcaaatgatccacctgccatggcctcccaaagtgctgggattacaggcgtgagccacctcacctggcctgatttttattttttattaaattatgtttggtgtgttttggaggtttattttccttctcatctattttgaaagtcctcctttttcctctccctttcctttgcctcttgtctctttcttcttctccttttcctcatctttcctccctctccctttattgtgccagtcattggacaaattcatcattttcccaccaataaaaattagatgtggcatgctgaacattttatgtcttaaaactactcctgacatctgcatcagttttcagctcttggaaaaagttaatctagttcacttagtcttaaaaccaactgaaccttttaaaacagttgttgacgccaaataaaagatgacaaatagggcacaggcattggaaatacaggtgaatttaccagcatcagaaagaacatggccaatatggctttagacctcacggttagccaagtcagttgcaatgactctctcctttttcaactctcacagctcactaaacctttaaagtttggaaatggctgaattgaccaagggtgtttatagaatttatgagtttaataatagtggccctgtggcaagatggaaagaaactggttcgggccctccttgttccctatgtatacagcctaatttgcagattctatttcctccattgtgaatctaacttgccactttttttttttttgagactgagtctcgctctgtcgcccaggctggagtgcaatggcatgatctcggctcactgcaacctccgactcctgggttcaagcaggattctcccacctcagcctcccgagtagctgggattacaggcacccgccatcatgccctgctaagttttgtatttttgtagagtcggggtttcactgtgttggccaggctagtcttgaactcctgacctcaggtgatcagccttgaaccatagcattcagctcagatcactgattaaagggccagccaaataatcacacagtagtgttaattgctgactacatttcctgagatgctcctagtgcccaggtgagccagcagcacatgttatggtatggctatggcttgtttgttccaacggaaacgcatgttgaaatcggatccccagtggcagtgttgtgaggtggggtctaatgggaggtgtttaggtcatgacaactctaccctcatgggtggcttggtgcccttctgtattctacaacagtaaatgaattcttgctctggcaagactgaattagttcttgtgggaatgaattagctcccgtgagactgcgctgtcatagagccaggatgcaccttgggttttgcaactttacacgtgtctgcttcccttttgaccttccctaacgttgtaatggtgtgaaagccctcgccagaagccaagcaggtgctggtgccatgcttcttgtgcttcctagcctacagaaatgtgagctaagtaatcctcttttctctataaattacccagcctcaggtatatgttatagcaacaaaaaacagactaagacagcaccgtgtatacacagaaggcccaatagctctgtaggatgtgtaattcctggtacctaatagaaaagctttaaatggaagctgtaagtgaaaaagagaggtgcatacttggcctttgatgttacagtgagtctcttgcatcagtctaccgcctatgggaaggaatttgccaagaatttcctcacctactcaagatcagatgtgatttccaggtcttcaccccagggaatgtctttctagtcttttctggaattcgaacagagtttctctcaacattcctggcacagtatgtctgttaacccctcccattctggattattgtttttccttcctctccttgttcatttatttgttcatttgttattcactaagaaatcaataaacatttattgagtattgaatagggaacagatatctattgaatgttaaataaggaacaggagcagatactggaattttagtactcaaagtagatcacgataatgtatgtatcaaaagggatggagattgtcatatagaacctacagtaaactgttgttctttcactccactggcttggacctgataagtggaaattgaccagcagtagtcgtttgaaattatttatatccaatgtagattcattcaacgtaagattacccaatatggtctatttaatctaggagggtgcctgtgatggtgcacatgctggcccttctacctctgctcatctggctgtattaggtcaccctaatatgctgatcctcacaagatgtggtgcccttcattggatgcagtcagctcacacaggttggtactaataagatactgtggctagaactgggctgtggactcaaaacctacacacacacacaccccatatgtggacttagggtattttatttcttctggcaaaaaaaaatgcatttaaatagtatattcattatggtagaatttcaggcagagtagtagagctttttcatagcaggtggccattcttaatcttccttaagtgtacccaacccaaaggtctattatcttctctgtacataagacctggtgataagattgttgtctttgtaaataagggcaagtttaagagatttcatatatgtttgccacaaggtcaagtttaagagatttcaaatgtttgccacatctgagattttaaaaaatacttccagtttaacataattttatgtacattcttccaaatactttttgcttttcctttcactatgtttaggtaaatttgagccacatttttgcctttcattcctaagaaacatatcaaaatatttgacccatcaaacatttattgaaatgtcagatgatcttttcaataaaaagagggtttcaagggctaaaattcaggaagttaatgtgccaaacttaaacatactgtgatctcaagaagtttaggattgcttcagaatgtaaaattaatcaatacaagatgggcctacaatttagaaaaacatatccctttttcctttaattctttttctgttactactattttgtgagaaaaacagcagaaatgttacagagtaaaatggacccgtttgcttttaaagttttgttttttgtttgtttgtttagtttgtaatttagaaccgtttgaaacaacgtttctcagagtgtgctctgtggaacagagggccctcaaaaggtacctcaccagaaaaagctgtcttgtcaactaaatggggaaagtactccgtcgtgtttcctctctgggaggctcacaatgtgtgtcaccatctggaggctctgcaagaatggagagtagtaaaagaagatttttcactttaacccagcattgtttgcttggcaagtagatctgttaatatccatggattgtatctggggaaataccaagtttttcatagttacttaacccttgaatatttatcctcctcagagcatggaagcaagcagtagaatgcgatcgttgatatatggactttaattttttaaattttatttatttatttatttattttgagatggagtcttgctctgtcacacaggctggagtacaatggcacggtctctgctcactgcaacctccgcctcccagcttcaagcaattctcctgcctcagcctcctgagtagctgggattacagatgtgttccaccacgcctggctaatttttgtatctttaggagagacagggtttcaccacgttggccaggctggtctcaaactcccgaccgcaggtgatccacctgcctcagcctcccaaagtgttgagattacaggcgtgagccaccacacctggccagatatatggactttagactcagacaacgtgggttcaaaccccagttctgctatttgccaggtgtgtgaccttgagcaatagcttaacctctctaaatgtcagtccatagctaagctgccagtaaatatgaagttcattgcgatttttcttcctgagcttgtcattcagaaacaaaatgatagatttgcatggatgatggatttcccaacaggtcaattttcacatctggaatctactttaaacgtgctctaccacatcaaagtctaaggaagtcaatctcacttggaggcacactgcagagacaagtaggccttcttccttgtccctctgtcctttcagacttctccccctcttgttccctctctcttcttaagctttccagctccactactgctttggctaatttctttgggttccccctctctcattcacccagcaccagctgaactgatttaggtttacctggctatgctttccaaatctaattcgacaaatatttactgagtacctaggtggtccttgaatcaccctgagcacccaattccaggatatgacttcttcaaaggacagaattggaatgtttacataatatgagggaaaaaaaataaaagaaaacacttagcttctttagcaagctatctgataaaatagctgaaattcaagaagccctttagttaggagggagagattgcgaacacaacaggaagaagccccaggctgagtggcaaaggttgagattttctatcgtaagcacacctcacccaaacgcttgctccctgaaagctgctgacggagctttggcgagggctcatcctcccgttggctgataagcgaagccctgttttatatttaactcgctgcagtgcaggaggggtaggggtggagatgcgtcgtttataaggggagctgtgacaatcttcttgccagccctcttcctcccactcggctcctcttacggagtcctcattccaccccccttgtttccgcattcatcctgagtggctggtgggaacgtgaaaagggagaggaaaaggcgcaagaagccagagagaggggtgtgggaaaagcgaaaacaggctgccaaatcaggggattccttccaatttaaaaaggaagtctgctgacgttagttagttaaatttaacatctttttatgtgtaacacttgactttggaagcaaaaatgaactttgcggagagagagggctctaagagatactgcattcaaacgaaacatgtggccattctctgtgcggtggtggtgggtgtaggattaatagtgggacttgccgtgggcttgaccagatcgtgtgactccagcggggacggcgggccgggcactgcgccagctccttcccacctgccttcttccacggccagcccctcaggtcctcctgcccaggaccaggacatctgcccggccagtgaggatgagagcggacagtggaaaaactttcgactgccggacttcgtcaacccagtccactacgacctgcacgtgaagcccctgttggaggaggacacctacacgggcaccgtgagcatctccatcaacctgagcgctcccacccggtacctgtggctgcacctccgggagaccaggatcacccggctcccggagctgaagaggccctctggggaccaggtgcaagtccggaggtgtttcgagtacaaaaagcaggagtacgtggtggtcgaggcggaggaagagcttacccccagcagtggagatggcctgtatctcctgaccatggagttcgccggctggctgaacggctccctcgtgggattttatagaaccacctacacggagaacggacgagtcaagtaaatattaatttttgctttacctcccttaagctcacatatctgctttccatttcttttcctttccttttcactttccgcttttaattattttgttggtctgatattgatcggctcttggtttcaattctggctgtccatctgggaagccaaaattgttgccctattgtatttccaaaccctgtcataaaacttgaaagtagtgaatgagcttcgtagagtcaaaagtcagtgtaagtcttttattccatcaggagaaatcataatatactgcaccctatcttgaagatttccataaattatctcaggtttgagaactgcctttggtaaatttcactagtgatattcccaggctatgtagcaatatatatacagcaatatatatgaacttttaaagtggtattacactaaatttacgtgaaacatcagtaaatttcagttattattttgtccattttttttttgtccaatgtctcttttttggagaagagagacattgaaaaatcacatgtgatccacagaattgtctttgtgtcttcatctggaaaggaagacaggactgtgtttttttctgtctccgatggccaggaccatgctttacacataggctttcaggaaatattcattgagtccacacatcagtggcataggtaaatttggaggcttgttgctcatgatacaatgtgcaaacataatgctaagccttttacaacataaaagatatattaagtagttaaatacatacaaatatttgtatacaaatatctatctagatagataggtatttattccactttcccacctatttgtctagcctttgtattgatcagtggctactaccagagctatgttaaaggcataaactctctcattgaactccaaaaacttccttcacactgtggatatagcccttgcatcagggaggaaggctacactacaccttgtgttgtgtctggactgctttgacctttgctggcttagattctgaagaggtaaatgattaagaaagcttcttgtcacagtttagagatgtgagtcttgggccagtccacccacaaatatccctttttttctgttgttttaagcatcttacagagcaagcaaattttttggtcaaaattctttctattgtttgtcagacagacccacggactaaaacaaaacatttaaatattcctatattcctgtgtggtaaactgataaattgagtagaagtgatagtttgaagaaaatatctgtaggggtcatgcttatatagatcttatatcttaatactgctagcaaaaaaacactcttaccatttacgtattttttctgttcataagaattacatcattgaaagcataaaaattatcaaaaaggataatcaaaataatctgtaagtaatttcactgcccagtggtaatccctgctagcatattaatgtatattctaatgtttttctaggcaatcaaacctttaattgcattatatctgtctatctatatgccttttttacttaatgtcttgagaagttccccttattcttacatgttttcaagaatctgttttttgttctttattgagacagggtcttgctatgttgcccaggctggtcttgaactcctggactcaagcaatcctcctgccaccacttcccaaagtgctgggattataggcatgagccactgcacacagccaagaatctgattttaaagatgtgaaatattccattgtttgaatacattgtaattttttaaaacaaattatattgttgagcatttgagttgtttctagtattttattattataaacaaatcatcaaataacatacttctaaatacctctttgtatgtgcatctgtttatttccttaggttaggatatagtcctaaaaatagaattgctgggtcaaagtgtacaaatataccaagatattgtaatagttactttgtttattgataacataaataatacacgtttattgaaggaaactcagaaaacagagaaaattataggaaaacataaattcatccataaattctttacccaagtatagccattgttaacatttaggcagagactcttttagtacttttctggacatagatagctgtggcataattatattatacatagtaatgtgtaacatgcttttccaatatagcatcaatgctttaagatgtcatttgatgttcttccacaaatgattcgatggatacatggtaggccattgtatgactacaatgtagttgattcacttttccattaaatatgagtatttaagttgctcctattttttcacctataaggatctagaagaaggcgcatccttatattgactatccttgtaaataactatttatggacattttctaatatttaagaaaattcctagaagatgggccaaaactacctgtgtataaatgcatgtatgtctgtgtatatatgtgtacatgcatatacatatatatgcatgaacatgtgtatgcatgtgtgtgtgtctccaaactgacttccaaaaaatatgtcccaaactccatttccaccaacaatgtatgaaagcgactattcctctgagccttactaacaatacaatgattttttaaaagtgtttgccaatggtcgagggaagggcaatattctgaagaatatccaccttaaagagattctaaaaattcattgaagtgaaagcgagtcaagactttttaaatattattgctaaaactttaaaactgcttcttagatcataaagacaagagaaattttatctgaataaaaccatcaaaatatttataaaataataaaataaaattttacacatattaggaaggccaaaaattggaactatgtagtctccattaataagtttctattatgtactttataagtctaaaaaaagcattatatacacaaatactctcactctttgagttattttagtgtaccagttaattttgccataaaatatataccagagagctgcccttctgaagctcagttgacttaacttttgattggagattacgaaatgatggcaacatcggtgaggaaggctgatgctcagttcagttctcactgaggattggtgttcccaagtttgtatgtttcattgggagcagttgaagctctcacattacaaaagatgctgccagttctgtactgcacacacatggttttggaacagatctggcgtcagctcaataacctcatttaggctaaatggaatactttttgttatccttgtctgaaatatttcaagcatatgagaaaagtgcatcatgcttttttttctagcctgtgagtaatattttggcaatgcagcctctaggagttctcatccacaggctccatataagggccaccagagggagttcactgggggcagtgcctttctttcatactatagagtgagcttcgtcatatgtgacgtttgtatcattttaaacgtcatcatagtaatacatttgaagtacggagtcaaaattatattttctgaccttaacgtaaaatgtaactccaggattgagtattagtagttagggatattaatgtgacaaccacaatgcaaactaaacaggattgcactcagtagtaaccaaaattacttaatttctgcaaatacaatcaggactttgagcttcacaaacttcacagctacccaagttgctttctctcaagattgagacatggggaagaaaggggacaaaatttagaattccacattgtctttctggggacagagttgtagtggggcgtggaaggagaaagtttgagaaacatccagtcgcttttcctttatcgatctacctcttcctactcgctagtctattcttcagggtctgaggaaaaccacttggaaggattggaacctttggaatgtttctctgaccacaccctccttcttcccattttctcaccgtgttacgtaggatttccagctgttcccttccctaaaagagtttccctctactcaaactccaaagtatatattttcttctctccaagatttggcttttccttgtcagcatttggattatgcttacttagcacttcccaaagtatgtactgcagaattctagttgcatggggatcttagtagatattaccagaaaaatagcaggggagagattctgtggctaaatcagtttgtgcaataatactaaatacaaaatgatctgttttggattttgtttttaattatggaacttttcagagacttttttttttttaaagagatgagatccaggctggggtagaactcctggcttgaactcatgagttcatgagttcaagtgatcctcccacctcagctttccgagtagctgggattacagggttttcagaggcttttatatgataatgtcctctatgtagtttcccaactctctgtgactatggattcttctgtggggttcctaagagtagggatatatgtctttcctttactgtttggcacacagtgagcactcaaatattctcaaatggaataaatgaaaatattatcatataagctctcacatgactagtatcctctggcaaatgctgggacacattgcattaccacagcttctctcccataaacgagcctaacttccaccaataacatctctacattcccacttagggtgaaaattttcccttggttccttttctgcctaccctgtggaagggaagagtttatatgtgtatgtatatatatttgtacttaggaatgcaatctccgtagtttaaaggcagagaaacagtggaattgacaggaagtacaaccggaattttagagatcatttctagtttgggctgccaaggtgttcttcgtagcgctagtaggatttaagctgaattttgatgttctggtgggagttcagcagcagagacaagtgagaaactaaaagcaggcaaaaaggaaaggcaccaagtcagaaaagcagagtggggacaagaaaattagtttgtaggggaagtttatatgaacaggctagctagatatcactgaggaaaacccttacggaggaaaaggaaaaatagccatgataggcattatgaaggagaaattaccccatgactttttggatacagatggcaaaagaaagagttaactcaaccatccacttggatatatgaaagatattgcagcaatccaggaaagagaagataaggatcagataggaaacgtgatttcaggatagagaagagagggcacagtagagaaaatagtttggaggtaaagtagtcaagatttgacgattgcttgactatgaggaagggtgagttaaagttatgggtctaggataccccagctagccttcacctcaattgatattggaaataggtgggaagtagccaggttagaagggaaggtcgtaagttcagtgtcagatgtgttgatggcttgtcagacatctaggaagagatgactagtaggcacttgcataagtatgtctgaagcacaaggttagagcttgtaataaagatttaggagttgagtggaaacatcggtgagataatcatcattaagtgtgtgtgtgtaatgtattcttacctgcatggatgtgtatgtatactcaagcacatgtagttttgatcttgaaatttttgtcgtatgtcagtttgttcattatattcttagattagtatgctgagctattatcccattgtcaataaaaatgtcaataaagaatagattttaggttgggcgaggtggctcatgcctgtaatcccagcattttggaaggctgaggtgggcggatcacctgaggtcaggagttcgagagcagcctggctaacatggtgaaaccccgcctctactaaaaatacaaaaattagccgggggtagtggcacatgcctgtaatcccagctactctggaggctgaggcaggagaattgcttgaacccaggaggcggaggttgtagtgagtcaagatcgcgccactgcactctagcctgggtgacagagtgagactccatctcaaacaaacaaaaaaagaatacattttctttttggtcttgtttacttgttgcaggaggctaagtaaatttcttttattttggaagcaagaaaacaaaaagaaattttacttgaccttgaatatcttctacatagaaaaaaaaaattggaaaataaagttaaataactaactggttcattcaaaccaccataaaaatacatagaggtctgaacaatctagaggggttgtttttcaccaagctgctcctctatgtaattctggaaccctttatttagtctatatagacccctagcaattgtgactacctgtcccgaatcagaagctctgtgtttaaggatttcacccaaaacttgctgtttattttgctggttcaacttataaaattgctcagcacagccagagagtcttcactggaaacagcatgccagatgatttatgagataattaggtaccttttttggttttttttttagagtcaattcagagtgatccaagccataacttgtgccatcgccccttctccctcagttttcttaaagtcaccttgatctgatccactcagagatgccagagaaatgctcttcccttttggaaacgactaaattgcatagactatcattttattgtgctaggtctagtaagtgacttattaatgtggcatagggaggcccttgtgggaaggtggtttactccaacacatttgcctggcgcgataattattcaggacgtacccacaagtcactcctgaacatattgtgctattagtcagcctttttctcttaatttgcaagacaagtcatctgattttaatcactgaataaaatcttcccaaagaagttgtgatctagaattgttttgtattgttatctcttattccttgttttcaactttgcacacacttagaaaagtttagggccaactgatggaatttaggatatataaaaaggagcttttgagttattctgaagttcatgagaaaaagaacaggttaccattttaaaaatgcttacattgcctatagtgtatatacaccaagtaattttgttccagtatatattgcagtcaaatgaaaggatttgaaatatttcagattgtgaaagtgctatgtcagaaagcactagcattctagatttataagatgtagaatgaggtatatcctaaccacattatgtaaattttaagggagtttcaaatgtattactacatgtaatctacgccttctcacttccccataacgctgtgaggaggctatacatgctctggtgaccaggttttacagatgaggacactaaaagtctggggttttgtgacttggtcaagatcacactttagtagctgaagtggattagaatgtaagaatgtttgctcttagaaaagggttttccccataaaatcatattggctctgaactttaaaaaagaaaaagaaaataaacattatatagctcttcgggttgatgaatgtcactgtatctatatctgggtcactgtgattgagttagacttgctgtgactgacatttgctgagaggaccactgagctgggccaaacacaccgcacagagaaatctcccacactgttctgttccatgtccgttggcaagctcaggaatacgctagtttaggaaggtagtttttgcctacaatcaagcagaatgtcttttaaagagagaaggtgagaaaaggattgaaaattattttctttcctgggatcttaggaatatatattatatatattatattatattttatatatatattatattatatatatatatatattcatattctggcatccagccaagagtaaaatagagtatttgaaaacataccccatggctatagcttaggaaagtgtaattccacttcctccttcctctcacctcccacacacgaagatgtgtgtggtgcgcgcatgcacgcacgcacactcacacacactcatcttctcaaattagttagctggcctatttctgaggtgtgactcagaggagacattcttgcaaggagtgacttttccttttcccctgcctctggaagacatcagaagtcagaagaattcagaaggaaaaggcagctgactaaacatggggttggagcttggtggatcttataaaactttcaaactctgggaaagtgtacaggcttttttagagtctgatatacttgcaattaactacaatctgcaagatgtttagaaacttcaattgactaaactgttaatgtcacaaaactaatcaatgattgttctattgcagaatgaattcttaactgaggcttttcttgggtaactttattgtgacataatttcagactcataggaaagttataagaacggtactaggaattcctagaaatacttaacctagattcaccaattgtttacgttttagcctgtaccccttccccttcctttccagagcacatggaaacatcctctccctttaccccttaacatcagagcatatttcttaagcacgggggcattctctaaaataaacatagtacagtcatcaaaatcaagaaatttaacattaatacaactatctaattcacagtctgtaatagaattttatcaactaacctaatgatgtctttttgaatgttttttcccccagtgcagtacccagtctggaatgctgcattgcacttagtgtcatgcccttttagactcctttaaactgaaaccagtcccttagtccttctttgtctttctaaagttaatatttttgaagaatacaggctggctattttgagaatgtccctcagttgtagtttgtctgattttcctcatgatttaaaaatgcaagttaagttttttgtttttttttttctgtcaggactatcacagaagtgatgtgtctctctcaggaaatcacattagagacacattgtgctggtttgaactattattactgatgcttcctttgatagcttgcttaaggtagtgtccaccaagcgtctccattgtaaagttacaaggtttctctttaggtaactttcagggagtttttgaaaccttgcaaatatcccttcctcaccaaactttcaccccctggatttggcatccactgatgattttttaaaataattttttccttcaaatattattagtaggcaatctactggaaggaataactttcccttctcacccatttatttattcattttaaaaaatcagagtaaggactcagagattgttaatttgttcaatgagttattatcccgttgtttattgtgatgttccaatactcccataatttgccaaaggcagtcaaatccttggctgtagtaagtccttgaatcaaaataaaatgcacgctcttctcatgatctctgatattttcctgatctggcctctgctgacctcatgtcaaacttatctctggctccagtccgtctggttcagtgttctttagccacactggacacctttcaattcttcaaccacagcaggttctttttcatcttagggactttgcacttacggttccttctacttgaacatgtttccctgaacctccacttgcctggctttttctcattattcagatctcggcaaaccaagagattgtgaccactctacctaatgttgtttaccacttttcctagtcattctctgtctcttccagtgttttattttctatgtagctgtcatcactctcctaagttatttatttatttgtgtgtctcttgtctaacactctgtaagcagtctggaatcttatctatacatgtaactgcccagtgggttcaccttgcccgctgcctagacagagccgatttatcaagatggggggaattgaaatggagaaagagtaattcacacagatccggctgtgcaggagactggaattttattattactcaactttgtctccccgaacatttggggatcagagtttttaagataatttggcgggtaggggcttgggaagtggggagtgctgattggtcaagttggagatggagtcatagagggtcgaagtgagtttttcttgctgttttctgttcctgggtgggatggcagaactggttgagccagatactggtctgggtggtgtcagctgatccatcaagtacggagtctgcaaaatatctcaagcattaatcttaggttttacagtagtaatgttatcccccatgaggaatttgtggaggttgagactcttgcagccagaggctgcatgacccctaaactgtaatttctaatcttgtagctaatttgttagtcctgcaaaggcagactggtccccagggaagaaggaggtcttttcaggaaagtgctattatcaattttgtttcagagtcaaaccataaactgaattccttcccaaaattagttcggcctatgctcaggaatgaacaagtgcagcttaaaggttaaaagcaagatggagtcagttaggtctgacttttttcactgtcataatttcctctgttataattttgcaaaggcggtttcatacagcagctagaaaaatgtctgcaaatgtgtgcatgcatgcataggtgcttgtgtgcgcacgtgtgtgtgtgtggaagggactcaattaatatttcttggatgaatggatgatataataatttagcctgatattctttatgatatgtctttcttagtttccagaatcctgaaggacaaaatttttgtttgtacaaattattaatgaatggaaattaccatttctttacttttatactttttactttgcttcattttctaataagccaatatacaatattcttttactgtaatatgtttacatgtaaaaagtgtatgctattgatttttttgagcaattactcagaaaataatattttcaccttgaaattatgaaaatactaaacattaacattttagtttacaccagcatatgcctagttagagccataaaaaaaaatgctgctctctctttttaagagtgagctttaaactaggacaaaggttacttcacctaggagattactcagcactgcctttacatgaaaatgaaactgggggttttgtccctgttgtaacataaataacaaagaatgtgccattagggacagggactggggactctggaataacctccactctgtgacagaagacagctgttcacttcccataagggcagttagacacaagcttttaagtttggctttgtgtttatctacttgttgctcaatgggcttggggtggagagagtactagctcataattggatttatttttgctcctccacagagttttagttatggcaccaaaatagctgttaggttgatgcaaaagtaactgtggtttttgacaaataaatatgtgaatgaaatatctgaagcaatctgactcagaattttttaaaaatttgttaagctaaaaattccaggaaaacctttgacaaatatttgatagtcttctagatggaacctcatttttagaaatgtaatagttataattgcatagctgatttttttttcccctaggaatagagacataggggttgtcagaagaggcagcatgcatttcgtttgtttgtttgtttgtttctaaggagcatagcggccaccgatcatgaaccaacagatgccaggaaatcttttccttgttttgatgagcccaacaaaaaggcaacttatacaatatctatcacccatcccaaagaatacggagcactttcaaatatgccagtggcggtaagtattttttaaatgttttgtttatgcagagagtctgttgacaacattaggccagttacctgattttctgtgaaagagaacccgttgaattctaaaactaaatgtgcactaatagtttatttagctgagtgaaatacattttggcaatctttttctttgagtcctagaagtctgtaaggtatcacagtccagtaagaaagccagattggtgtttctgtgcaagagacaatgccatagacacacacatcagcttgggctctgcttagctgccaggatccctgagtcgtgacagattacagtaatggcaaactaatggaattacagacttgaaaatatttgagggctactcactatttagttttcaggtgaatataaatccagtttttgttttgtttttttgaaaaagataaagctactatttaaaaaaatcatcacttaaatagtgggttgtggaagcaaactccagggaacactttgcccatagactcctttggtgagtgggaagtgcttgttaaatgtctggagaaaaaaaaaaaacaggctataaaaaaggatgagttcatgtcctttgcatgaacgtggatgaagctggaaaccatcattctcagcaaactaacacaggaacagaaaaccaaacaccgcatgttctcactcgtaagtggaaattgaacaacaagaacacatggacacaaggaggggaacatcaacaccaaggcctgtcaaggggtggggggctaggggagcgacagcatttggagaaatacctaacgtagatgacaggttgatgggtgcagcaaaccacagtggcacgtgtatacctatgtaacaaacctgcacattctgcacatgtatcccagaacttaaagtgtaataaacaaataaataaataaataaaattaaaaaaagaaaaaagagaaaaaattttaaaaggctgataatttctgctgtataaattatttgttaacataaaacacttctctctgttattgtgtctcatccctataatggataatgttgttacctagagtttcattgcctcaaagttgaggtttacatactttacacattcgacatgtaaaagggtcagcctcatctttaggtataataatcagaaggacaccagccccaaattatgtctcccatctttctgatccactatttgaaatattgtcattaaaattcatctttttaaatgataaaatattccttgaaaaagcaacaacaaaataaagcaaataaacacttaagaggattaaaatatactcttagcagccatccatgcctcagtgagaattaattatcaatttgttttcttctaaggtttgattggagaagaaagaggaaaggataaacttaaagtatgacacaccaatctagatgaaggtggggggaaaaaatggcaaagtcaccaacttctgcttaagaacttcccttatggccttttcactgtgcagagttacactttaccttctactagatccagatagtagtcctggaagaaggagaatattctgggttcttaggccatcaaaactaacactactaggtttttatggtagagtaatgtagcctggagccccaccacgattatacaagggcatgcacacccgtgcttgaagtgtcagccgcacccattctaatccagcctccctcgcttaatctctttttaaaccatcccaaatagagtggctgcaggagatgtggaaatgtttaataatggaagcaggagttgggcaagtattcgtggttgaagtgttaggattggtgatcgacagtgaggacagcagagctggcatggacagaacaagccagataggtcagtagttgtgtcaagcaatagaatcctcctctctgtccatggagaccgagccactgactttggtgaccatacctttggtgtttgatgtagacaaccaaagacggaaaagagaagccaatgttccgctacaccaggtacagcaattgccctactgccagtcgaatcagcaaatatctgagcacgagtctgtttttcattaggagattgcagtactctgaaatattatggtcagcatgatgtgtttagtgtagacagataaactcctatttaactgatagtccactcaaaattttatttctccctgaaaaacctgatacagtgtgtaattcagtcagtctttaacagttctaaaaacaaagtaaattttcctgtagtcttttcaacatcaccacaaacaatttgacctctaagctttgacaaaggacttctggctagaaagcaaggtttggggcaaccgtttatttgtttgtcttgcatatatatgattgatattttgatcgataaaagtttatcttttcttttcaatagaaagaagagtcagtggatgataaatggactcgaacaacttttgagaagtctgtccccatgagcacgtacctggtgtgctttgctgtacatcaatttgactctgtaaagagaatatcaaatagtggaaaacctgtgagtctcattatattttaaaaatttaccacctatgcatttgtaattaattatctaccttttttgggtagtttttttttttttttttcaaacaacatgcctgaaaagccctttagtccccagggtctgtggacttgataatacatagaaaaatgtaggctgaaaggatacaggtaaaaaataaaccaacacaacagacatagatatttatggccttaaattatttcaagggaaacatgtgctgtaagtcaaaagctagctcctaagtataccagcacaaatatattaaaatgtttgggtatgcccaatgtaataaaatgtttgggtatatgtgtacctctcccagatatagactagagagagaggaggaaacctgaggtaaaggaacatccttcgaatgacaaggcactgaaaagtttatggctccattcctatatgtaatcaaaataggtagcaacaaagtatccaaaagcattttttaaaagtatgataaaatataaataagctttttttaaaaatatcaagacgactagttcaatagttttctttctttcttttttttttttttttttttgagacggagtctggctctgtcacccaggctagggtgcagtgacacgatctcagctcactgcaacctccacctcccgggttcaagtgattctcttgcctcagcctcctgagtagctgggactacaggcacccgccaccacgcctggctaatttttgtatttttagtagagacggggtttcaccatattggccagccttgtctctaactcctgacctcaggtgacccactggccttggccccctgaagtgctgggattacaggcatgagccaccgagcctggcccaatcgttttcttttgaagaaccacatacttttacctaattaattttttcattttggaggcccccattttgcttatatcctgaacatatgtttaggttgtctagtaagccagttaattcacctctgtgccatatatgtcatatatataaagcctcatcatctttgcaatataattttataaggaggaaatcatcacccccattttagagatgagaaaaattgaagtttaataaatttaggctatttattcaagattacccagctggcaagtggtagaaacttaaattccaaactccttccagatactgtatcttgcttagccttctgatgtgtgatattctgaaaatatctttacctcttcatcagtcactggaggagaggggatgggttcctctatttctgtgaaatgaacaaagggaaaatttgcctttgctttggtgtggtaggagttgatattcagatgtcctcaacctgggttgccagcatgctgcctataccgtatacaaattatagcgagtgggggatgtccacagaccttttcaaaggggctgcatatcatgaggactcatccgtattctaacttttccttgacacataggttgctttgatgcaaccttcagtcgtggtaaagggaactactagtggctgatagataatactggtatgaaaaggaaatggcatcagaaataggaagttgttttttctagattgtgctgagtgcagtcgatggcattcctcttgcttaatatagaggtgagaacattagtcaagcttggttttttctttccgtctcataacaaacatgcaattttcatctgaagctgctttcttcatcattgacaattcaattgcatgactgtctttcatcatgtgcaggtgtttcccataccaagttttaaaaattattattacattctgagcaaatttttctatttgaggtagaaataccaagaggaaacagaaaggctaagcaattgtactaaagatgacaaagtctcataggtaagaacaatgcatttaaccaatcagcagaggacatagtacttggagttattttctaatagtgacagtgagcttgaatttccaatatgactctatcaccaggtcctctgaccaaggacatttacttgtaatattatactaactaggtaaatcactagagcctgtaccagttagttagctgggttcttaggatggattttatataaaggatttgaagtgatataatgaaaaaatacagttttgcaaaagatcccaaaatgtcctgtaggtggtaattatttcttaaatggttcttctatgaaaactaagagcataacattttgttttaaataagtgatgcattccatcatttgggagggaaacaaacataatattgttttaatacattactgtccaatcatctattttataagagatcaacagaagccaaattcccttttgaaacttctcagaggctctgagccagaaaaattacaagaaaatgagatatgccactttccccttcctccaacccttccatagaagacaggcagccagagtttcccctcctgaaaaaacagtggggccgtttcctttaaaagttgaacagaacctaatgggagaaatttaaggcatctagtgtgaatgcaaatgctccacagtgagttcctcctctttggcatttgggaggttcccctcctggctccctacccacttactgtaagttgaaatctaatagttgacacccacccaagtacaaactgctcctggtatgatttcccactccagagagttacagaaaaaccaacctacttaaatctattgaaatgtaacatcagaggaaactcacaccagcctcagagtcctacattcttagaacttaacagacaagctaagaataaccaggtatatgaggaaaacaagtaacataaaagaaaaacatccaagacaaatagaaacaccgtgggagtaaatagtgataactggagaaacaaaagagaatcccgaaaaagtcataacaaaattaaacatgcacacacacaacctttaattaatgtattcaaaaattcaagaatatgatagtcataaaagaaaaaccaaaaagtgacgagaaaacgatcagaaatagtagtcagagttttagaacgtgatttccaaagcatggcttgggtctgatccccaggaacctgtttccgacccattccttccaaaactggagctcaatatgcttatagcttccgatccttatgtcttgttcccatttttatattttatcactaatttctgagtattaggattagtggggtgcatcaaagcatccctttactgtaccacctgtacccaaagtcctttattacttttttagtaaaaaacaaaaataaaaaatgaagccatgtatttgttatgtacaccattaataggtgactattcttatccattcttcttctgacagtattattctggtacattaaccacctgctattcataatcagattatactatgcaatctaagaatctataatgccctgattcaacttgcttgggtatattcacctctctgacaatagttcctttatatcaataaacacagaatcaatgcctgcattcttaatagtttagttggagagagtacagcagactttagagttgagccattcattatgtttaaaatatccttgtcgctcatgagaaaaattaaattggttttggaggtagctcagaagtcttttcactcttcatattttctttttaaattaattgcattgcattttgattcaatgctaaacagagtaacatgaagagttacttagaatagtttagcaacaattgaagccagccactgatggaaggaattttttacaattctgcaagaaatctactcctgaggtcttcttcaggtttagttgattgattagggttttaaagtaaatgaaatcactgaatttcaccccagaaaaacaaacaagtggacacaccctgaactgtgcatagtatagagagattatatgactttttagttatgtgaacaaactgttgagttattgtttaaaaaaaatgtaatcctattgttcctgcaggagtcatcagagaggaaacaatatccccaataagcatgtcatgaacatgagagttcagcacaaagttccccattggaatttattgcaattcattttcaaaccaagaacaatgtacattataaatatatttttgagtttttaaaattataggtttaattcatgtacattattgaaaatttggaaaacgcaaagtaggaaaaaggaaaatcccccgtattagtatatataaaatcatttgaagttgttaggtttgtgttgctttctgaggtacagttgacctacagtaactttcccagaatgctttcgctctgcatgattctttaaggaatcaaattcaggacgagttaaatggcaatggtggccgggcgcggtggctcatgcctataatcccagcactttgggaggctgaggtgtgcagattacttgaggtcaggagtttgagaacagcctggccaaaatggtgaaaccctgtctctactaaaaatacaaaaatcagccgggcgtgatggtgtgtgcctgtaatcccagctactcgggaggctcaggcaggagaatcgcttgaacccaggaggcagaggttgcggtgagccgagatggtgccactgcactccagcctgggtgacagagcaagactcggtctcaaaagtatacataaataaataagtaaataaataataaatggcacgagtgatttcgttcctgagaaacaaaaatctcaggagcccttgaatttctttgggggcatttggcatctgtattttataaagaagtatgtgcaaaaacaagaaattaccttgttggagattatttcaactctagtcaagttttccttggctttcctgaacagagggggaagctgggaggaattattcactaagggaatgctggtggaagatattatccatttaattaggtttgtactatgaccatattaattctaatatatcagtagaagggattatgttgtactttcttccaaaaatcttacaggatgatcgctgaataattgcatctaggattctctctgtgaatgggttcttcctactgtctgtgtcttcttacttgcttccatcttagtccgttgtttgcctggattagaaagataggctgaaggcagagtatgtatgtatatatgccatggatttttaaaaacagcctatctttataacagttttaggttttgtgccatagactttgatttatgtatttctcttcatagaaataatcttattttttaagtttcattgctttaatgctcagagatatatttttaaacttcttattttgaaataattttagatttacagagagttgcaaagacacaagagtctccatgtaaccttcccttaatgttaatatcttatataaccatttatcaaacattcgtcaaatctaagaaatcaatgtaatacaatactattaactaaacaacagtctttacttggatttcaccagttttttcactaatgtgccttttctattccaaaatccaatagatgatacatctacattatacttagcaatgctgtctccttaattcattctgatatatgacatttctcagtttttttcttttttatgatcctgacactttttaagagtactgttcaggtatttcgtagaaagtttctcagtttgggtttgtgtgatgtttcctcaagattagactgaggctttggattttggagaataccacagaggtgaagggtccttttcatcacatcctatcagggggtacatgacatcctcatgacttattcctggtgatgctaactttgatcacttggttgagatggtgtctgctaggtttctctgcttcagtttactagttttttattccaatcttctgttttttagaagcaatcgctaaatgcagtccacacccaaggggaagagagttaagctctacttcctggagggaggagtcacaaagaatttatggatatacattatgaccaccacagtgattaataaatatttagggagtgataattaaaggctatgtgaatatcctgttagttcttcaggttttgaccacttattgtagcattccccagtggatgtccacaacaactgttattgtggtgttctaaaggtgatttttctgttttcctcagaattatttttgacatatggtcatttcattattttaaaaacttattttggctgtggctttgctaagttttcagaatgaatttgatttctagaacattttaattagttttttttaattaatttctttactggaagggttatctttaaatggaaggttattaatctcccttgaaggaaactgtttaatttagtaagccacggaggattgctaatgattcttattttttatttaaatttacaaaaatataaacaaaataataaaaataatgtaagattttatggggtaatttagattttttaatgttcattttttaatttcttaaaaattatactgcagtaataatcactaagcatcagacaacttaaattttaacttaaatggaaagtaagtggccaataaatgctttgtgtaacctaatggccgtgctgagtttcttcttaaacagcaattcatagcaggtgagttccgactcagagtccgaacatgttttgaaccagcatagctacagcggaaaaaaaggtgttttttcacctaaacttcaaaccaaggttttgcatattcatactaatttatctatgaggaaggagcaaactaaaatttagaaagaatatatcacattgataaggcagaacttaaaaagaaaaaaactgatgtatcactattcctttcaactaagtaccctcctctgctaactttccacctactactggaagaatatttaaaagaacataaactttataaaatttaacacattaatggcatgttcagtaataccagctatgtaccttaaatatgcatttatatatttaaaaacaatatagatttattttctctttctcatcctggctacctcagtattgataatgaaacagtttcttcaaactgattattgtgtacatttttattgagcatctactatgtgcactggaggatgctaaaccctgaagagagtgaaatatgctgatatctgtacttcaattaagatgtgcaccagatacagtcaccactgccctgtgccacccaagtgtgttttcaggtctttcttggtgttactagccctgagtgccaaggatctcagcttgtttttgggggatcctttaagcatgctcgtcatttaaaatgatgtggctctttggaacagctcagatgagaccttgcaaaaaaaacctcaagaggtaaatggtgctacttctgcgggatgatcagcagtgaaaagtcaggctgctgtcaataagtagagtgaccatataatttatcatctataaatatatatataataaataatagaggaggtgttattaattaagctggaacaagacgtataaacaggtaagcaacagatttacattccagggacattcctgggcaaacctgaatgtatggtcacctctatcaatagaaaacactcaatagacaaggacaataaggatgtggatccagggcacagcggggctgcggcactttccaggtggaatcatgcagggccctgcctggcttctgacccaggtgacggtggcagtggtaacgggcagtctgtttaagctgattcttttctgttccatggtctttccaagttcaaggttctcatctcagtcccctcacactctttcagggtctgtttcaggtcttgtcccttcaaccttccctcaccttccctggcccaggtaaattttgtctagttttttgagacagagtagcctggacatctctttattctcttttcaattattattagagttaaaaaccctgtggtttgcttttttcctggccttctgtttttattgctaaaagtcttttgaaaccaggcccttacaatccaaaaagtttgggcttttaaatgtgttgtgtgggcatcaagagcctattttgaaagtcaaaaccataacatttatttttttcccctgcatttttcaatgttcttactggcaatgtggacaccatagtgtaagtatcaatcacatataaggaagtacgcacacagaaaattacagaggttaataattcagtgtattatctctaatgatactaacacttttgatgggacacatagaactattacatgtcaaacattgcttatgtgttatttaatactcgaaataaccctatgacataagtgctgttgttatatctattttacagctggggaggtcaagattcagtcttataagtagagaaaataggcagcatgatatgtgaaaacaaactttgtcctgaactctagcgtcagtcctgtcttagacttcatttttctcatgtatacaatgaggaagtttattttcaaatcaccttcaaactctaaaattataaatagaggtctacaatccttgtcccaaaccctcatggccagttgtatgttggaattcagaaattttcagatttgtgaaaggtaatgtagtttgaatactatatgttaatgattaactacagtgggatttggggcaatgtcttataatcagtgatacttctgcagcaattttttatagtgagaaaaataaagatttttgaaaaactcttaacagttcaggtcatatgatattgccaaattagtttgcttaaacatataaaaagttttagaactcattggatttattagtgtggattaggggttgtgggaactggaccagtgaacggattggggtaattatcagtgatgcaaaatattttttctattattattaataattctggattcatagaattgacgtgtggagtaaaagaaatgttgcatggaaaatgcttatcacattccttgaaaaaatttaagttctcaataataagactaataagtaatcataatactatcgctgagctttgtgcttggttttggttgcagggacataaataatcattgaagataaagatggtgcacagcctcattaaattgttcaaggaagattgatctaatgcatctagtcatgattgtcaagtgaagtcaagtgtggcaaagggacacgtaaaggaagtaatggtaatcaaccaggaatcgattctcatggacttaagttctatctctcaaatggtttgagacacttgaatgaaagggataacattaagaactctaagagcctacattacagcaggctccaatatgataagggaaaagcaaaagctatgttaaagcagatatgtcttacctcccaaaagaatatcagctgaataaggctgtataaagcccaaagtttttccactgatactagctccatagattcagtgctttgaaagacgactaatggtatccaacagtagtataccaggtaatttaatttgcctagggaagttactgtcttcaaaaagtaaatatatgcatgaaagttaggttcttgaagacttataaacttcatatttatgtttatatataatgtttacatataaagtgataaagtagacatacgaactttatatttaaacgttaatagggttcttaaatttaaaaagtcatatatgactcttttaaaagataaagaagaaagaaaatacatgtatgcatccctcctcactccatgttatttcagtatgggttgtcacacgcttaaaaaatcatctcagtaaagcaagcacataaactagaaaaatgtcaattattaaataatgatgacgagtcaggggtaattgcctgaactttatcatgtacagaagtgctgaggcttagcagatgataggggagagtcagtcacctctgccaaagcccagagagaggagaaggagatgcagatggagcatacattaaaggtggggtcagagagcgggaaaagtgtggtgaggatgagtgaaggcatcagcacaagggaggatgctttcaaaatcaccaaatccaagcatcacagatgttctgttgttacacggattacagaaaccatgttggagctttaaatgacagaaaatgttggcatgttggtagagtctttaatataaaaatgtttgtgatatatggtagttaagacacagttatgctttggcttaatatgttacaaaattaatgggctgtagctatatattctctgattgtttggctctgttgatcaaagtagcagttatagaataaaatctatgacctgatttttttatggtaacttctgtaaaatatttcttttttaagcttttattttaggttcaggggtatatgtacgggtttgctatatagtaaattgcatgtcataggggtttggtgtacagattgtttcacttctcaggtaataagcatagtgcccgataggtggttttctcattctcaccctcctccctctctactttcaagtaggccttgatgtctattgcttccttcttggggtccatgagtactcaatgtttaggtcccacttataagtgagaagatgtggtatttggttctctgctgctatgctagttctcttaggataaaagactccagctttatccatgatgctgcaaaggacatgatctcattcttttttatggctgtgaagtagtccatgctgtatatataccacattttatttatccagtctactgttgatgaaaataagttgattccatccacgtctttgctactgtgaatagtgctgtgatgaacgtatggaggcctgtgtctttacggcagaacagtttatatttccttgggtatatatatcctgtaataagatggctggatcatttggtaattctgctttagttctttgagaaattgccaaactgctttccacaatggataaactaatttgcattcccaccaacagtgtataagtgttcctttttctctacaagtttgccagcatgttattttttgaccttttaataatagccattctgactgggtgagatagtatctcattgtggttttgatttgcagttctctaatgattagtcatgttgagcattttttcatatgcttgtgggccatatgtgaaaagtgtcttttgaaaagtgtctgttcacatcctttgcccattgtttaatagggttgtttgtttttgcttgctgatttaagttctttacagattctggatattttaccttagttggatgcatagtttgcaaatattttctctcattctgtatgttgtctgtttactctattgatagttccttttgctgtgcagaagctctttagtttaagtccatttgcctacttatggttttgttgcagtttcttttggcatctttgtcatgaaatctttgccaggtcctatgtctggaatggtatttcctaggttatcttccagggtttttatagttttaggttttacactttttaacctgtcttgagttgacttttgtatatggtgtaaggaaggggtccagtttcaatcttctgcatacggctagtcagttatcccagcatcatttattgaatagagagtcttatccctattgcttctttctgtcaactttgttgaagatcagatggttgcaggtgtatggcattatttctgggctctctattctgtgtcattggtctgtgtgtctatttttgtcttagtaccatgctgttttggttactataggcttgtagtatagtttaaagtcaggtaatgtgattcctccagctttttctttttgcttaaaattaccttggcaattatatttttggtgccatataaattttaaaatagtttttttctaattctgtcaaaactatcactggttgtttgataggaacaccactgaatctgtgaattgctttgggcagtatggccattttaacaatattgattcttcttattcgatgttttctttttttttaattattatactttaagttctagggtgcatgtacacaacgtgcaggtttgttacatatgtatacatgtgccatgttggtgtgctgcacccattaactcgtcatttacattaggtatatctcctaatgctatccctccccgctccccccaccccacgacaggccctggtgtgtgatgttctccttcctgtgtccaagtgttctcattgttcaattcccacctatgagtgagaatatgcggtgtttggttttttgtccttgtgacagtttgctgagaatgatggtttccagcttcatccatgtccctacaaaggacatgaactcgatgttttctttatttttgtcggactgagttagtttgggaagccagtttttgagctctgagattctttcttcagcttggcctattctgctgttaataattgtgatttcattatgaaattcctgtagtgtgttttttttagctctgtcaggtcattttggttctttcttataacggttattttgtctttcagttcctgtactgttatattgtaatccttagtttccttggattggtttcaactttctcaatggttctcaatggaatctcaatgatcttccttcctatccatattctgaattctattgctatcatttcagtcgtttcagtctggttaagaacccttgctgtggaactagtgtggttctttggaggaaacaaggcagtctggctttttgagctgccagagatcctgcactagttctttctcatctgtgtgggctgactttccctcaactgtggtggctgatgttccctcaactgtgctgtaatttgagtacagtcagttgatttctttcctggatgttttcagaggacgaagtgtttgtgctgggtcattatttgcgctgaattcatgtcctttgtttctcaggggcgttatgttagcaaagtatttttggtgctgaagtttgggctatgatccagtagatggtgcttaagcataatggccagtagttaggctcttgctcagccacaaggctcctctgtgtttcctcctaattgcagctgtgctctctctcagtgctctgaaactgcctgctcctctccaactcaagtactggctgcagatctcagcttggcactcctgggctgctcaccacagccttggagcaagctcaggctttatgctccttctgcagcctggaggcagcaggggaagggaccttggcagttgctgtagcagagggcttttcaccggtcttttggaactccaccccagagaaatgcagagccactaccaattggtgcaatcagcccggggtcaggtggttgtattgtgggcccaagccaagggcctgcctggtgatgagcaggggtaacagggggttgtggctgggacaaactggcttcttttccttagggtggctgcagcttactggagatatgattaaagcactcagggtctttgatccatacctagtccaagggcagcaagggcagtaccattgcagcagccatggcagaggggctttcagttgcctctgggagatccaccttagagaaatgcagagctgctgctactgggaatgttcagccaggggatggggccactgcactgctggcctgagctgaggtccctgcttggtgaagagctgaccctgattatgaagggtcatagatcacagatgatctgcagactgaccaggctgcaaagacagagcatatttctatggacttgagtttctcagaaacaaaagaggaagggactgcttttattttgattgaatttacattaacatcaatcttctttaaacactgccttccactgtcaccaacagaaatacaaaaaaagaaaaatgaattacattgtctcagaagcatactgcttaaagggagttcatttactgacatgggaaatgagaaaatattagtggaaagaacacattgagtctgtctccttcccattgctccacctacggtgggagacctcaccatgatctttcaacttcttttacaattctctttcgctcaccaaatgttgtgtgcagcaccaaagcactgaatatgtagacaacagtggagcgggtcaagaggactgcccttcctgaagtttttaatgcagagaacagatgtgatagaaaatctgagagttttgacacaccaattagttcacagaagaaaaattctgagactcttggtttatgacatggcaatcctgtacgaacgtgatgacttttattttagacggttaattccctttactctgttcaatggccaaaaactggagccttagtttcactcaacttcttggaaaaatacctgtcattgttcacaaagaggacaggagggtaatccaaacagtttcactttttgattgcttaacaactattagagaaaatgtatcatcacttctgtaagaaaaaaaaaaaacttctaagagtattgagatgattgagtgagttgtgccgtcttcggaggtgaagacgaacacatctttatttatgcaaataaagcaagaatgccagttacctagtggatgtgagaatagtgagccagcactggtaatttaagggatgctctttcagaatgtgttctttatattcgtgaatcattccagtgttctttgcttctaggaaaaggtggttcaagatgtgtgcctaagtgaataccaaaactagcaacgcattgggaataataaagagagtgggcaatattttctttttttcttgtttaaatcctgagtcagctgttctaattaggtaaatggtcttgaacttactaaatgattacatcttttgctttccttgagggttttgaatcaggttgtaggcttagcaggtatattttatttgaatttctcacaaacttttagcagacactagttgtctgaggtactgcttcctctttcagatattgagaaatgcctaaacacctgtaatattcttttccagagaccacatctactttcacgacactatgttgaagaggattcttgaaaattttttataaagtcagacatgcttagaattggggacaaaaatctgtacttggtttgatttataaattatgtcataaggacacaaagtagtgacttagagaattgatgtagcttaccaagatgactttctctcagggaaagtttggatcattatattttaggttctggagctgaatagttggaatatcaaaagggttatttcgaaataactagatagaaaagcacaagtagataacacgtattcaggggctctttgcatgagaaaaatcccattaattcaattcctctaggacaaatgacacagagagaaagagacagagacagagaaagagaaagagaaagagcgcgcaagagagaaattgataggtgggtatatggatggatgaatagataaattcatagattttaagaagataatatatgttctaagtagaaaaaattaataacatttttcaaatgtctgggacatcatgccaaccattgtgtcttacattatttctagtcattaaaatcacttagtgagttgtgaagttttattaacattttacataaaattcctccagagtctcagagatgtgaagtgatttatgagacaacacgctagtatgaggcagaattggaattcaaattagacatatctggctccaaagcccactttctttcaagtatgttatgcatcacagtttttgtattttgttgaatgaagaataattttcactgaattttttgtgttttgtttaatagcttacaatttatgtccagccagagcaaaagcacacagccgaatatgctgcaaacataactaaaagtgtgtttgattattttgaagaatactttgctatgaattattctcttcctaaattaggtgaggatcattttttaattttcttatttttaatattgcctttgtttttatctaagttaactcatttcttctaattatgtcaccatcagttaacagttatccttaagtccttttattctatgccgacaatatcttgggctcaagtaagcctcctgcctcggcctcccaaaatgctaggattacaggcctaatcaaccatgcccagcctgtactgtgttcttatctgatgaatatataatcttgtgtttccaaataaagatgaaagtatgtgcacaaaatggcagagcttggtagtgatggagccacaaatagcaacgtagatcagttgatttcaaaatcggcattcatcccaatacttgctctgcctccctgtcatcagcgagttaaaaaataatagggataaatgatgttgtaagagccccatgtgcttccagtctttccattgttgtacaaggcaaattctagattccccagcagtttaatgaaatactggtgctccttccagcaataattttttctaatacagagggagacatgcattcttcataaagcaaaagtggggctacaaccaaaatggtgtgcatatgacatttctatcaatagtggaaatgctttattaataagctcgagagctattaacaaagactttaaatataacacccatatagatgtttgtagggatgaaatgaaggcagtaagaaaacaaattagccaacagttggcctccctgtatctgtttctgcctttactttaataacttatcaatgcacacaaggggaatgcaaaattctctgcatgggaatggctgtggctcagagcaagcttgtagatgctgcatgtctcttcaatggatacaattctattttttgattgcttaacaaatgttagagaaggagctggaaaaagaaacaagttttcatcaaaatcagaatattgggccaggtgcagtggctcacgcctgtaatcccaacattttgggaggcccaggcgggcggatcgcttgagcccagaggttcaagaccagcctggcaacatggtgaaaccccatcgctacaagaaatacaaaaattagccaggtgttgtggcacacacctgtagtctcagctactcaggaggctgaggtgggaggatcacttgagcccaggaggttgaggctgcagtgagccatgattgtgtcactgcagtctaggtgacagaagacctcatctcaatttaaaaatatcagaataatatttaataaaatattgtacacatgaatttaaagatcctttgccttttatctcagttgtagcacccaggataacctgagaagtggaaatctcacaaatttattactctcttctcctctctttctttctccctctccccaactcctttattctgttttatgtgcattttcaaccctctcagaattaattatatcttagactccttagaggtgacttctgcatttattagactccaaagagttaaatatacaagaattagttagttacaatgccagtactgaccaaaaaaaaaaaaaaaaaaatgagattgcaaaaaattccttttgttcaaggattaagtgcaaactgcactccacaacattatgaaaaatattggcccttgggggagatacttctctacttttgaaatgactgtcttgtgataaaataaccaaacctaaaaatgagataacatgaaaaggaaactactattgtaatcttgacctctacttaagatacatccctcttcattcttttataaaaagctctaagaatatttattttggctgggtgcggtggctcacgcctgtaatcccagcactttgggaggccgaggcgggtggatcacgaggtcaggagatggagaccatcctggctaacacggtgaatccccgtctctactaaaaattcaaaaaattagccaggcgcggtggcgggcgcctgtagtcccagctactcaggaggccgaggctggagaatggcgtgaacccaggaggcagagcttgcagtgagccgagatcgcaccactgccctccagtttgggcaacagagcgagactctgtctcaaaaaaaaagaaagaatatttattttaaccagaaagaaagggccttctcttatatgttaagtgaaaaatcaatttgttttcatttctgtgcctcatttaaattatacataataataaagaaattacattctgtttacagttcattaactggggaagctgtattttggccactaatcatctgagcattttctgtcttgggatttaacatagaactgatcaacactgcctcctcctgtcagatattatgtgtaagactatagaaactcctgtccaacattttagaactgtaagggaatctagagagaatatagtcaactccatgtttctccaaccaatttaatacataaaagcggatgataagctattagattggtatttctatcaatattttatagaattagagaaaaatggagttttatattcttgaataatctgtgtctttggatggaaaactgtatctatacacttggaagctcagaacttctaaatactaatttgaaaacttctctttttcctcacggcttatcccctaaaacacatgtagctaataaaaatgaaatacagagagaaacaaaagacataaaattatagaggcattgccattagtgtccttctttaaaacaaaaacaaagcattgatatctggagccagcagggaatgctctatggaaattttgagtgcattaggactgaaatgttcgcacacatgattacagttctttactctaagaaattatttttaggcttttaaaaaacattcatccaaataacttaatttggtaagaaaagctatgaacaaatggaaagaatgtatttctcactggactctttcttcttctatagataaaatcgctattccagattttggcactggtgccatggagaactggggactcatcacgtacagagaaacgaacctgctttatgaccctaaggaatcagcctcatcaaaccaacagagggtggccactgtggttgcccatgaacttgtgcatcaggtacagaatcttagcactgaatcagcttgtttttttaaagtggcttaagaccacaggaataattcaaattatttatgacttagcaaataaaaaatagccaactcagaaaaacttgcatgaaaatctttcttggtactaataaacatttagccataaagagactttgaaccacattgttttgcctttaggaaatatgcacgaggccttcatataaatttatgtaccccagtaataactaaataaaggcaataaactaaagacaatttaatatcatttaaataatcagaataaagcaggaaataaatgttaagtacaatgcctgccacttctgtcacagtgacaacattggcacggacaaataaatgttttgacattttctaggcctctctaccatacccataagaatgtaattatctctttattgcttataatttcagtggtttggaaatattgtgaccatggactggtgggaagacttgtggctaaatgaaggatttgcttctttctttgagtttctgggagtaaaccatgcagaaacagactggcaaatggtgagtcctaaacacataaacttgaaatctctcttttcctcatgcaaagcagatggaagcctttggactatgataatggtcccgagtcagatggcaagtacagtggtgagcggggaattccactgtgaggatagggtggagccagctgacttccactgactacaccttgccccagtacctagaagggcagctgatcatcacaatctggggatatccttgacagagtcactcaaaacacattatcaaggcaggaaaaaaaaaaaaaaaacaggtggcatagaaaatgttaactctgtgttccagaaagtatctatagcactaaccctttgaaaaaatgtcggagtctcatttgtgaacgacttactttatttcagacagattgcagaaacagtgtgatgaagagataacataaatttagtagttagattagttagattgaagttcaaatcctgaacacatcatttcttagatgcatgacagggaatatgaccttgagcaagttacataatatctgagtccattttctcctttatgaaatagaacattattttctatcttgtaagcttaaaagctcccaaatgtgcatgtaatgactattaacaggtagtgtgtccctcagaggcctggaatagaaacttttatgaaccctaaaattttttttcagaaaagctaggtatagttgttatttatatttatatcatgggagtattcttgattgcatatatgaatgtgcaaataggtggatgtgtctaattacaagaggttttgtactgtgtaaaatactgccctctactggacagaacaaaaaagttaaatgcttgaagcccttacagtttctgtagcctgctttacaaagcgaaaagcctaatttacaacaattacttctttaaaaatcttatctacatctggatttttttcaactatggaactattgacattttggagtagataattctttttttgtgcgggactttcctgtgcgttataggatacttagcatcccagacttctattaactaaatgccagtaacctgccagcccctgttgtgacaactaaaaatgtctccacatatttccagctgtctcgtgggggacaaaaatctcctccagttgaaaactactcatctacatggaaaattgctgattttataatttattgaaaataaactgtataaatggaaaattgtgttgtcctttattttctcccatacagtatactgaggcccttatagcaaactgttataagaaattataacattttaatattgtctaatattccaagtactgtgtttcaaaagcaatggctaaattccagaagaatttgctgtgcacttcttaagtgaaatttaatcacatcgttcaacacaacaattaattcattccttcatctattcattcattcctttttttttttttcctttttgagatggagtctcactctgtcacccagactggagtgcagtggagcaatctcgggtcactgcatcctccacctcctgggttcaagcaattctcctgcctcagcctcctgagtagctgggactataggccctcgccaccactcctggctaatttttatatttttagtagagatggggttttgccatgatggccaggctgatcttgaactccttacctcaggtgatctgcctgccttggcctcccaaaatgctgggattacaggcgtgagccaccgagcccagcccattcattcattcttcattcagcaaatggaggactccaaaatgaataatgaataaaatacacttcttgcccttaaggagttctcaatttaaggtcttgtggatggaagggtcagatagataaagatattttataagcgagctcaataaataccacaatcatggaatacctcgtttcactggtgaaaaatcggaaggccaggaaaatgatagaattttccaacatcacagagataggtggtagcaaaatccaaaatcacacacacagctggtagcaaaatccaaaatcacacacacagctggtatagtcaatcttcctcacactgagaacaggatctttctactcaccatacttaaacttcctaggtatacaaaaatcaaaatgcaagtcaaaattatcttgattggcagtcatcacttgacagcagtacctttcctgttataaatgaaacccgcataattggaaaatgtaagccaatacaacatactcctgttttggaaatatttttaattaagtagagccaatgaaatttttaaagttagtagtgatttagcagagttagatttcagaatcttactgcttaagagtcaaaataactatagcagctaatgggttaggttctcattctgtgccaggtactatgccaagtactaaccatgaattttatcactgagtcctgtgcacagttccaaaaagtacaggccataattacttctatttaatgggtgaggaaacttgcttaaacttatatatctagaaagtaaaaagactgagctttgaaccaaggaaatctgacagtactgctaggcctgtcaaccagtctgtattgctgacaagacctaggagggaaacgagaggtgattagaactaaaggataaactgccaatattttctttcattaattatgaagtatccaaattccaataacaagttaatattagaaaaacctgaacatcaatatttggcaaattgatatgcaacctctcttaattcttagaccaaatctgtggagtgatgtcatcattctcattgcacagatatagaaatagggcttgaaaagtttggcacatatccaaaagtcacacagaagtcgcagaagcagaattcacagaagttgatgtcttctcggcctgtcatctgggggaaaattaaaaggaattagaagtagaagaagggcatgaaatcaatatagctcaatcagtgcaaagtatgattaatttgaagacctaatgtttaagtaacttaagtcatttatatttattttcctccaatttttcttatatatggtattttagtttataaactagtataaaggaaatactatattcctttggctcattctttcatttcagcgtgaccaaatgttacttgaagatgtattacctgttcaagaggatgattctttgatgtcttcgcatccaattattgtgactgtgacaacccctgatgaaataacatctgtttttgatggaatatcctatagcaaggtgggagaaatagaacattgttttgaacatcttcctgtttagtgacttttcttttagtggatacctaaaaatggtaagaatggtcacactgtgccagtgagctttggaaaacagtgtagaagttattctgagtgctgaatattcaatagtttgtacttttcagtataatttagtgctggtcattgtcacagaattttaaaagagatttttaagaatttctctttacacatttgtatataattattttcattctgataatttaatatttagacttgaagcatcacatttcaaattgttttatttgattttttaaaagacaataaatctttttcttctatgtggtcaacaagaaatgctgtatatgtgcacagctttcctagtagaacattttaatgcctgcaataaacatttaaatccaactcagaaggaaatacttttattcctttttagaagatgtaaagatgaatttgttagcatattgtaggtgaggattttttcttcactaatattttatgaaaagttgctggaaatctgtaactccaagatttatgtgacacattctgtcccacaatatttcatatagtctctccttcaaacatattccacatctgtatgtaacataatttaaattttattttagtcattttctacttcagcttctcatgggtttcccactacactgagatgcttagaagctactgcatgctaatacattttgttatcctgagtaatacctaaagtcttatttgagtcaaaaatattataattattaaaatgaatacttgagtgaaaaagcttctatgtattagcatttgaaattcttagcatcatatttttgactttccctctcatatgattcccatggtgtatgttcagccttcttgtattcatttttctttgatattatgaatgattccttttatctttatgtcgaaatgaaaatttcgaatccacttatagcctattctaattattcacatgggagaagtttaaatttattcaatcatttttccccttagtcctagatactcctcaggtttaagatattatgtccaagataaataaatgtttctaggcctttagctttctaaataggtataaaattaatttagaatgcttaataacttacaataaaaattactaatttaagtgggggcagtgttcttttttcattcagttacttgaaaattgatttaaaatattacaaattgtgcatttcagtactaaccttataacacataaaaagaaagtacagagccaagatgttcatcagattcttcagatgaaaggaaagcaaatgagatagactactgagaagagaaagattatatgcctaaattatgtatccatgtatattaagctatttgaccagataattccttgactatctacttccctctgctaaatataattcttattttcaaatatgaaaatatatttaataagttggcagaattttaccctgaaactactttcctcattcatcaaagaatgtgattttttagactatttctctttcattaagaaagccccatctgctggtttatttggggaagtgcaataattatttgaatctgaagtccctgaaatgatggccattttagcaatttctctttaccttttagttattttagatgcatagatacagggactgtgccaagtggtattttcatcctaaaatcatagagccatataatttagcagaatcatcttgaggaactaatctcacaaatatgatcatgaaatactagttgcaagagtaataactgatcattgttccttacatagcctttattagtttcatttgtctttttatccccattgtagggatcttctattttgagaatgcttgaagactggataaaaccagagaattttcaaaaaggatgtcaggtatgatttattacttttagtgatatcaaaattaaactacattgatatgtggctggtgaatgttaagatatgtgattaatcaaggataatttcctttttaatctctttactgaggcatagataatatagcaaaagataaaaacatgattttacatccaattgagtacctacattgtatctgtaatgatcatttagcagaagtctcatggagaagttgaaacagattacttagttatttttgaaactccttacatgtgtcttagtcagcttgggctgccataaggaaataccatagactgggtggcttaaacaatagaaatgcatttttcttgcagttatggaggctggaaagtccaagatcaaagtgctggctgattccgtttctggtgaagcctctcttccgggcttgcagatggtagacttcccactgtgtcctcatagcagagagagagagagggagagagagagagcactctggtgtctcttataaggatactggttccatcataagagtcccagcctcacgatatcatctaaatgtgacagctcccaaaggcttcgtttctaaatactatcacactgggggttagggcttatatgaatttcagggaatacgattctttccatagcaacatgatataaacatctaaatttatctataaaggtcattccttatactgagtacaagacttttcccttattattagattagaaaagatcaatattagtatgcttattacaatggagtcagtgaataaagaggcttgcttccttttggtaacagaaatgacaataaactttctgaaacatttcacacatcccacttaagcgtattattccaggagatgtttctgtttcattttcgtttttctaacagaccctaagccaatcgtcccaggtttgtttttatttttaattttatcaaagtagctacaatgtgtccctataactgccgtctctgcaggttggccccattccagcctagaaatgaagttctcttcctactctttcccttccacctacatcctgcctgctgcgataacccaggtagtcaggagtagcagtgctgacggtattcatcccagagagcagaaaacaggttggagaaatgccccctgctggctgccacagaaagtacttcttctgtatgtgattccccaggagaaggtcaccattcacatagatctcactcccatcaagccttcttatgtggcatttagccctctctacactactctaaaagaaaacggcccccttctacccaatagtgaaacatctaggtgattattaaagtaagaaataaagtcaagatttcggaaatatttggaagtatatcagtatattttaaccctttgtctattagtaaaatattttgtagagacattaggtgcaaagagagaagctatgtgcttgtgcttctgcatcatgagaacatcttgtaacttttccataagtttcaaactcaaatgttatcatatattccctcactgtaagcattattattattattattgttattgagacagagtctcgctctgtcgccaaggctggagtgcagtggcgtgatcttggctcattgcaacctctgcctcccgggttcaagcgattctcatgtctcagtctcccgagtagctggaattacaggcaccaccacacccggctaatttttatatttttagtagagacggggtgtcgccacgttgcccaggctggtcttgaacttgtgagctcaagagatccgcccgcctcggcctcccaaagtgctgggattacagccatgaaccactgtgccctgcccattgtaagcatctttaatcagggactctgtcttctatatctttacccatactgcagggcctagtttaattacacatgttacgtcatcctgaaaatgtttgttaaatgaatgaatgagtgaatagcctataataaattatacaggacatagaaataaagaagattcattttcaaaaattaagttaaaattcagtttgtatagttttgattctaaattaaattgtaattaataaataacaattttggcatcttcagagctggcttcaaattaaataatctttcatattgactttgatagagaagtactaagattccttgaaaatgaatagctatcctaataattccataaaactctcatatttcctttaacctagtatctatgttataattaatttaaaaaaccggttttgtctaaaattaataattcttaagttaaaagtcttcctttaactgtgatcacagatggtgctaaaaactgaactatgaagaatagatattaatatttcatgccattatagtgctatggaatgaatttacacaaaacacccaaacacccttttccttcaatcttcaaacactagctaatatctgaaaatagtatatgatcgatatggaccacatccaataaaccctcagaccaactggaacatagttccatagttcacatagtttgagcatcccaacaatatcctccttgagttgtcatcatcactctatgattgttgccctgaaatcccacaggctatgaatgggagttcaaggtatttctgttgcaaatactaactttctgcccaaagtgactctttattagctaacctggtgtggaactaaatctggggctggccatttgtctattctctttcatgctcatcaccttgccccaaactcaacctcaaacagcaaaataggtgcaggatgggggaaataagagcaaaattatcaactggaaaatctttaaggctatacatgtacataaaagatgtaatagagaaggggacattcataacaatatgtggtcatgaaatagaaaccgagaatatattcttcctttctttttcttctagtatcagtagtactgtcaataagacaggaatgggtcagctggaaaatgtcttttcccttcttgggatactagtaacagaaacattgttcgtttccttttgtgctcactgattccaactaataatgaactgtgacctaggtcatcgtgtaattttgacttgaatgattacatgattattcaaggtgaagagggaagtgtcttaatatagaatattcaaaagcactaatctagacaatataaaattagtaccttttaatatgctgattacataaatttccattcagcctgtggttcatgagaagcaagaaactgcaattttaaaagcagtaacaacaataacagtgatgaaaaccacacacactgatccagggttcagaattctcctcatcataatctcaggcaaatctcttcacctctgaaggcacccaggtagttagggagagcagtttccttcacctcaaaatgtgggagctttattaaataatatttaaagtcccttccagttccacgattgcatggttctaagctcaagaccttgtagtagtcaaactcctctaaattaattttaaaagatattcaatagaaattgtcatcaaaacacagctatggttataactattactatgccaagtattcaattattattatttaaaaatattagacatttgatttaccaaatattcaattattttattaagatatgatgaatgatttgtgcaactttctgtaatgaatacctaaaagtgattgctgcttctcccttcctttgcctgccctctggtggtagtgccaagaagtgaattaaccaaaagaacaaatatggaggcagcattccaaagtggcttcatccctcttccaggcttcttggagtccttctaatactgttttatctctatgtctgaaaagaagaggaatttaggaggtaacgtgatttaggtacagcacctactgaaaattatagcaacttagagtgaaaatgatatgtgcaaagttaacattaagaacactgaagatggttccattttctatcaaagacctccactttcagtcaggacaattctagaaagcaacagaggagtgatacagcaggaacttaggaaagtttactggcaaactccaagtggctcccagttacgggattagaagactgggaattttttctggggataaatcacactatatttgaaaactcacatatagaaagaggttttgtaaagaaaattgccaaaagaagcttaaatctaaaagacttgtactttaaaatatttgaagagtgaagacttatgctttacagtgaataatgtccccaattcatccaccaccaccaccaccaccaccatcatcatcattattattcaaaaggttgtatatttatttccttagagcagagatcagcaagctactgtctgctggccaaatctggcccaccatccatgtattttttttaaggctcataaactaaatatggtttccacattattaaatagttgaaaaaaatcaaaagaagaagaatattttatgatacatgaacattgtatggaattcaaatatcaatgcaacagccgtgctcattcatgtacatgttatctatggctggttttgcgcaatggaggtagaattgagtagcaggggttcagttcatcttgtgaaagtatgagaaaagcaaacattgacttctaacatgctgattattttttacacacagatgtacttggaaaaataccaattcaagaatgcaaaaacttctgatttttgggcagcactggaagaggtaaggaagagtatatgtccccaaatatttctttgtctgatttacaaatggcttaccaatcattttctaatctaactattctatccttttattttctcatatttgttaattaattaatctccattttgttttcaatcttaggcaagtaggctaccagtgaaagaagtaatggacacctggaccagacagatgggttatcctgtgcttaacgtgaacggtgtcaagaacatcacacagaaacgctttttgttggacccaagagctaacccttctcagcccccttcagatcttgggtaaggctctataatgcattgaaaaaaacacagaaatttggcagaaatattggtaatttgtttatatcctattgttgagtacatgatggatgagtgatatacaagtataaagccacagtgcctttaggggaacaaggaattcaaaaatagccaagtgatttccaggtttgaaatggtgggcagagcacatccatccgcatcctgttctttacagatattgaagagaggaatggaattacctaaagaaataaacctacaagaataaagaaaataaagggaggggctgtaagtgtcacagagttctgaagaagtaaagcagaaggagaaatacagactgaggaaaatacaaccagataataataagggaacttccctatccctagacaggttctaggtacagtgttagcatgaagactgaagggtaagagtgagaagtgaggctggaaataggacaatgaattgaaagtctagtctcaggacaatttgtgccagctggacccacccctcacccctactttctctccgccacctaccatttctttctctgcacacagctctcagaaatctggcaatggctccaggaaaaaatacagtgggcttgtttcctaaagaaattgactaaaacagtagaggagagctaaggatttccatttggttgagactctcagagtaaagcctccctcattatgttatttgcaggatgggtgggctggagctgacagcacccctcatacacacaggcagagctcccagtcagaccttctgctcagcagagaaacttacttcaaaaatacaactcccttcagcctgggcaacataacaagagcctgtctctacaaaaaatttttaaaaaggcactggagtatggtagttcatgcttgtagtcctagctagtcaggaggctgaggcatgaagacgacttgagtcatctcaagtcaggagtttgaggcttcagtgagccatgatcacaacactgcactccagcctaggtgacagagcaagagctcatccctaaaaataataaaataaaataaaataaataattatatatatacacatatatgtatgtataaaatcccttctcgataatagagagagtacacgccagctactagaatcaatttaactctttcttaaatatgaatgacaaagatcacaagatacatgaaaaaatttggaaggataaaaggttaaaatttcatgtgaacaaacaactcctgactttataagatgcataattaaggaaacaaaataaatgtatgagatgcattcagagatgaagaactattacaccaatgaaccaggagcagaatgtcttagaaaggacaaattgagaacacaaaagaacctgaaagattagatttctgattctcaaaagaattaatagaccaactaaaaataaatttggcaaatcctccaaaaatacagggcaaacacacatagagctagcaaatataaaagagaagacaaatatgaacagtctagcacccaacagataggtgtttttattttttggcttttttttttttcgagacagagtctcactctgtcacccaggttggagtgcagtggcgcaatgtcagcccactgcaacctgtgcctcctgggttcaagcaattctcctgcctcaacctcccaagtagctgggattacaggtgcatgccaccacacccggctaatttttgtatttttagtgaaggcggagtttcaccgagttgaccaggctggtcttaaactcttgacctcgggtgatccacccactcagcctcccaaagtgctgggattacaggcgtgagccactgtgcctggactagataggattctttttttttttgagacaaactctcactctgtcgccaggctggagtgcaatggcaggatgttcgctcactgcaacctctgcttctcgggttcaagccgttctcctccctcagcctcctgagtaactgaaactgtaggtacacgccactacacccagctaagttttgtattttttagtagagatggggtttcaccatgttggccaggatggtcttgatcttctgatctcatgatccatgcacattggccttccaaactcctgggattacaggtgtgagccaccgtgctcagccaataggcgttctttaaaaggaaaacagagaaacttggaggcaaataatatcaaatacataatagaggacacaaggattctgattaacagaccccacttagtaaacagtacaaacaggaaaaaccaaaaccccaaaacatacatagatacaccctcacaaaatttcagaaaacagagacataagttagtgtggcattagacttctccacatcaaccctgaatgcaagaagcgaatgaggcaatgcttccaaaacactgaagcaaaaaatattttcagcctctagttctatacccagtaaaattaaaccaagtgtgaaagtacattaaagacgctttcagaaatgcagccccagaaaatgatttccacataacacttttttgaaagttacttaaggctgcactttagaaagggttttgggggttggaggagaaagagaaagaaaagaagggaggatatgaataaataaaaaaaaagtgaaatacatgggacacaggatccaggaaacggtacatccaacctaggaaaaccacgaaaggaaatgctcagggtgctgtgagtgcctgtaagggcaggatgactggagctgaggtaggcgatctccaggaaaaagagaaattctctccagtgggtagtgcggttgggaagatgaaaaaaacttgaggatttggtgaaagcccatccgtttggtcaactataaaaaagaaaattagaaaaaacccaaatcaaagactatatataaaaattatgatccaaaaatatgaagcggagttctcacaagatctgatggttttataaggccattttccctgctcttgcttgctctctctcacctgccgccatgtaaaatgtccctctcccccttctgccatgattgtaagtttcctgaggctgccccagtcgtacaaaactgtgagtaaattaaacctctcttctttattaaaaaataacaaaaatatgaagcagatagaatgattttatgccattgatacagtataagaaaaggctctgatattagagaaattttacttaagtggctcaggggccatgaaattggaccatggtgtaagaaatagatctccccacactccttgaccaacactatatacaatatacatgctataatttcataaatattaggtattgacttttaactttataatcagccaatggaaaatgtaaacatttttgttatggtggcagaataaattgcaaatataaagtcttgacattgtaacaagaaaaatcaactgacaaaaaaaggacatggaagagggagaaaaggtgggagaaagtgttgggatactacttcagtggtgtgcaggaacggctgtcttcccaacttagtaacattttcttgtcagtgacatgttggtagcttgaaaatgctcctgatgggagtattacgtggaaatgagcaaatactacgttttgcccatatgaaaactgggtgttaaacatttaccagtactccagtggatatcctcatttaagtcaggagagtagttaagactaaaatttatgaagcaagaaatggcagtatgagtatattatttagaggcacaattacaaactacagaaaatctaaaaataattttattttattaaattttatattaaaagagaaatggaagagaaagtaatatatatataagctcaatcaccctcttttaatgggtaagttaataaatattgtctaaataaaacaacagaggcatttaaagtccaattagactacaaaagcactaaaaccagatcacttaataggggatgcttccgagcagggctggcctgtgggaagggtgagtaaggagatggtggtttttcaacactaactttttaagtttttgagtagtgatgaatttatctacaaattgcacacattaaattctcctgagcatttaaacagcacttacaaacttaatcaagtcctcttaaggatatatcacttacaagaaacttataaatgtaaccaaattcttctaaacaacactagctaaaattttaccgaattcatttacaatttcaaaatacaaacaccaccaaagaagcagatttataagtctaattaaaattttttctatatattttatgaatccaacaaattaaaactcaaatatagtgtatcaaatttcttgcacattttcattatgttaaaaatcaaacccttaacaggatttttctagacatttaaatatggctactgagttaagattttctaagtatttcaattaaaacaattccagtatgtcattttctctactttgccaaatgtatttatttatttaatttattttctgagacagggtcttgctgtatcacataggctggagtgcattggtgaaatcatagcttactgcagcctcaatctcctgagctcaagtgattttctcacctcagcctcccaagtaactgggactacaggtgctcaccaacatgcccagctaatgtgtaaaaaagtttttgtagagaaaaggttgttcaggctggtctcaaactcctgagctcaagcgatcctcctgccttggcctctcaaagtgttaggattacaagtgtgagccatcgcagatgacctcaaattttaaaaaatgttttatatattgtaaaggctgataaagcatgcaaagcacagctgaggatttcaaaacttatcacacctgcatgaatacaacttgcacaaaaatcttaatactataaacatttctgcataactaaatcgttattttcgtatgtatttcttgggtgccagctgctcccatctgaaggaaacaaattcaaaatctcaggaactccagtcccgggcctggccccaggagctgggatgtaccactctggggacatcttcctagcccgggttacccagctgagcccctcctagagtggatactggcagcgtagcacatcactagtcctctggacgttgttcccatttcacccatgcccagtttttattgccccctctttcaacatttgaatgctttgcttgagcagagagaatcttcacccgttcccacccacgtgtcctctaatctccactgcctgattgtcactgaagagacactttgtcttctttttctccttaatgacttcattgacattattttatagtcacatatataaattattgtaagatcaattatcttgtagcaattagaataacacaaaaagatgttttagaaagtctttaactctaaactggttcctttatagttactggtctatgttctagcaaattaggttggccaactctaataaccactggaatatttggatattaaatctaaaaatatgtctcttgtcaaacaagcttccatttggaaagtttcacagtaattattctctcttactatatgagtccactgatttgctgagcctcaattaattgggagagggaagcaggaggtggagtagggcagggagggtcacagaaggctttcttttccagggatgtgatatttaaggtgagcaaattggtgtggggaagtgactgctctggatgttcaaaatagaaactatggccgggcgtggtggttcatgcctgtaagcccagcactttgggaggcctaggtgggtggatcacttgaggtcaggagtttgagaccagcctggccaacatgatgaaaccccatctctactgaaaatacaaaaattagccgggcatggtagcacacacctgtaatcccagctactcgggaggctgaggcaggagactcgcttgaacctgggaggcagaggctgcagtgagccaagatcatgctactgcactccagcctgggtgatagagtgagactctgtctgaaaaaaacagaacaaaccccccgccccaaaacagaaattacagcgtatatgaaagcccaaagtcttatacacatgatttacaacacttattgaacattgaccaagtggttggcactattttaagcacttcagatgcattttattttatagtaaatgaggaatttgtggtaaaagtgattaagtaatttcaaggtcacacagtgtaaataatggaggcttgatgtaaacccaggcagtctggttccaagaaacgggatagcagagagtgactgggaaaagtggtgtgaggtgaagacgaagaggaaggcaggaaccaggtatgcagaccatgttaaagattttgaaaatagtatgcaaatttaaggattttaaggagagaattggcagggtcacatttacatttttcaaagctctcctcttgctgcactgtggagaactgatcacagatcctgggcagttggggaggagtggaggcagggagaccagttaggacaatattgcaatgagcagcccacgtgatagttgatggaaacaataagcctgggctaggtaggagtggctgtgggctggagggcatggcagatgttccaaagattttattgagctaaaattcctaattaaagaacaatgtggaaggaattcaatcaggtgaattggcggagaacaatctccttttagaatattgttctcatcttgcaccacagtgatcgtagccatatttattcagaagagaaagatctttatagtctcatttcatgatgggtactctataaggggggtaacagagcctgtttcctggattacaattcagggcttggggaaataagtcacactacagcacactcaggtgtttccaaaaattaaaattgccgaagcacttgactttccaaggcatcagagaatgatgaactctcagaattattaaattagctgcttccaagatgccagttgacacctgaactggagaagcattgagaaagccgttgtactcaactcgttgaggctcatttccggcctctcttcctggaaacctcagacacccagcctcccacactaagtgacattcagagaaactgggtatcctgctataatgcgagttctgaaaatcaataggtcacaccacaacaaaggaaaatttgactacttagaccaatatgaggtcccttcagggagtgtctgtatactccctgaactctgcaggtaagtgtactccttacctttattttagaaaggaaagattagatgatgatggagaaaacatttgtttttcactttttcctcttcatgatacatgaattgaaacatagatctgacttgttttcaggtgataattcaactacgaaaatcatagaataatctctgtggtagttctgctaacaactataaagtgtttcttttatagttactgttttgtgttctagcaaattagattaactatttaatactgctggagcctctggatattaaaatttaaaaagtatttctctcttgagaaataaacttacactgggaaaatttcccagtaactgttacttcctctcatatgtatccattaatttgttaagccaaagacagtcaacaatttaagccaaagacagtcaacaatttaaactaaggagtttttttaattaatggggttggatttttacaagctgcttgttggttatgaatttctcttcacacaaaccaaacaattttactgccaagtgaactaaatatatcatcacggtataaaatcaatttttgtaacagtaaattttaaaattttattcaccaagacttagaacatagaactgtattcacatttatactgtctttaatatttgtcttcagtttccaccttcagatactattttcattttatttatattcttagttgcatgaatttttttgtgatggcttatcataaagttaatatgttcattctatttttattttttaagaagtcatatatgcataggaaaagagacttagaaaagaggttcttctctgttgagaaagtttgttaaaaatccgtagtagctcctgaacaaataagaaagaaccattatagcaaaaggattcttctttgtttaaaagaagaatttgatcataataaatgccttcatgcacccataaaggaattagctttttttccaatcctaacttccatctactttctgttcagatgtgttcctgtttggtagacagtgtggccagttaagttgtactgtgagttcaatgatcttctataaatattttctcactgtttaaataatccaagattagggaattcttactgactagaacctttttataattcaaatggctcacccatgtataagttattgctttaacaccatgtcctcaaccatctcttagaaatgagccagtttcacatctccatcccgggatgtctctctcaggaaagcatatgtgcctttgatagtccactccatgtaaacaggcagagggaatgggagtaagtgtgtcagcttggtgcaatcaaagtcagtttccttagagaaaattagagtggccatatttcatactgctagaacctcttacatggttagatagtgaagaactatgtctataaaaatgaatcctgatactcctgaatgttagccaatatgtagaaaactcaatcgtttcatttatgtaatttccatttcttcacactttatactctcaagtctgtgattttactcagcttagattacattagatcatgtgattctaaaactataaaattgtatagcctcaactttctatcatttttatcttatgatactcttaaagacctcagagcagtatttttgtacatgagattaggagaacagcttctgcccttttgaggcctggtgtagtcccagaggccatgttttagagaggatagtcaaaataggaaatcttaactgtgggcctaggtcatccagacgctgcctgctctgttgtttcagtcagattggcattggggaaagaagaggaagcataaaatgtgagtttacatggcagcaccaattcagcagaccagtgcaagtgaggtatataggtaagatgtggcatcttaggaatgttctttgtcggtcttctgagaagctgcaagggctcttagtttggtgttcctagaagcagaccccgaaatgatcatgtgtgtgaaagtgacttgttagaaagtgtttccaggaaagatcagtgggggagcaggcagtgggatagagaaggaaaggaagcccagcaaaggtgctgtatgaagcaggtcctgaagagagtaactttgacttagtcctgcaggaaagtcctggagccagtgcagatcatacttcagagtgctcctgatggatggggcaggaagcattctcacacctgtcactcactgttaagggccacatccagaaggacgtaaattcccaggaacttctggctttccttgctcaggtagctggaaggcagtcctctgtcagagagacccaggtattgattgtaggcagggaaagcacactggtatccaaggtgtacaaaaatgacaaagggggccgggcacagtggcttatgcctgtaatcccagcactttgggaggccgaggcaggtggatcacctgaggtcaggagttcgagaccaacctggccaacatagtgaaaccccgtctctactaaaaatacaaaaaaaattggttgggtgtggtggcaggtgcctgtaatcccagctacttgggaggcttaggcaggagaatcacttgaacctggtaggcggaggttgcagtgagccgagtccgtgccattgcactccagcctgggcaacaagaatgaaactccgtctaaaaagaaaaaaaaagagagaaaggggtctaaggagataaggaggaagcactgacagtgtccactataaggcccaagaagcaatttatgtgttggttttatgaaacgtatagccaaaaacattccactgcagtaaaatgctccaaaggagctgattttaaaaaaactcaatcctgtaaaacacttcaatagttataaaacaagggattacttctttcaggtatatagcaaaaatatattctccttgaatgacatacattttgttatatcttgaaaaggtgaaatgttaaccctaattctctgttagggaattgaatgttgacagataaaccaactttgagttgaaacctaaaccagccaatggtacgtagattcaccttctctccagatctgcattttctgatatgagatgatataagaacaaaccaaaaaaaatgagatttcaagacaaaactgttaagtgtatatatcaaaatacaaagttaactcccacctacccactctgcaggaaaatactaagtagctaaagagaagcactgaaaactcctgaaacatgcttacctgatgattcttcccttgagcacttcagttctagttctaaataggggatatttaggggagggtatgagaggctttaggggatgatggtggtggtagactttcagcataatttctaaaatgtgttatttccttcacagagtttactatttgtcttctaatttctaaaaatgttttgtgttccttgatggaaatggtagcatattagactgtgtgcaagtatgtgtgtgaatgttcaatattataataagatgtattatatttgtgtaatttatgcaatatctttattctaaaatgccaaagcatgttattgaaataatctttttcatgcttagctaatttttgatgcaatttctaaattttatagatttatagaaattgaaaacagttacacagcttatcttcatcactaaaatgttgtattaactacattaattgtgtagtatggactagataatcatttaaaagaaaaatatacttgtctattgctttttagtgatttttactcttgaaattttatcttttagtaataaaagttaaatttttctttttaaaaaaattttagttatacatggaatatcccagttaaatggactgaagataatataacaagcagtgtgttatttaataggtcagaaaaagaaggtaaatattattaattgatttatttcttctttgaattgatgtaccacattaaactaatataagtataaagatgcaacagtaaagctggaacttatgtaaacttcagctaagtgatctcttaaataatttattgatgattccaaatcttcatctacaatcagaactgttataccttgagatattcttttcaatgatttatcttgactgactgatttatcataaatacccatatccaaaggagaagggtcgcatgcccaacaattggaagatcaatgtgtaagtttccttccttccttccttcctttttgttttttcttttatcagataagccattgaatttctttaactgttatatgacaagcctgaggatttttttaatgctcccattaaattagaccattttttggaaatatatttgtgttctatctgcactgatttattttttccttacttgaaaaatgttagggttgtataaaaacaagtaaaccttctcacgaaattccagattgatgaaaaaaataatagataaggcaagctttagctgcaatcttggaaagaatccttctttttatattttttccattgtatttgttttggtgtttcaaaactatttcttttctaagacaaaccagactcatctttgccccatttcatgaggacttgatttagaatagtatttggtatggactttcacttgtgtcttcttgaagataaaagtagatcactcattctttatttacatatgcctagttgctcatgtaaaatattttaaaatattaatgaggtatgatttctcctggccaataaatttttactctgtttccagtagattgccttttaagaacagctttactgagatataattcacataccataaaattcacctatttaaagtgtacaatccagtgttttttagtgtattcacagatgtgtaatcatcaccacagtcagttttagaaaccccataccctttagctgtcatgcctgcagcctcccatatgcccagccctaagcaaccactaatgtattccctacctctatagatttgtctcttctggtcatttcacataaataaaagtgtatatgcagtattttgtgacttttcaattagcataacgatttcaaggctcatccatgatatagcatgtaactctacttcattcctttttattgccaaatcatatcccattatatggatataccaccatttgtttatccatttatcagttgatagatatttggatcatttccaccttttgtctgttatgaataatgctgctataaacatttgtgtataagtttttctgtggatccagcatgttttttccacctttgggccttttaaaaaaaaacgtttattgttaacagtttttgtgatttttttttactattactacaaactaccagctttgtcattatagaggtgaaatccttctgaagcccttctgcacagggattgctattacaacaaaactctctcttgcttatttatgttaataattattgtaatatcgtgatcaaaaaaaattctaaatttttgcagaattcccagatcaatgccactttgttttagtattttatgctgtgtttcaatgcgaggctctatcttttgtggtcttctgaccattttcttattcataagtacacttgccagaggaaaagggagaagacagaaaaaaaaaagacattttcaacaatgtgtaacagcactggtaaaaggcataataagaacgttagaattccactggaaggttttcagtggatttggtttaactattactaaatattttccccattggtcaccatagttaattgaggattggaagaatatctcggcagctgtttgatttactgtttacaagtttgaaagcgtgaataattcatctaccctagtacaattcacccagcactttcatggaatgaagtttccatacaagtgaattttccagataactaaagcttactcaagtgctttgtaaaatgcatttcaagagttcacaatagacattgttctaatatgtgttatgtactccttagaatatttggaataataaatttaatccttaattactagattaattctttcaagcacgtattgcttatgtgcaaaacacagagataagaatgggggcagtgctggagcaaaaaaaaaaaaaaaaagcaatcctaacccttgtgtagatggttgtctagggataggtttgcaggcagacataatgctgtgtcctaagtgcctctgtggcaatgcagatcaccaaaagcactcatagaagcatcagcccaggtttgggggttcaggaagcattcctaaaaaatatctaggctgagagttcagaggctaaagatagagtataaatgggtgataaaaattgaatgtagaggagacgtgtgctctggacagaagcatgactgtgaaagtgaaagagcagggagttctcacactccttcgtatccctttgtcaatacatttcacacatttttttgttctaactattgacctatctatgtctcccctccccacagaatattcttagaggaaatggagcttatttgttattgttgttctggatctacagcaggcatctaataattgtttattgaataaatgaatgaataaacaaataaatgaagaggctgatagttacagagctttgatgacaaatctgcctttatctgaaacttcagaatcatgtctggtcactgagccagaagcaaactagaggtctttttctacttcaaagtgtctgctccatttttaggctgtacaataagttcctgtttcctgtttgaggacatcttcagctctcagcttagagcacggatgacgaacatgtcctgagtgtactaaatgggcaaccagctcatgttaccagtcctacctccctcctcttggtttctttgatgattcattagttagaaattcttcaggcaatagtggactctccccaaggtcttttatttacatttctattgtatgtgctattttaggcgttaaaacaacaactaaactcataatttctaacgaaagaagagaacctctattataaaacattttctggctactccagttaccctgaataatctctcctgtcatcatctcctgtcataaaatatagtatattttatcctgtcactttcatcagcccttattcctagtattattactttatattttaaacaaaatcattgttattaagcttcatatgttctctcttttcgttctttctttttttttttttttttttttttgggacagagttttgttcttgttgcccaggccggagtgcagtggagcgatctcagctcattgcaacgtccgccccctgggttcaagtgattctcctgcctcagcctcccatgtagctgggattacaggtgcctgccacctcagctggatatttttttgtatttttagtaaggatggggtttcacaatgttggccaggctggtcttgaactccagacctcaggtgatctacctgcctcagcctcccaaagtgctgggattataggcgtgagccaccgcgcctggcctctcttttttttttctcaactaaattataagcttcttgatgacacaaactacacatatttcttgtctcctgtccaccctattatcaacaaggtgctacgtacattctgagttcagaaagtcctagtttaatgaagggttgtttgccccagaatgctgtacttttagaggttaactgcatatattttagttatgtctccatcttttagtatcagctgctattttggctattgttaatgcatccacatttagtagcataccacctgtttgcatttaatttactgctttctaacatttagaaggattgaaggttgttatatggtgtcaggtaaccaatcttgctaaaacataatattttaaaagagacatttctaagtgcataggatctgggctgggtctaagttctaggaggtggtgcggactctacaatagctgtttttgcaactcttacttccagatttgagggtgtcctctggatggtttggactatccagactgtccagtcagtttctatagaaatagatttactaaacatctgtgataattatacataaatatttaataccaaaataatgatgggcatgtatttttgtatttgatgacaaagagggaagcactttcttcattttttcaagctaagcctcatggaatgtgcaagctttgattggatgattatgggttcagttttgctggtttagaaactcaatttgtcagttcagccctagtcaaccaagtcttggaagatctacttatctaaaccaaacatacaagagattaactaagaatgctaacttgttaatttacacagttaaaatatactagttagtgaatctgaatactcatgtcacctaattaggtatctctttccaggaagcaagttacttagtaagaattaaagggctgggcgcggtggctcacgcctgtaatcccaacactttgggaggccaaggcaggtggatcgcctgaggtcgggagttcgagaccagcctgaccaacatagagaaacaccgtctctactgaaaaaatacaaagttagccaggcatagccatcaacactgaggcaagaccctctatcagtaaaaaagattacaactggctgaaggctcagatgattgttagcatttttagtaataaattattttagttaacatatatacttttttatacatagctgcctgtaatgccagctactcgggaggctgaagcaggagaattgcttgaacccgggaggcggaggttgtagtgagccgagattgcaccattgcactccaacttgggcaacaagagtgaaactctgtctcaaaaaaaaaaaaaaaaaaaaaaaaaagaattaaggaagagttaaggtagattaattattttacagatgtctttaaattgtgatagtgtgatatattgcattagccaggtgagtctaattattgcactttagaaacaatcaatagtggtttggtgcaataaaagtttcttgttcatgcaacagtctaaaggagatattcctgactgtcatctttcctaggtggctctccaccaaataatgacttggaaatcctgtcttcttccttcttatggctttaccatcccctgcatcttggaatccctcactggttcttttgcatctagctcaaagacaggggaagataatgaaggaatcaggcctagaagtgcatctattacttctgcccacattttatagccagttctcaaatcatgtcctgcaaggaaggctaacatagtccaattctgtacccaggaagaaaagggaactgtgtggtaaacaactagtaggtctctgtcacatacactgttttctgtaggaccagacctgtcaaatagcctgaaacacatgttccagctcaatttggcacctacttccatgggcacactggagacacattgacagatcttcactacccaactctcctttgcagttattttttttcaactaccaaaattattgctaattgtaatctttcctcatgataattgggttgcatttttccagtttcctattcattgcatgttacatattaaagccacaggcatacctgagagatactgcagttttggtgccaagccacgcaataaagcaaatatcacaattaagtgagtccatgagttttttggtttcccagtgcatatacaagtgatgtttacactatactgcagtctactaagtgtgcaattgccttatgtgtaaaaaagtatatatgttaactaaaataatttattgctaaaaatgctaacaatcatctaagtcttcagcgagttgtaatcttttttactgataaagggtcttgcctcagtgttgatggctgctagctaattagggtggtggttgctaaagacttgggtggctgtggcaatttcttaaaataagacaacactgaagtttggtgcattaattgacccttcctttcacaaaaggtttctttgaagcatgcgatgctgtttaatagaattttacccacagtagaacttctccaaaaccctggtgctgctttctcaattaagtttatggaatatttttaatccttttttgtcatttcaagatgctcacagcatcttcaccaggagtagattccatctcaagaaaccgctttctttgctcacccataagaagcaactcctcacctattcaagttttatcatgagatagcaacaattcagatacatcttcagggttcacttctaattctagctctcttgctattttcaccactctgcagttacatcctccatataggtcttgaacacctcaaagtcattcctgacggttgcaatcaatttcttccaaactcctgttaatgttgatattttgacctcctcttatgaatcatgaatgttcttaatggcttctagaatggtgaatgctttccagaaggtttctaatgtaccttgtccagatccatcaaaggaatcattatctatgacagctatcaccttacaaaatgtatttcttaaataacaagacttgaaagtcattccttgatccatgggcttcagaatagatactgtgttagcagctgtgaaaacattaatctgcttgtacatttccataagagctcatggatgaccaggcacactgtcaataagcagtactattttgaaaggaatcttttttggtgagcagcaggtctcaacaatgggcataaaatattcagtaaaccattctattaacagacgtgccgtcacccaggctttgttgttccatttatagagcacatgcagagtagatttagcataattcttaagggccttaggatttttggaatggtaaatgagtattggctttaatttaaagttaccagctgcatccacccctaatgagagagtcaacctgtcctttgaagatttaaagccaggcattgacttctctctagctgtgaaagtccttgatggcatcttcttctaatataaagctgtttcatctacactgaaaatgttttttagtgtagctgccttcaaaaatgatcttagttagatcttcttattaacttgctttaacttctatatcaacacttgctgcttcaccttgaacttttatgtttggagatggcttctttccttaaacctcaagaaccaacctttgctagcttccagcttttcttctgtagcttcctcacctctctcaggcttcacagaattgaagagagttagggtccttctctggattaggctttggattaagggaatgttgtggttagtttggccatctatccggagagctagaactttctccatatcagcaatacagatgtttctctttcttatcattcatgtgttcactggagtaggacttttaatttccttcaaggactttttctttatgtttagaacttggctaactgtgtggtacaagaggcctggctttcagcctgtctcagcttttgacatacttaccttactaagcttaatcatttctatattttaatttaaagtgagagatgtttaactcttactttcatctgaacacttgaggccattgaagaatgattgattgggctaatatcgatatggctgtgtctaaaagaatagggagtcccaaggggaaggagagagaaagagagagagagagagagaaagagaaagataaaaagagagacaggggaatggccagctggtggagcagtcataacacacacaacacttaccgattaagttctcacctatatgggtgtggttcgtggctccccaaaacaattgcaatagtaaaatcaaaaatctctgatcacagatcaccctaacagatataataataatgaaaaagtttgaaatattgcaagaatgatcaaaatgtaacctagagacatgaagtgagcacatgttgttcgaaaaatggtgctgatagactggctttgctacaaaccttcaatttgtaaaaaatgcagtatctgcaaagtgcaataaagtgacttctctctagcgcaataaagtaaggtatgcttgtacacctttctttacaggcagattctctaggccacttgctgagatttagaatggaccctgtaattattactaaaacaatgactaatactttcttgaatgggtaatttgttgaaagcattaccataaatggataaccaatccattttattatggatcatgttagctttagtttcagaaattaaaattttcttctatgaccccaaagtctaataatgcattctacttgaaacttttagctcttcaaatatattttgcatgtcattagttaaaaagcattactcgtgtctttcagttgttttttttgctttcttaaataaattgagatgggggtcttgctatgttgaccaggctggtctcaaactggtctcaagcagtcctcctatcttggcctcccaaagtgctgggattacaagtgtgagtcaccgtgcccggcctcagctcttttactatcaaatgatacacaaaatttaataagaggtaaactctgtaattttacattgaaaaataattcacttaaaggattagtgcaacacagcattcatatcacctaagaaaaatgtttttttctctaggaatctcaggctatcataagctgtctacttgtctaaaattttttataattatttataatagatagtaacattaaagaactgttacctgtgctctgttactgaaatctatcagggttgaaattaaagaggctctcgatgaaattttgaaaaggtaattatcgcttttctctatcatctaggcaaataataaaagaaaaaagtaagaattttctagaaagagctcctactcagaaataactcattcaatactttttggcatagatagaactaataagaaacagaataaaacaatttttaagttgatacagcatgatatgtccattaaacttagatttccaaatatataaaatgaaattgcaaggtgtttaaaatataatttcaaatgaaaaaggattgctaatcataaaaacagtagggtcccattatatttgttgtgtgtttgtgcatgtgtgcatatagaagatacacacacacacacaacaggtaaaaaacatgttaactgtggtgggtaatttttatattcttctttatacttttttgcattttccaagtgctccataaagaatacatactattgttataatcagaaaaaaaatagtaaatggagtaacagaaggaaacatacagtatattagtcctgtattttaatcttactagagtattttagttctactcattatgtaactaaacaactgaacagtattttgctattgacaactgttccaaaagtagcatgaacttggaaagtccttaactactgacttcctggatctcagcttcctcatctataaagtgagaaaaatcacagtaactctagacaggcttaactaggtacatataaagcacactaaaatatggcagtatttagatggattgccaggaacttctcaacgttatttatatttgcttcgctatttatagaactggcagcatatcccctttcattataatggggatagctaccatctgttggatacgtagcacataactatgtgaccaacactttacctatgttatcttatttaatcttcacaacagccctgtgagggatttttgtccctgtcttccttggggtgaactgggacacagaggggtcaagtgatctggccaaggtcacacagctagtaagtcacagagcaaggtttttatcctaggtctgtgagactcaaaagttcatgctctttctcctgtaacatatggctttatgcttagcaagcaactctccttctgatacaaacattcaaaatgtacagatgccaaaagattagcttcctttcaacaacttgtccatgggaggatgacaaagaaagagaaattctacatgagtgaggtaagggtttataatttatcaattacctactccgaaagttcctaaagaaacttattgtcttgttggagaggttactcatatattatgaaaaactactgtgtcctggatatcttccagaccttgcaaacacttccaaaatttaaatcatatttcctcccaaactgactcaccttcctctattctctactggcagcaccattattcatccagttgtgcaatccattttcccctcctctgactgtccacatcaagtcagaaaaaggattttattgattttacctgtgataagtctcttgaatgcatcaacttctttctagtttcatcatctccacattagtgtaagccctcatcctctattgccctacatgactacagtggactctaaattagtcttcttgtcgctagaatcgcctccaaaatatctcccataccactattgaaatctttccagaaaatagacttgagcatgctatttttctgcttaaaactcttttcccctctcataagatggattcttaacatggcatgtggctcttcatactggaggccaggcttttatttccagcatcatctcctatttttcaatatcacaacctacattgttggtaccttaaaatatttgaaacttctcaactatactatgttcctataccattatttaaattgtatattgttcatgtaaacaaaagagtgtatgatgtatgaactgaaaaatataggagtaacgctaacgaacatggttatatcaaagcatagctattattttaagtacatatcttttacctaaaacataagtctctgctccttcagccttgggcttctaaaatctatacaatagagcctcacatatatatggatgttgttttagaaagaatgctaatttgataaatccattgatggaaaagtattgttgtaaccaactgaaataggaagtagacggctttacaaagataaataaatcggaagaacaagtgtgaagtcgattacaaaatcaagaacgtttcattcagatctcaattctattgcaggtcttcttgatacagtaacattttaaaagtgttgctgattatcaatgtattatcctgcttagtgatagccatttccatcaacttcaatgttgattttaataaacaaagtattattttgagtatttacatttgtatcccctccccaggctgccctggtgaatattgtttgtgtaatcaatccattatgattagggatctatggactacccctgaaggcatggacttctctgtctcgaggcactgttttcttttattgatggattgaccagcacgaaattatttcgcccatttgacaagcttctgccagtaaaaactatccatcataaattacagtataattatttatattacttatttctttttaagctcactcattatagtggtattctaaagttagacaactaagtaaaaattaggctttgggttttggatccaaatcaaacctgcctccttgagctaatatttcttttcttttattttctttttgccctctgggtctaatttctctgtgttgacagtgcatgcaaacatgttgctcattagtgtttatttactactacaggaatcactttgaactcctctaatcctagtggaaatgcttttctcaaaataaacccagatcatattgggttttatcgtgtaaattatgaagtagcaacttgggactcgatagctacagcgctctccttgaaccacaaggtaagagatagcaatggttggaaacttttatttttgttctaagaacagcatcttaatgatattaatttttttcaacatgctttgccttaagaattgtgtttttatctctctttctccctcttcccagacattttcttcagcagatcgtgcaagtcttattgatgatgcttttgccttggcaaggtgcgttttagaatgagactaaattacttaaaatactgtgggttttctcataaatcttttaaaaatgaattaaacattgcagtattaatcaattttagcttaaaatatccaaagccactatttaaaacattattgttttccttaactctcttttcaaaagttcacatgagcctaatagtcaaaatactgacattagcccttaaggtatacacaaaaacaaacctaacttattgactttgagtatggtttgtctatatcaggatccttgagctaattagaagtgacatttgcaaatgatcaaaaatgtaccttcataatttgatttaatataaagacaaacaatgtattttattaattcagttctgtgagcccgagcccagtgtaagattttatggctagaattgtcaaatcttgttcaggtcactggggtaagaagaatgagctatggtgctttagaactgatcagaattaggggaccatttggaaaatttgactctttttctcatagtctgaaggtaacctgctctttagaaaaagtgtagattggaagaactaagtagtatccatggtacctctattttttttttaattcacatagtctaacaccagtaatttaacaagcatttattgagttcctggcactttgcagaagctgaggacacagccaattttatttctctggctttgtagtcgcctcattctagatatgagcaatgtgctaagaatgaggagccacttccctcagtagcctcccatggcctctttctctgggttgggtatccttcttatgggaccctatatttcctcataatattttattgttattgtttattaattgtgcatttcacccatcaaactgaaggttcatgagggtaggcacccaaacccagctcctgactgtacgttgccaataacagttgataataaatactgactaaatagagaggtggaagaatagtatagtagtactaaaggcatggggaaactattttacacagagttcctagatagtatattaaaagtcagaaaaccttgacatatttcaaggaaggaattatggggttcgaaaacaggctcttgaaccccattaaaatcctggttccatatagtcttaagtaagtctcttaacttctctctggctcaattttcttatcaccaaggtagagatgaccttataagacttctgtgaggaataaatgagataatggacataaaacacttaaaagattatctggcatgtagaaactcaatacattgtattacatgaccaaaatgcatccaccgttaattagtagtgaagatgcgtttagaagagctcttctgaatttgtaatctacactcgttttgtagctaatagaaaatatgatgttctagtgaatctccaagtttaacctcctggatatgtaatagattattttcactatattacagtataccactcactcatttaataaataaacattggcgacttactatgtgccaggcactgtgtagaatagaatctgggaaattaaatgatgaaataagatgatcaataagtatttttaaacagaatcatttagtttttatttttaaattgtcctgttccaaagctcagcttcttcactgttagaaattacaaagaactgtactatctctacagtttaatttgcaccacaatgtaggaggtcctttctattccaagatgaagtgaaagaaagcctcttgaacagctctctctgaggaactgagtataaagcaaataacttacactactgaaagacttgctcacatttgctcagctccttggccacagccccataaaattgtgaagagctgtggagaggaagaaaatgaaacaaatttgaaattcaaaacatatgtaggatcacacaagagagctagaaaatacctgtgctatcacctggctcaatgaggttctgcagcacatgaggaaaatgggactcggagagaaacagattcaacgagcattggttagagccaagagggcagcttcaaagaccacataagctaagaccattatgaaactttggtggagggggtggaagagagaagaaatgcgtagttaaataggtgagcaactgtggcaggattagaatttaaacaagtctactgaggtattcaaaggaatgtagtaaccattatatttaataatcagaactaaatgatacatctgaaaataaatgaattttttattcccctgtctcttccaacttgatgtgaagaggtagtactcctactgccctggctgggcatatgactcttttcaaggtaagaaatttacccatcaccactagttcatccaaaccctctcaattccataattttctcagtcaagtaaaatcatcaaagctttctacttcatttaaagcttctccctgcccccagcttaggccaggttcaggccagtcacctgcaatgggaatggggtgattgatttcctcttcgtttctctgcttggaacttctatgtctcccgagtcaccgtgctgcctctggtttctccaaagttaaggcaaagagaacagggtgggagagtaggtgagagggagaaaaatcctgatgtgctgcctacttttggtcctctctgaactttgttgatgtttaatgctgatttttttccttgtgttgtgtttttatgggatttttgttacccatatccattccattgagaaggatctttctcctgcagtttccttgaggtgggcaggtggacacttctgacccacttctggtccataggaggttgtcatgtatgctttgtcctgacaatatttggaagaacaggccaccccatgcagtcccatctcttcactctgaggccagagcagcagccaaatagcctctcatcttttagatttctcagggtgtcagacaccaagccacggtgcctccaagttccaggagacacaggtaaacctcttcaagtggtcccactgaaacctctctcctgagtcttaattagacagaaaaacatctggtgccctagcccttggaggggagagcatttacagtgtactcagtatactgacagcactctttgaaaggcctccactaaaatgtctcaccttagtttctccaacctcttttataggctggtggtgggctatcagcaaagagccacacagtcttgttcttgaccatgttagtcctgctttggggtcctgcgtctttctttggagcattggagcataggacttagtcttggggccttgccaaaacagacacagaaacaattcttccccccaccccgccccctgcttgttacaatagtttttgttgttttttgttttctgtttgcaattactttatattgtcctcttcagcccacttcttgctacagccaggagagggtgggtaataacataagggaaagcagagtatgctggctgacaaggctgcgtgggggcaggagtcactaggtaagggacgaatggcaaagagaacagctgaaaggaccacctaagctaatgatctaagcagaatttcagccaggtttcaaggaccactggctccaaggatatgcaaggtaatggccacgttagcaaataagaaccagcaggtgaacatcagtcaagccaaaatcatggaccttagatacaaacatttttgtaagtgtttgcagagatgaccagagaacaacacagaactctataagcaacttttcccatcctctcatggacttcccttaaaggaagtgagaagatggggaatgggaaaagaatccaaaggtgatttagttaattgcaaaatgactgttttaagccagaaacctgaatttaattggcaagttcagttgagtgactagacagctgggaactttatgcccttcacaccacctgaaaaactagccaaagaacccaagcacatggggtcagttttactcccccaggtacctctcaacaatttttattgtccctttagggagccatgtttgacaagacactatacttaactacttaactcaggcttctctaagcaggactgtgcagtctttccaaattacactcaggaaaacaaaaaacaaaccttctgctgtaagagtcccccaaccttcctaggtgccttagctcaatatagaagagcaagaatgctctcatatgacctttgtcctcttcttcattttatttggtggaaattttaagctatagcttccaacctctctacactatagaatatagtaaacttctataatttaagtcccccaggctgggctctcactatataaacagaatatttttgaacaaagaaaattctcaatcaagtctggccttcagaattgctgtttgtctatggacttaaatggagtttgagacccaaagttgagtaagaatgctagcagtcttgagttgagttccctagacgtagagtcagaaatagaggttcttgtactagtggtttcttgagagagtaatttcatgagacagggaatacaaaaaacaggacagggaagtggggaaagctgagctgatttcaaaaggttctaaaattcttttgaaaggggaagaaagtggattctttaacctttaaaatatcaacagtgtcttcaaattttctagaagagaaaaatttacttttttaatgaatattactgggaaatgtgtaagaagatgttataaaggacaataaaagttcaatttgaatgttttaagcattcaggattaataagaactgttacttatatttcttcttcataagcaaatgtaaataatttcaacaaaatacatttatagtagtgcctttatgtgttaaaatccacttgggaacctaaaatttaaaagtttctatttgtcaatattaactgtacagctaaatggcttttgttttatttgaaattttgctgttgtgctttttcaaatgtacatcttaatgcctttcttcctccttactattgaatgtatgaaagccctactgtataatttcggacaaaactttttgattgggcttcaaccaataaatgcaatttcttgattgttgaatggaagaatcctcattaacatggaatgctttgatcgccaaaactttcagttaaatggaaactaaagtctgtggtttttaattaactgtgagtttttttttttttttttttttttgtctttctcagagctcaacttctagattataaggtggctttgaacttgaccaagtatctcaaaagggaagagaattttttaccatggcagagagtaatttcagctgtaacctacatcattagcatgtttgaagatgataaagagctatatcctatgattgaggtgacgttaatgctatggtatcttatgaaagtaaatgtttagccattagtagaataggatgctttctgagagaaggagctcttggggacctaaaccatgtttgcttgccaggtggaatcaaaagaaagtgcaatgacttgactaatcaaagcaaagctatgccgtctattctttttcaatttgaagtacatcagaatttgttgttctgcatacataccacttaggtgcattttagtgttagaagaaatacaacaattaatattttacttaaaatatacaacattttaaacaataaatactaattagatcttttttaaaatggactttatctatgttaaagtgaattattcttctaaaatataatattatatcttcttattcttactgctggtatttccacattgagattttatcatatgtagtcattctaaataccgtttctttgctttgtgatttctgtagcacgtaagtaggacacttgtaattttagacaaattctggattcaaatctctagctcttctatttacaaaatgaaagatcttgaacaaatgatttaacatttgtgagtcttaatttcctttgtacattaggaatgccagcacttgcctgcttacggtaatgggattgtgaggatcaaataatatgaaagtgctttgtaaaacctaaagcaatatcagttatttttattatttcatatatgcttaaacaatcttagtgcagaaagtaggttgagtgttttcctatttattacatatgttaactaagaaataggggttaaaagggccttacccaaagttttataaaacattacaggaaggtccgggatggtttatattttcaggattgaaaaaaattgcaatgtgataaaaattaaatacattgtttttctaaggacaagcgcaaagttctctgaattagtaggaaaacagattataacaggggctgctgagtataataattgggatactactgatatgtagtaaattgttacttattgtacataatacttttatttcaggaatacttccaaggtcaagtgaagcctattgcagattctctgggatggaatgatgctggagaccatgtcacaaagttattctcactttttaacaactaaaattcatttaacatttgttttttgttttaagacttgttgaaaagtgcttaaggccctggatttgtgtttgtttgttttttaaggttactccgttcctccgtgttagggtttgcgtgcaagatgggagacagagaagccttgaacaatgcttcctcgttatttgagcagtggctaaatgggactgtaaggtgattactcacattgttatgcttagaagacacatttgagaaaagagtagttgaaatctctgaaacactgtttcttcttctagccttcccgtaaatctcaggcttctggtgtatcggtatgggatgcagaactctggcaatgagatttcatggaactacactcttgagcaataccagaaaacttcattagctcaagaaaaagaaaaactgctgtatggattagcatcagtgaagaacgttactcttttgtcaaggtaagttgggcttttatttcacatatataaatagtatttaatagtttatgtgtcacagtctctttaagagtctgattaaagtatgatgttttgtttccaaaaaaatccattaaaagttattttccctgcaagaaacaaaatatccatgtaagactggcctaaacaataaggaaatgtaatctcatatgaacacattctggaggtaggtagcttccagttgtgtgcagcggctcaacattttcacccaggacccaggctcttctctttctgattttcaatgatcgacatgttggatgtctcatgacttccagagcttgaaacattttgtttttacacaaacatgtgtaatggaggtaggacaggagcaaaagagtttcctgacaaggctctgtctcttatgccaacaggacaattgtctccaattctcctcataatccagaactgggtcacccttcatcattgtgagtcacactctgggtctgctacttgatcctttgctcactagggtgaacttgaattcctttggctgatttgagccaattagaattatctgggactggggtagaagtctgttttacctaagatcaaggatatctaatggtatcagagcaaaactgggctctgtgagtagagaaagaggagtgtctgccgcaaatgcatttacactttactcagaaggcacaaagctcatctatgactcatttcccactctgcatttatacttgaaatcaacaggcttcttccttaattcattttttgcttagttatagtgtctgagttatttacttcatttatttaaccaacacttatggtgtcctttctatgtatagatatatagattgtggaaataaaaatgaataaaacatgaataaaaatgacatctatccttgagatacttacagcttcatgggagaggcagaatgtaaacagtaaattacaatgcaataccaatttaaaaggacgaccagaagcagtttgcttttaccaggtagagccaataatataccttcagcctctttcctcagggctatatattaattctcctgctctctgccatgacagttcatcaagaactcgatcatcttggctgggcacagtggctcatgcctataatcccagcactttgggaggccgaggcaggaggttttcttgagcccaggagttcaagaccaacctgggcaacatagtgagacctcgtatctatttaaaaaaaaaaaaaaaaaaagaacttgatcattttcacatttcacaaaacatcactaattcattactttgatggcattgtgctgattgtatctggtaagaaaattagcaagaactttagatgccttagtaagaaccttgtgaactaggggatgaaataaattcaggatcccacgactttagtgcaatttctggaagttcaatagtttaaagcatatcacaacattccctccaaaggaaaagaaatttgttgcaccttgactgacatgccacagaaaaagattattttagtggacttagtaaactttttttaaattttggaagcaacatatctcacatttgagtgtgttactttaaccatttacagagtcttccagtttcaaataatgactggagtaaaagaagattctgcagcaagtccaggctgcagtacgagcttccttggaatccctttcttatttgaaacatgtgattgatatgttgtattttcataaaagtagatttacccacacaactgcaagtgcaaagaaaatgtaggaccttgattttctatctgattattcccaagagttctcacactgctgagtgatgagccagtgagagggagaacaactgatgttgactatctttgtctgccagtctagtttttaaatgagttgttaaactagaattctcattgaaatagtctcttggagtaaatgttcagtcttctagagttccttcccttcctcatggtccttctgcacagggagacatgccacccttgtggtgatggagaaagagacctctgatttttgctgctttggccttaaggtgtttacctattttggtctgggacagagtctgctgagttttcattgatcatattttaccttctggtgcactatctgtcatccagagatgaaagcagtggtcccagtcacttgcttctgttcatgaagtacctgtgctgtatgtatggtatttttgttttcccatcaggtcttccagtgtccctgcctcttattgctaggctgaagaaactgatagcttcccataaacaggacccacaagtcgaaggaaccaggatcattaccttaaactcagtcatatattcacctcaccttgcctacgatgtactatcactctcccatgccattttggcatagcacaaaagtacatgctgaactatagacctgttcttaaggggttgtgttttccagtttcacatgtggcatggactttatttaagcttgagttttctccagtctcatttagggtaaatttctacttcaagtatgctaagggtcttgatatattaataaaagcatacataatttagaaataccttttctgtttgacaaaggctgactctcaaaggctcacaactcaagttgaacagtgatccctttgttgtagttattatctcaatatcttcctaaagatataaatgaattaagccaatgggtaggatgccatggggcagcaagacttgagtaacatgaaaatacatctaatctatcagtagtagacatctatttttgaggttcccttgtcacagtgaacaaaatgtgtgctgaccttttttggaaacactttttcaatacaatatacacttgtaagatcttgggctagaaacgctactctaggtatagcctggcatacaattaaacctatccatttagtcatttaatttatcttgtacttatttgtattcttaattattgccaactaatataaccatataggttacattataggattatttcttacaatctagggaagagcaaacaactgctttcctatagaatataagagcatagatacattctcttaatttactggcttcttttaaaaatccagtgggataatgggaaagtgtgtgaagtactctattcaataaatgctgttttaaaatattaatggttaaaattaacattttaatttttaaattaaaaacaatgtgttttaaaattgtttttggtgcttctaaaataatttaattttaaatgttttatagtttacattccactagtctttaaaatcataggttggtcttttaaaacagttaaacatatcagaaaattttaagttgtctttcatcatttgtcatatttaattaactttgtcagttgatacctcaagaattgaattgctggcatgaaaactattttgtattggaatttagctaagggtgaacattaaaagttcactttgaattgtttttctgtttggcttctcttaggtatttggatttgctcaaggacacgaaccttattaaaactcaggatgtgtttacagtcattcgatatatctcatataacagctatgggaagaacatggcctggaattggatacaactcaactgggactatctagtcaacaggtgggatgatctgatgatggtctgctgttttctttgtttcatactatctactggttccttcatttttctttgggccactgtctctgacatctatacaatatctaaaatggcattattagaggtaaaggatcatggtattatccttccagggaagcaatgtactagttaattttaagaacaatttttttctggaaattattgtttcaactgacctataggattctgagatctggaagactaaattgcattatttttagtttggttaaaacaagttaatacaattctgcctgttgtgctagtacctagcataatgccaggcacatatttagttctcaattaatgtttgattaaagctaggtaaaaattattggacctgggttcaaattagagttctatatcatactgagcttatgtgggtgataactattacctatcctgaccagataatgaaatttcaagtattttgaatgtttcttaaaagggaattatatttcctaggcaatagaacttttaaaatgggaaatagcaaggacaagagcaaaatcagttaaagagatgcctttccaaacttcgtatttcctcaggcccgtgcagaagaaagattgctgctcttggttctgatactctaaatataatgcacaatttccatccaaaaggcagttctttgatagagtacaaaatagaatatagaataaacgtatgtcccaaataaacatataaacattgatgaaaagacctttaccatctgtaatccctacattaggaaatagcctgtgttatctcctcttaatctctcctgtcaatccagcggcactgtctcattgataatgactgccttgtgagaaataccaactctaattataacttttaattattttctcttttctaccccacagctcaccagagtgctattatgtccatttacatttcttttcctgctgagattcagattctacctctagctcccaaccaaaatacactacattgcttctgcctgcttgtgataaatttttaccttttctattcttgtaactattgagtgtcactgttcacccatctctatgaagattggttggtgtgcatgtgagtgtgtgtgtgtgtgtgcatgcacatatgtgcattgttcatcttttatgattgtttaaatgaaatgcttaatttagaatgaatgaatatacctattaagaatatgttattatctagatgtaacagtttatatcatgcaaggtaataccctccattttgaaaaatatatggctagtgataaatactgcatattttgttttagttgaaaagaccatacaactatctctttttctgtggtgtatggtgcaggaaacctatgtagatgaagcataaaagttacttttgagttactatgaaaagacaagtaaataatggtttattttgcataaaatggccattaacttattgtttattgaataaatatttctcaaggcctatttgagtagctatgctgtgatttatttcaaataatgcatttttcatttttaaaaattagttgtttcacttcaggaaaattaagaagtagaaaaaaataggttttgccttgtcataaaattcataagtgtctggccttaaaataaatgtattaggcctggtaaattgattatttttcaagataaaaaaagaagataaactatttccagaagtactccaaaactcttgcccaaggctttagcatttcttcataatctaatgatctaattctcatgagacattatttcaaatggccccaaatgtaaaattgctaataaccacatgtctaatacacacaaacacccaatattaattgtacttggcttgaataaacagaacttccctatgaaaattggataataaaaattaaacaaaaatgagccaaactttatccaaataatcccaaacacttgaacattttccaaatttcaggatgaatagttttactatctccatttctgaacaatttatggtcatcctgaaataaataatcttctatttaaataaagcttttgtcatgtgatttttatgacaactgatggccacactgctaatgtccttgccagtttgagacttagccacaaagtcccaaagatacttcagaaattattctttgcttttgtttcttccaataaactcttagatgaaactgtgaagttgagttgacccaataataaggtggtgtgattttagtttatgacagtagatgaaaaactaagtcattaggacatgattgaaacccttcaaatactacctcataaaccaaacaatttaataagcacttaaaagttttgtgtgtattaaaattatttctttggataacataataatacttgtataaatattgaatccaagaagacaatatttgtaaatttttttcaaattatttaaaatataattaaatccttattttagtttttaaaaataaccaatatgataagcatgcagtatattttcccttattttctatactttatatgatattagtttcctggggtgtacatattttgttctggcatttctggtatttaaacaagtagttgcagttttcactcagcatattcattgctagtttctaaatatgtcctttagacaaaacagaaataaatattacagaaattatagaaggtcactgaaaacattgttttattagctgcaattagcagactttctttgaatctatagaatctcatcaaagcaactcagtgtgatttgcttttttaaattcctgttttcttattgtgaaactggtatgtgttttttgcacaaaatgcatacaaacaaaaataagagtacaaaaattacctgtaatgcaaccaccaagaaataactcctattgtcatattactgtttctccttgagtttttccatggctgtttacttaatttacagaaatggaaacatattataaatatggtttataacttgctttttttcctcatcatcctatattgtgggtgtcttttcatgtctttaagtgtgcatcttcaatattattttgaatggcttaataatgtttcaatgtgtacatacatcttagtttatttagccaatccctatatgttggacaatagaattgtttccctacaactatacgtagtgtattgatgaacagtcttgtacactgaatcctttgttgttttttttaatgtccttgacaatttctttagaatacaagtagtggtagaagtaatgctactgggtgaaaagatgtgtttatttttagggtttctgataaatgttgcagaattgccattctaaaaactgttgctagtaactgcctatgttcccaacctttttcaatgctcagtgttgttatttttatgtatctttgttagttgaatatatgaaaactgatatctcattttaaattacatttcttccatccagtaaatattgtggagcacctactctgtgctaggcattatgactggcattggggatgcagtagtaaggagaagcagacctggttctctgtcgtcatgaagctttgagtagagacaaattttaagtaaagagtcacacaaatacatgtatactttattatacgtaaattattaaagtataaaaaagttcaggtcttaggcaaaaatgttattcaaaatggtagaccatggaatctaaactacataaagaaataaatgcaagaataggaagatctgatggtttaagtgatagaggggtgggaatagtcaaagggccagaagtccaggtaaagtgaaagaacagtcacagtggaaactgaaagacataacatgtcatagagggtgaataaattagcaattttagaggcagatgacttacggatgatcacaaagtatcttaggaatttggtggctgaagtcgagtgaagaaaatatcatcggaaataaggttaaggaactaagagaagagatgttatatcattcatctgtatggatctggaaattacctagaatgatggcatggcttggaggagtcaggtaccagaatgtatcattaaatgcgagggactaacataagggaacagaggtttttaaagaggctggaggaatgctggtctggaagcagcaatggggagcatgagcacactgactatttcctgacctgatgctacaaaggatgtgggaatataaacattctcttaagtgagaatgagaagtagtgttccctgtaaagggacagttccagagggctaggtgaaagggttcaagagcctggggagatctaggaaatgtgtcagaggccagaaagtacacacttttaggggcagcattactaatgcctcagaatcacattttagataatgactgatgacattagggatgaaaaaacatattggctttaaattcagtggcgtctgtgataagagtgggcactggatctggtacactgaaatcatgcttgattactagaacattttattcttttcccattggtacattttcattcctttgctaaattcatgctggcatatttctccctgttaccaatttgtaagggttctttatatggcaaaaatatttgctctttatcatatatattacaacgatttgttctcgattagtatttggcttctaattttgtatatggtaggattttttttttttttttttttttttgtataaaactcttttgttacccagactagccttgaactcctgggctcagtggatcctctcatctcagcttcccaagtcacagggattacaagggcaaaccatcacctcccagctcagtataaaagtttttaatttgcataaaacaaactatcagcttttatcttcatgatttctgcttttgcatatatatataggaatggaaacatttaatatttataaaaattatatatatatatatatataaattttttttttagacaaggtctcactctgtcacccaggctggagtgcagtggcacaatcttggttcactgcagcctcgacctccccagttcaagcgatcctcccgcctcagcccctaaagtagctgggactacttgtggggcgcacaccaccacgtgcccagctactttttgtatttttgttagatatggggtttcgccatgttgcccagggtggtcttgagctcctgacctcaagccatctgtccaccttgagatcgcaaagtgctgggattacaggcgtgagccaccgcagccagcctgtaataatttttaaatgtaaaatttatcctattgctgtgtacatattttcttgtatccctcctcaacattccaggggtttaaggtttatacataattttgtgggtttcttgcactgtgattagttgtgatgagattttttttacctctatcacaaccatttgtggtctatgaggaaacttctggttcttgctttttatgaaagaaaatgcaaagagaacaggggtagaatatcatctttaaaattctgtcttggaatttagctttaggtttctctgcttaggcagactgatatagatcataacccccacatgccagcaactaataaagctttttgaaagcagaataaatagcctatatttaaatttctgtaccagtaggaagatgcatagagtattaggataacgatgctggaggtgttctgccgtaacggaaacacagaaaggcagccgctgaaagggcatgtgtgggtaattagttctcactatggttagactcctgaagtgagtggtccaagttgttagcgtgcttctgctctgtgaggccaggccagtatcctgtctgcatggctgaagacgaatcactggtatgtacatgttctagcttgggggaagaggagagaaaaaccaggaagtctaggcaagcaatttccctttatttaagcaaggaagctgcagctgaacattgtgctaatgttctgttggtaagaattgggttacctgtggacatctagctatgagagagcctgagaaacagtctctagcagggcgctcatgtgtgcagaaaaaaaaaaaacagatttggggactacaacaagcagtcttccatatctcagagggtcgtgtcaatttgtctaccaaaagaagtgcagagtgtactaagaatttatcttgaatagaatgattttaagtaaaatgggttttcttactgtgttttgcttactttgaaagttacttttaaaaactatgaaataaaaaggaaacatctgcatttagagaaaatatgtaacattctgagcacttacacttccttttactctaaatttctctccagatatacactcaataacagaaaccttggccgaattgtcacaatagcagagccattcaacactgaactgcaactgtggcaggtatgaagataaattcctctgcatttgtccaagaaggagcagaatgaaacttttttaaaaaaaattttactttaagttctggaatacatgtgcagaatgtgcaggtttgttacgtaggtatacacgtgccatggtggtttgctgcacctatcaacccgccatctaggttttaagccccgcatgtgttaggtatttgtcctaatgctctccctcccctttctccccaccccctgacaggccctggtgtgtgatgttcccctccctgtgtccatgtgttctcattgttcagctcccacttatgagagagaacatgcggtgtttggttttctgttcctgtattagtttgctgagaatgatggtttccagcttcatccatgtccctgcaaaggacatgaacttattctttttatggctgcctagtattccatggtgtatatgtgccacattttctttatccagtccatcattgatgggcatttaggttggttccaagtctttgatattgtaaacagtgctgcaataaacctacatgtgcatgtgtctttatagtagaatgatttataatcctttgggtatatacccagtaacgggatagaatgaaactattttttcaaatagaaatgatattttctcaattcaaatcacagaagacaatgagaaagaaaattctttttggttttgtatttttaaattgtatatatttaaggtgtaaaacatgtctttatttatcttgataagtatacacagtgaattgagaaataattcttgtatctaataaaatgtacacctattttttttctaaacataaaacaattcaaagagcctctaagaaagtttaaaagctgcaaaagttgaggtggcggggggctgagaaggccacaccagacagttcagctcatgaaatcatgggcagaaagtctcgcctctcctgtaaatgtaactctggaacaagttggtcaagatttgattccattcagaattcatagttttgcaatttcaaaactaatctcaaatctttccggtttcaaatatctcaagtccaaaggaggagaaatgtctattaatgttgaacaggtagagattgtatgaagtttcaatatctgtgtgttagatattgaatgctaagagttttctgtatgttaaaaagccaaattattcttatttttatagcaaataatcctagtatggttgagtttggggtagggctttggaggtcagagggagtacagcactaattttaagaaagatttgttttatgagtccttaataagtgaactgaaagtacattaaaatactccagactcctggagtgaaaggctaaggaaaaccatcactccataggtgagattttccagggaacaccttggggaattcagagaaaatagagaaagcagcagaaacagaaatgggcatgctagcgactgacatgctgccatccttctccaaaatgtcagagcctattttggcttgacatgctgtggggatccaaaagccatgggtaactattgctaatctgagagatgggttcagtctgaatgatgcgccagaggtgtagctcaacgttgtgcagtgatactgaatttctaggtaagaagaaagcaaatccagtttgtgaatgaaattcttgaagactaatttggctataaatgacaatcctaattactcccctctcttttctagatggagagcttttttgcaaaatatccacaagctggagcaggagaaaaacctagggaacaagtgctggaaacagtgaaaaacaatatagagtggctaaaacaacatagaaacaccatcagagaatggttttttaatttacttgagagtggttaatgtattcaaatgttagagtttaattttgtgaatctattgtttctcctctgaagcatttggtggcctaatttacaagcacgatggagagagccttataaacagataatgcttttactaagcactgtgtttatatgtcttgcaaagcctttaaattgttcctctttgtttatgaagaaagatactaatagagtacttaatatactcagggattccttctaagtgtacttcataagatattctttacaaactgaagataatgaaatagttattttaatacctttaaatatcattctttgtatcttaaatctgtgaagtagaacaatttggtcttagctttacattttcagtaccaaagaaacaccacttaatcttctctcttgattgatttttaaagtttaaataccagtacttgagggaccaatattaccatcttaatctttattttattattcagaattatacagacctaatatcattttattcacatatgtcttactactttaaatcctaccaaagtaacctgggcttaagttttacttgaggatcatatgaattagccaaaagaatggctgactgttgcctttgctcttataaaatcaataagagaactctcctctttttttaaaaataaatctaaatgattatcttgaaaaagtattgttttccagtgtcacttgactcttgaataaaaataactgcagtgttccccaaataatttaacacattgcaaatatgattcaagaatctggcctttttcatgcttggtactctcttctcttgctccattccttacaaagctccttcaaatatgctatgaaattagagggaacatagtgcttaactctgctccatggattttagaggaaaaaagctaaataattggaaactgttcaggaaagagagaaggcagattatttcttaaaactaaatggaattagaatttagctttgacctcacctagcaatctaagtgtgaaaatggggagacctgtgggcatccccagcatgactctgcatatctgagcatatatctccttatagatcaattttatgtataaacccttagatcctaatccatacagaatagcactgatcaaatttaaatgcatgacttgattaaagacatcaatttcatagaagctggtggcaagaatatgtttaatatggcacttgatacctcctagatccataatgtaagtccaataggcagaaaagatggtaagttactatgtttcaatctgctatatctagaaaatctaaatttatttggaactttcaaaaatgtaaggtaatttagaatcggcttgatgagaattgaagcatatggaaacaaaaccttagctttaactttatttatacaataatgtgccctaatcatgtactctgaaactttataaactttcctgttgctgtttcttaattatcacttctcaatccgtacagccaaactagtaaattcaaatgtagactgggttgtgggtggcagatatagaagaagaaatttccagaccaaaaaatattaaatattattttaaattatttcagaagcaaaaacatattaacatcataacttaccagaaaaaccccactatcctcataagattaacttaaaattctgaccacaatcagaaccagcacttgaagtctatgtattgtttcaagtaggacatattatgaggtgagatggtttatccttctgttttatgaaattaatacattttaaaagaaaaatgttagtttaagggggtggtaaataaaacagatttcaacttgcctacaagacattctatttcatgccttttccttttgttgttctatttcattctattttaagcattaaaactgagaacaaattgtttacttcttttcactccacacgcgaaagagttgtatgtactttgtcagaataagtcttctagaccatcaggtccttctcaaacaacacctgttttttaaaaggctgatgcctaatagatagatctatgccaagcacagtttattactttgcttgcttggttttgcacagtattcacaggggacaaaaaatttaatatgatgtttccaaaattaagccacagtaaatttaaataattaattttaattgaaaaaaagtaaccatttaatttcaagaattaactggaaaatatgggaagcaaggtcatgtagcaaaaagcaaggccagtattactgcctcccctctaggcagcccactcctgtattccagatcattgctatgtacccacataattataaattaggagtttaaataataaaacatagacgtaaaactgacaggcaagggaggtttgggaaacaggggtgagatgtatacctgggttgaaggtaatgatactcctacagcttaccctccaagttggtgaagtgttagtccaaaagtagaaacaacagagtaggggcaaaaatctagaacaataattctcaaagggaattgggggatgagaaggaagtagaaaagaggggattcaaattaccagtggtgctttctaaaacacggttaggtaatcatcatcatcagactttcctttttttttcaagcatttttataaacactagcactccacataacattaatttttacaaaacccccttaaagtagatactgttattgttcttattttagagtggataaattgagatggagaagttatagaacttgcacaaggctacaaaagttgtatttggcaccagccagtatttgaacccaggcagtttatcactctaatctacattttaatctgtattagagtaaaaatatgcttttgaaatcagagtgacctgggttggaatatcaactacttggtagttgagtgcttttaacctctccattgttgtttcatctataaagtaaggatcaaaatagtagctacctcaatggtagttgtgaggattaaatacaaaaatgcatgtaaaggacatacgtataggaaataacaatcactcaataagtgttagctcttattattgttactattatatctccccatccctacttaagacactagtttgaagaataaaataaactttggttcaggaataaccaaacctaagcaactgaaggcactaagggtaggctatgtgttagcctgtgttattgttcataaatagtaattgccctggtctggaagaggattctatatcctaccccattgtagtctagcatggtatgtgacttgctttggccagtgaaacagagtgaaaatgatgtatgtcaattttaggcagaaacgtccagagccagcacttggtttgccatgttctccgtgtttcttctgctcctagatgcagcagtattccagatagaggccgcactatgagcctgaattccaggataaaaacaacatggaatagaacttagccagcacagagtacacatgtgctgtaaatgagaaatacccctttgttattgtaaatcactgagattttgaggctgtctgttactgcagcataatctagcctaatataaacaccaaactaatatactcctctaccatagtaatttatttcttgttctttctcctcctccttcctctacttcagggtttagcgaccttttgcctgcctgtttttgtaaggcctgaaagctaaacatagttttacatttttagatggttgaaaaaatcaaaaggagaataatagttcatgatgtaaaaattatataaaatttaaataaatgtcggcatccttaaataaagttttattggaacacagcacatacattcatttatgtatggattatggctgcttttcctgctacaacagcagtgctgagtaattgcaatagattttatggcccacaaagactaaaatattcaccatctggcccattacagaaagtttggtgacccctgctagatatcatctttactccttccctccttttgcattcaattcttttttttttttgatagaatcttgctctgtcgcccaggctggagtgcagtggaaagatcatggctcaccacagtcttgatctcctgggcctaagtgaccctcctgcctcaacctcccaagtagctgagaccacaggcatgtgccaccaccccaggctaattttttgtagagacagcatctcactatgttgcccacgctggtttcaaactcctgacctcaagcagtcctcctgcttcagcctcctaaagttcttttttcttcttcttctgcactctaacccagagtttctcaacctcatcacaattcacttttggggcctgacaattttttttttttttagacggagtctcgctctgtagcccaggctggagtgcagtggcacgatctccgctcactgcaagctccgcctcccgggttcacgccattctcctgcctcagcctcctgagtagctgggactacaggcgcccgccaccaagcccggctaattttttttgtacttttagcagagacggagttttaccgtgttagccaggatggtcttgatctcctgacctcgtgatccacccgccttggcctcccaaagtactgggattacaggcgtgagccaccgtgcccggccgggcctgacaattttttagggctattctgcacacggtaaaatgtttagcaccatccttgatctttattctctagttgccagtaacacttcctccaaccaaaaatgtctttacacatcattgccaaatgtcctctgggtggccaaatagcttcaattaagaatcaccgcctgaccctaaacttgtgaatagaagctgcaggcattatttaagcacccaaaatggtaagagaatgctgctgacttaacgtagtcctacctaaggttacagaaatcaagagaccaaaaatgcctggggaaaggagcaatactagagagaatgctagcctaagtcagggttttccagagaaatagaaccaataggagctatatctatatataatttatatgtgtaaatggaaatttattttatttacatataaaagaagatatataagacttaaaaaagaattttattacgaggaattggttcatgtgatcatggagactgagaagtcccacagtctgccatctgcaagctggagatcccagaaagccagtggtgaaattcagcctaagtctgaaggcctcagaaccagagaagccgatggtgtaaatcccatttacaaaggcaggaaaagatgagatgagctctccgaagtcaagcagttagacagaaaaaaagaggggcagggatgggcaaattcctccttcctccatcttctgttctattttggcccccaaaagattggatgttggatggtgcccacctatattggtgagtacaatctactttcatgagtcccctgactcaaatgctgatctcatcgggaaacttccttacagatacacccagatataatgtttaatatgggcactctgtggcccagtcaagttgacatatgaaactagtcattacaactgaataaagtactcattcattcaaataactaatatttataaattttctgttatataataaaccctattttaggtactggttgtcctacattagtgagtggatttagaaaacaattggaaagagaaactaagttaagagagtaatgggataggatgagacaaatggagcaagaagaatgactaacttcagcagttgacaatatgttggcctgatattccactagagagcccttaaatattaacctttgccatgtacataaataaaatgtcgatgacttgttaatggcaatttagattgtaaatggcaatttagatgtaaagatctgctagatattgtctgctggcactgggccaccaattctccctccttctatatcctgtcttccttaactgcagggctgggatgctaaagactgcactccccaggcttccacatgatttcagttccgctgatgatgcgcagtcgtatgagattcggaaggaaatgagagaagaggctattcttcttcccatgacagtgcagggggaaacaatgttgagggtagacatgaattggcagcctctgaactctatgtccctgtctatttactaaaactctgcggtgcagggaggctcagatatattctcataatgtcctcatttctgggtgatcttagcagtttttaacgtctggatcagaaaggtggagatatgccacctttaaaccaaaaggctggcatgtaccctctaatttctatccctcaaggccttttaatggcatgaaattgcctaatctcccgaaataatccatttctgcttggaataccttgagaagttcctgaactggcacctgaattataaaaaatggaactgcagattttattttggtttatattttcatttaactctgtgtttctttcctgcccattgtctttagcatataaaaaactgcaagcagggtcttttgcttggcacagactgatggaatggactgactctcagagagtctacttcagccttgataattttgggagtattagataaatgattacatgtagcatttggaacagattatttcctgtggtaaagggaaaagagctggagcaatgtgtttttcttttctgttaggacacacagacctattcgaatgcaccattgataaaaccatcaagactgatttccctagttcctcaaatgttaaatgtagagttaccaaatgatatagcaattccactcctcagaatgtatccaggaaaagcaaagcctatgtccacacaaaaacaaatacataaatgtttacaaaaggattattcaaataaccaaaaagcagaaatgaaaataattgaaatgtccatcaatgggtgaatggataaaccaaagagggtacagccacaaaatggaatattattcagccataaagaagaacatagtgacacatactttaacaggggtgaaccttgaaaatatgctaaatgaaagaagctattcacaaaaggccacatattatatgattctattcatatgaaatgtcctgaatagccaaatctatagtgacagaaagtagactggtgggtgtcaggggtttggaatatggggagagactgctaaagcttttttttgaggtgataaaaatgttctaaaattagataatggcgatggttgcacaattctgtaaatataccaaaacccactgaactgtatacttaaacagggtaaattttacagtatatgaatatactatatttatctctcaataaaactactgcttaaagacttatttttcctcctgagcacttcactaaaataaatcacagagtggcactggctgaggaagaagtcttatagtccctgcaacagatagtgataattttccttttgtcaaggtgctaatgaagtttgtctccttcaaattacttctttcagatttaagaatttgcatcattaattctgaaaaatctttatatttttattcaaagataaaacccattcttatattggattcttcatcatcaggactccatgtgatcttggtagaactgaaaatcacagagcttcattttcccctacctctcaccataatatcccatcctccaattgcagtagtaaattcaggagtattcacttgatctgagcagagtaaattaatgtatttattcagggttatggtacataactattagggcagcaaagtttctctttctgcttggattactaatctaggagattcctggagctgttgctggtcattttactgctacatggagagaaactaagcagaaaaaagctgagttaagagaggaaggatacagagaacctgacattatttgggaccctaaatgtatttaatagctacccgtatatagacatcccttagatctttgaaataaatgagcctataaatatcaatgtgtaagctggtttaaatggagcctctcagtttcatacaaataaaaactgtcccctttcacccataaactgagactagcactggggaaagcagctaaactacataaggaaaaaataaaaacaaaatgaagcaggataaaacaaatggcttaaaagatattagtttgttaacttaatcatgtgtcatattaaattatgtatttttaaatgcctagggaaaattttaatttttatgacgagcacaaatttttaaaaagtttatattgtgttacttttctacaagaaggaaaaaggctgtcaactgcaaaggcttattctatattcttgaatcctcagccttttctggaatgcacatacttgtctaattaaaagaacataatctggctggacgcggtggctcacgcctgtaatcccagcactttgggaggccgaggtaggcggatcacgaagtcaggagttcgacaccagcctgaccaacatggtgaaacctcgtctctactaaaaatacaaaaattagccgggcctggtggcatgtgcctgtaatcccagttactcaggaggctgaggcaggagaatcgcttgaacccgggaggcggagattgcagtgagccgagattgcgccactgcgctccagcctggtcaacagagcaaggctctctctcaaaaaatttagtctcaatagttgtttctgatcatctaaaatttcgctcttgtgcccattctactcacactttcatctccactcttccactaacactgtgcttgctgaagtcacctttctaaattcagtagtcagttctcaaggcaattctacagaaagccaaaataataatgtctaagtacagacttaactgataactggctaagtctaaagttatattttagaatatctgacaaattaaatgatctgtattcttcagaaaatctctctaaaatactcagttgaattttggtaagtttcatgaaaacaagtgagtttgagtatacatgttctctattgctactttcacagtcagatgaactgaggaaatgttgacatattcttatgaaagttgagaggtagctatctcaataaaatccactccaaaaatagaaccattgtgcaaagataaggttttcttacatcaataattttgcatgcatatactctaacacagaggcaaaattattaagttccccaaaattacaggatgcagaacatggctccagttgttttagtctataaaatgttttaagaaaatattgccgagcttcctcctcagccatctccccttggagaaaaataataataaaacaactcttgataaagtaacataaaatctataactttaatcaatacatgtttgcaattaacacttcaagataaattgaacatgtattataattgaaaatatctatgtcaaaattataacaatgattatgcctgagtgatagaactggttcttatccaaagagttaaaggcctaagtctaaggatctataaaagctcaaatgaatgtatgcttttagcgagagatttatgcacaacatgattgtgaagagactacatgctctctaatttttcagaaaagttcaaacttgaagtttattaggaataaagttataaaaatttagacacaatgcctggtaaactgaggaggggcttccttaatggagaagaatcaaaatgagtagagagtcacacttccaatagatcatctaagagagaacactggaattcaacagagaagtgatgggaagcacctaaagcaagtaaggagggggaaacaaggcaggctgttcatttgggatcagctgggaggctgaagaggatccttaatgtggggaaagggaaaatgagagacccacagcactacaattccctataattctaggcacaggagagtcccttgactcttgagggctttgagaataacacagggagctgcctgcagactgtaaaagggcattgctccagacagagagctcatgctgggtcccacaaaccactgagtcttaagcagctgcagcacggtaccattttgagagcccagcccccagtagaatgcatcctgtcctggtgctcaatagcctgtgaatctccacatctctggagccccattgacactgccagctcacagtggctaccacctgggctgaggcagtagccacaatcagcaaccctggccaccccagcaaaagagtggttatgcatgttcatgtgttctgaggacaaattccactgtctgcagctgccatcactgtgatatcccccaaccccatcccaagccacctgcctattgctgctccctcttattgccactctgccctccccattaacagggccacagtacagccactgttgcctccacgtgagcattcagccagaggcctgaagattaccctccccctgcctacaagagccatcacctgcacatactacaggggcctgaaggcagtacttcccagcctggatcaatcccctaccttcgtacctgagcacaccatccaagggcctggggattgctcagcctagtccactgcttttgacacctgagcactgctcccagggtctgagtttgggctttctcaacctgctgctatcaacacatctggcacccacccacatgtgccacttgtgggcctggggactgatatgcccagcctgtcacagccaccaccaacaacagagcagacctcttcggcccaagagggttgcctcaccactgctactgatatcacccacaccatgcccactgcccaggggctcaagagcctacccacctgcctggcccactgctgccattcctggtgtctgagcaagccatttggaggcccaataattggcctgccagggcccactgacaccagtgccagtatacaccaccctgaaacccaaagacagacatgttcagcccattgctgccaccactgggacctaaagattggcctacctgacataccactccccaacagaacttgcctccactaataactgcaccctaagccactgagaaaatcacagacactattgaaactgtttatagccaaagaaatcatatagagactacattactgcatgtactcagaaccaaagccaaagtaccctacccgaccaacgccatagatccatcttcaaaaaaaagtccttccctgggaaagcaaattcaaataattggaataagtgactgttacatcaaatgcacaaatattaaagtatggacacagtgaacatgaaaaagcaaaaaaataagacacaccccaaaaataattagctaggaacagatctcagcaaaaaatctcagtgagatacgcgggaatattgaaaaacaattcaggatatgaatgagagatttaccaaagagagatatatcataaaaatgaacctaacagaaattatgaaactgaagaattcatggaatgaaatacaaaatacattccagagctttgacaatagactagatcaagaggaagaaagaatctcacaaactgggggcaggtcttttgaaataatctaatcagaca

SEQ ID NO: 31 - DNA, 4503 bp, Homo sapiens
ggggtaggggtggagatgcgtcgtttataaggggagctgtgacaatcttcttgccagccctcttcctcccactcggctcctcttacggagtcctcattccaccccccttgtttccgcattcatcctgagtggctggtgggaacgtgaaaagggagaggaaaaggcgcaagaagccagagagaggggtgtgggaaaagcgaaaacaggctgccaaatcaggggattccttccaatttaaaaaggaagtctgctgacgttagttagttaaatttaacatctttttatgtgtaacacttgactttggaagcaaaaatgaactttgcggagagagagggctctaagagatactgcattcaaacgaaacatgtggccattctctgtgcggtggtggtgggtgtaggattaatagtgggacttgccgtgggcttgaccagatcgtgtgactccagcggggacggcgggccgggcactgcgccagctccttcccacctgccttcttccacggccagcccctcaggtcctcctgcccaggaccaggacatctgcccggccagtgaggatgagagcggacagtggaaaaactttcgactgccggacttcgtcaacccagtccactacgacctgcacgtgaagcccctgttggaggaggacacctacacgggcaccgtgagcatctccatcaacctgagcgctcccacccggtacctgtggctgcacctccgggagaccaggatcacccggctcccggagctgaagaggccctctggggaccaggtgcaagtccggaggtgtttcgagtacaaaaagcaggagtacgtggtggtcgaggcggaggaagagcttacccccagcagtggagatggcctgtatctcctgaccatggagttcgccggctggctgaacggctccctcgtgggattttatagaaccacctacacggagaacggacgagtcaagagcatagcggccaccgatcatgaaccaacagatgccaggaaatcttttccttgttttgatgagcccaacaaaaaggcaacttatacaatatctatcacccatcccaaagaatacggagcactttcaaatatgccagtggcgaaagaagagtcagtggatgataaatggactcgaacaacttttgagaagtctgtccccatgagcacgtacctggtgtgctttgctgtacatcaatttgactctgtaaagagaatatcaaatagtggaaaacctcttacaatttatgtccagccagagcaaaagcacacagccgaatatgctgcaaacataactaaaagtgtgtttgattattttgaagaatactttgctatgaattattctcttcctaaattagataaaatcgctattccagattttggcactggtgccatggagaactggggactcatcacgtacagagaaacgaacctgctttatgaccctaaggaatcagcctcatcaaaccaacagagggtggccactgtggttgcccatgaacttgtgcatcagtggtttggaaatattgtgaccatggactggtgggaagacttgtggctaaatgaaggatttgcttctttctttgagtttctgggagtaaaccatgcagaaacagactggcaaatgcgtgaccaaatgttacttgaagatgtattacctgttcaagaggatgattctttgatgtcttcgcatccaattattgtgactgtgacaacccctgatgaaataacatctgtttttgatggaatatcctatagcaagggatcttctattttgagaatgcttgaagactggataaaaccagagaattttcaaaaaggatgtcagatgtacttggaaaaataccaattcaagaatgcaaaaacttctgatttttgggcagcactggaagaggcaagtaggctaccagtgaaagaagtaatggacacctggaccagacagatgggttatcctgtgcttaacgtgaacggtgtcaagaacatcacacagaaacgctttttgttggacccaagagctaacccttctcagcccccttcagatcttggttatacatggaatatcccagttaaatggactgaagataatataacaagcagtgtgttatttaataggtcagaaaaagaaggaatcactttgaactcctctaatcctagtggaaatgcttttctcaaaataaacccagatcatattgggttttatcgtgtaaattatgaagtagcaacttgggactcgatagctacagcgctctccttgaaccacaagacattttcttcagcagatcgtgcaagtcttattgatgatgcttttgccttggcaagagctcaacttctagattataaggtggctttgaacttgaccaagtatctcaaaagggaagagaattttttaccatggcagagagtaatttcagctgtaacctacatcattagcatgtttgaagatgataaagagctatatcctatgattgaggaatacttccaaggtcaagtgaagcctattgcagattctctgggatggaatgatgctggagaccatgtcacaaagttactccgttcctccgtgttagggtttgcgtgcaagatgggagacagagaagccttgaacaatgcttcctcgttatttgagcagtggctaaatgggactgtaagccttcccgtaaatctcaggcttctggtgtatcggtatgggatgcagaactctggcaatgagatttcatggaactacactcttgagcaataccagaaaacttcattagctcaagaaaaagaaaaactgctgtatggattagcatcagtgaagaacgttactcttttgtcaaggtatttggatttgctcaaggacacgaaccttattaaaactcaggatgtgtttacagtcattcgatatatctcatataacagctatgggaagaacatggcctggaattggatacaactcaactgggactatctagtcaacagatatacactcaataacagaaaccttggccgaattgtcacaatagcagagccattcaacactgaactgcaactgtggcagatggagagcttttttgcaaaatatccacaagctggagcaggagaaaaacctagggaacaagtgctggaaacagtgaaaaacaatatagagtggctaaaacaacatagaaacaccatcagagaatggttttttaatttacttgagagtggttaatgtattcaaatgttagagtttaattttgtgaatctattgtttctcctctgaagcatttggtggcctaatttacaagcacgatggagagagccttataaacagataatgcttttactaagcactgtgtttatatgtcttgcaaagcctttaaattgttcctctttgtttatgaagaaagatactaatagagtacttaatatactcagggattccttctaagtgtacttcataagatattctttacaaactgaagataatgaaatagttattttaatacctttaaatatcattctttgtatcttaaatctgtgaagtagaacaatttggtcttagctttacattttcagtaccaaagaaacaccacttaatcttctctcttgattgatttttaaagtttaaataccagtacttgagggaccaatattaccatcttaatctttattttattattcagaattatacagacctaatatcattttattcacatatgtcttactactttaaatcctaccaaagtaacctgggcttaagttttacttgaggatcatatgaattagccaaaagaatggctgactgttgcctttgctcttataaaatcaataagagaactctcctctttttttaaaaataaatctaaatgattatcttgaaaaagtattgttttccagtgtcacttgactcttgaataaaaataactgcagtgttccccaaataatttaacacattgcaaatatgattcaagaatctggcctttttcatgcttggtactctcttctcttgctccattccttacaaagctccttcaaatatgctatgaaattagagggaacatagtgcttaactctgctccatggattttagaggaaaaaagctaaataattggaaactgttcaggaaagagagaaggcagattatttcttaaaactaaatggaattagaatttagctttgacctcacctagcaatctaagtgtgaaaatggggagacctgtgggcatccccagcatgactctgcatatctgagcatatatctccttatagatcaattttatgtataaacccttagatcctaatccatacagaatagcactgatcaaatttaaatgcatgacttgattaaagacatcaatttcatagaagctggtggcaagaatatgtttaatatggcacttgatacctcctagatccataatgtaagtccaataggcagaaaagatggtaagttactatgtttcaatctgctatatctagaaaatctaaatttatttggaactttcaaaaatgtaaggtaatttagaatcggcttgatgagaattga

SEQ ID NO: 32 - protein, 947 aa, Homo sapiens
MNFAEREGSKRYCIQTKHVAILCAVVVGVGLIVGLAVGLTRSCDSSGDGGPGTAPAPSHLPSSTDSGPPAQDQDICPASEDESGQWKNFRLPDFVNPVHYDLHVKPLLEEDTYTGTVSISINLSAPTRYLWLHLRETRITRLPELKRPSGDQVQVRRCFEYKKQEYVVVEAEEELTPSSGDGLLTMEFAGWLNGSLVGFYRTTYTENGRVKSIAATDHEPTDARKSFPCFDEPNKKATYTISITHPKEYGALSNMPVAKEESVDDKWTRTTFEKSVPMSTYLVCFAVHQFDSVKRISNSGKPLTIYVQPEQKHTAEYAANITKSVFDYFEEYFAMNYSLPKLDKIAIPDFGTGAMENWGLIYETNLLYDPKESASSNQQRVATVVAHELVHQWFGNIVTMDWWEDLWLNEGFASFFEFLGVNHAETDWQMRDQMLLEDVLPVQEDDSLMSSHPIIVTVTTPDEITSVFDGISYSKGSSILRMLEDWIKPENFQKGCQMYLEKYQFKNAKTSDFWAALEEASRLPVKEVMDTWTRQMGYPVLNVNGVKNITQKRFLLDPRANPSQPPSDLGYTWNIPVKWTEDNITSSVLFNRSEKEGITLNSSNPSGNAFLKINPDHIGFYRVNYEVATWDSIATALSLNHKTFSSADRASLIDDAFARAQLLDYKVNLTKYLKREENFLPWQRVISAVTYIISMFEDDKELYPMIEEYFQGQVKPIADSLGWNDAGDHVTKLLRSSVLGFACKMGDREALNNASSLFEQWLNGTVSLPVNLRLLVYRYGMQNSGNEISWNYTLEQYQKTSLAQEKEKLLYGLASVKNVTLLSRYLDLLKDTNLIKTQDVFTVIRYISYNSYGKNMAWNWIQLNWDYLVNRYTLNNRNLGRIVTIAEPFNTELQLWQMESFFAKYPQAGAGEKPREQVLETVKNNIEWLKQHRNTIREWFFNLLESG

SEQ ID NO: 33 - DNA, 67093 bp, Mus musculus
  misc_feature (1)...(67093): n = A,T,C or G
gcagagtctcaggaccatttaacttccatttagcctgggtggctccagaagtgacaggtcctaaaatgcctgggagcgcccagctctccctggagacaccccttccactgccagagctcctctctgagtctggaaggctactggagaggccctagtaatgaagactttcctattcttctgtgtagcactaccagcaagatggcttcccagagacggaacttcgaaagtttatagcggaatgcaaagacctccccaactccggaaaatacagattagaagatgaccctccgggttctttactctgctgctgcaaaaagtaactgttgggcttctctgtgcttgggaggaaaatacagtgtgtggctgagccagagattatttgtgatcacgcaacagtatatgtccagatactagtattctgagttaacaaacagctatgacttagcaggacctgttcatagtttttgaaactatttaatatcttttctgcttacattagcatttttaaaatgactgatttgatgagggaagctaatgggtcttagtcgctgtaggtcttgggtatgttctctttaccacacagcaagccttgtgcctgcactggaaataagctttcgcttctcagaaactttggatgacccagttcccctctctgagagttgggataattattacacatcagacaccatggagtctctccttaaatgaagacagaacaatagagagccccatcacagctgtgtgtgggatgcttggctctgaaggacagtctttgattctcctattcatttagaagctttctgcccttcagtgttaaggtacaagattggaagagagtctatacacggatgaagtccaaatgcacaccaaggaggcatttgattaaacagtgatggctttattagcatccaagcagcattgggggaattggtgatacaatgtgtgttccatgggcctgtgcagtctcaggaaacccatttggggtcaggatttgtggctctgtggtttgaagttctagaacccatgttcaaaattttaaaatgaatatatgtagcttgaaaaggcacagaattaggctctacattttgtagttctctaatgggaaattatggggatttttttgtggtataacatttattttgtgtactatttatccatgtggcatcaattcaattatgtataataatgactttacaagggctcctttaaaaacacaataaaaattttaactctttagtgttgcattagggacataataaagatacctgcttattttgtaatttattaggatacaacataaattttaaaactgtgttgattatctgagaagtccttaatgttattctttttgcgatgttttaagactaataattgtatttcattggaaacacaaaaccactgatccagggctgggcctggagttgcttccctgtgcatgcagagaagagaaagctagctatagactaacaggattggagagctctgggtttaatggagagaacctgcctcaataaattaagtggagagcaattgtggaagactcttgacatcaactgctggcctctacacatgtgtgcacatgcatacacacatgtacacatgccagatatatatctcagaaactgaaaaaaaaatgttaggagaagttaaaagttctgtggagtcaatactaggacatccagggatacacaaagtgactctgttgccaagcaaacagactaaaggaaaagaagcagggtagtgcataaaggctgatctatggggtggggtggactataaggttagatgtgtctgttagaagagaggaaatgtctaaatttcattatccaaatatcttctgggaaattagagaagcatgagaacatggaaaactctggtaagaaaaaaaccaaatcagagagtcaaacaagaaagagtaagtcaatagaaagtcaaccaactcccaaatatagttttgttttaaagatcagtaaagtaaataagccactaactaaggaaagcaatgcagacacaggtattcagaattgacggaaggatctcaatggattccatgcatcgaacactcaagtacccttcagtttgacaaactgcacagctcgacaaactacacagcatggatcaattcttccatgttttgggtgggttccctaaaagttctcctgttagagactgaattcgtcagtgttaccacagttgggtgctggacgtctcatgagaggtgttggggtcacaggcgttgagcccccaggaacagactgatttttctcatggcatgggtgagtgtcctgatttctctcacgagcccccaccagaagctaataataatttatccgaggcaaaacaaatgcttctcctttatgagttactcagcctcaggcattctgtcatagcaactggaaatgagggaagaacaagtagtagactgttgctatggcaacacttgactatgttgaaaccgcagtccaacccactgtaggcccagactgcatcggttttgaagcaagtgttgggaaaggagctggttgtgagagttactcagggtaattctgctgagagctcaggaaaacacggagctaaggacggtatgggagcaaaatggttgaggctgtcacaccaacagaactgtgggaaatgaaggccgaggtgagaaggttgtgtgtagaaatgagaatgtcttccagggaaacagagtgaaagtcgtcctattacatcgatacaagcacagaggccatgtaagctctttctgtctgtaactgaaattagaccaatgtatgccgcagagctcctcagatactcccagtcactcttaaccacttggggaatgtaacagagaagggagagctaaccctggaagtcacaggtaagaaggaaacatggcactgaaaatgggagaattagtagccttttttaactcatggaagagttaaaaaagcatggtcaacagatatcaccaagtatatggctaagctgatgcttgtaaggcaggtctcactcaccagaacaatggagaaaggccccgatgctatttcagaaatcttagagtctgtctgcctctctcatcaaagtccagaatcctagagagggaggaggggctccaggactggctggggtatcttttggggccttatcactctggtggcccaaggattctgctccctgcatcccactgtgggctctgctcagcctcaaccagctgtgcctcgggtgtatccaggtgtgcctctgttccaatccaaagcatccaatcagtaagcctgggctgcatgctgggtcttaagtgggtccagccaccgccggtcactgctgtatctgccgcagcaaacggcacattagacaaatgctggcactgcccactcggcaggtgagtggaatgcaggggctatgaaggtgtggagccccccacttaaacttcagaaggactatctgggagctgcatggggacctgccagcacaggagatggcaaaccctgcaacaggtccttgtctgggagttgggctgggggctgcagttgtgattcctaccatgacaagctacttacagtgctgtgaagacaactctgctccacagagagcagccatgttaattgagccccaacaaactgtgtgagtggagctgcctggagtcttgggggcccactctctaccctgtacttggagtgaaagatgattctcgaggtttaagatgtcatgtctaatctgttgggtgcccgttcatcatcttattctgtggtccactcttctcattgggaacgagagtgtcttctctaaggctgtcctgctttttcctcccagaggcgatgacttctcttgattttacagcttcatgtttgacaggcatttgtcttgatgtcttgtctcagatgacacaagggactttgaagctgattctggagccagttgagacttggaggttattgggacaaatatattccataacgagaagtccatgactggggaagggtataggggagaggctgtttgagtgtgtctccccaagatccatgtgctgggagccttggcctgtgagcgacgtttgggccctggggatggagggaggctttgtgagtggataaatgtcccctgttccttttcctttgtgtatgtcccccctttcccttctgttttctcacatgctaaagtgttcacttaaagccaaacagatgctggtagcagtcgtctggactttcaaaacctgagccaaatgtaattctttcctttatgaattacccagtgataggcattcctgttagagcaacagaagatgaacatacaagacatacaaagaataaattcacacaagggattttagttagtttgacatttcttttctttctttctttctttctttctttctttctttctttctttctctttctttttttttttttgcttgcttgcttccttccttctcttgcttcttatcttctttccttttcttcctttctttcctttttttttcttttttcttttttttttttgagagagagtttagctatataggcctgttgcctggaacttgatctgtgactagcctggcctcaaactcacagagctctgcctgcctctgcctagcaaatgctgggttaaaggtctgtgtcagcacagctacaaaaggatttgagagtttgagtaaggccatatttattacgtagattgaatcagcaacaatcttttaaaaaaagaagtgtgtgctctgcaaaaggcgccaacaggagaataagacaagtaggagaaaatacttggaaaaaaaacaagctaatgaaagcaaatataatatacacataactcaaaattcaacagtaaggaaacaaactgctcttttaaagtggatacagtaactggagaaagtgccttactaaggatgacatacaaatggcaatgatatgaggcagatgctcaacatcacatgtcaccagggaactgcaaatgaaatcaactcctgcacaccactgtcacagtcagatttcaaaacaccgaaaatcccaaatggtggtgagggcatgaagtgaaatgatcttgtttattactgaggagaattcaaaacggactgtaggtggtgccttacaagctatatttgcatatattagtagttagtcctagcgcttctcagcacttatccaaaggatttggacacatgcccacattaaacgacaaacaaaaatagtggtcacacagatgcttaaaggagccctcttcaaaatttacaagtgcaagcaaccaaggtgctcttggagtgagtggatcaatgcctgtggtatgtccattcaagaggacattatcagcgctaaaaggtagtgagttagcaggttatgaagggacatggaagaagcttaattgggtaccgtgaagcaaaagaagtcactgtgaagatgctacacacggtagcatttcaactgtatggtgttctggaaaaggtaaaagcagagacaaaagaaaaacctgcaattcctaaaggctacagtaggtggggaggtcgtggaaggcacacagagggctatcaggccgaatgttcagtcagttccagctgctataacacagtagtaatgattcagtattttaaaccaagcagtaaatggttatttttcacagttctgggagatagaaggttctcaaagttgaggcactggcagtgaagctgccaggtgccaagtgagagcgtgcgttccgttttgcagttcagcgggtgcagttcagacgggtgaccctgatgtggaggaggtggagaacgtgcgggaatcctccgcgctttctgatcaatttcactgtgaacctgtgtctgctctaagaaacaaaatctattttaagaacttaaaataacaacatttccataagccgagaaacagaaccactcccatttccctcttgtctgtacctgttttcacatcacacatcagttgtaacagaggcagtgccatctatcaagcctaaagcaacagagcgatccacaaagcctaaagcactgcccttctcctaacacaaagatcaccaagcccagagttaaaggctacttttgctgagctggattgctttctgcagaaaagctgagtcatccttccctcctaccatgagtgaagttgaagcacagcagaatttgatacagcagataaaaccgagctgctgtgaaggagacagaacacccgtggctttcaagagaaaacttctttccagagatcagagatgctcaggtcacggagattggtattgggttgattttccaccatcaaagggaagacgtagaccaaggaagacttagttcagagattacagtgtttaaaaacaacaaaagattaatatatagaaagttcaaagcttacttatttcatatcatcaaaaaatcagaaggacatgaagccacacaaataaaaagctcatttccctgttattttactgtgttctgtctacacagtgacttcccaatagagactactctggactgcctattataaaattgttgcaggtctactactatcttggcttacattttccagatgacttaaaagaaaaaaaaatcccctttaacatggtaaattcatgaaactgtcgtaagaaggaaacctgcaagagaaatccatgactgtgattggcaaacctgaaatgtctgatgcacagtacagggttgaacaaaacactcttgtgtcgttggaaagctaagacacaagccttgaagcacacacaggtgggtagagcaaaagcttgtgattgaaacacccaacacacagaacaaagcaatgtctagtgctacccagtgacacatgaacctggatcctcactggaaacaagagactctagtgaactaacctctgagtgttttaacagggtgccaggaaaccgtaattcatgtctcccggtgtgcgcgatagcccaaactttcagccgtctgattccaacgattgtccatcttttttttttcctcacctcttctctatccacagctccttcctacatttaggtggtcgttttggggccctttctactttaagggcagcatatgtggcgcctgcgtgagaagcgttttcctgggggatgggggatggggacggaaggaggcgcactgtactgcctggtctcagcgaggcagcttgggagccagtgggtgcccatgaggattgatacccaagaccctcctttaggaagcttctcctctatgctactctctgagaatttacagggctggagagatggttaagtcctgttcccatcgtccacattagaaggactcaagactccctgcaactcttgatccaggggatccaacatcccctcctggtccatccagacacctgcactcaggtatacattctcacacatagacacaccggcattatacatgtaactaaaaataaaataaagcccccttaaaaaaaagattttgctttctggttatatatctacatttacttttattaaaatttgagactgtgtggtgttgtgcaggtcagactggcctgtacttacgttgtgatccaagctcttctccaactcactgcgatccccctgactcagcctccaaaatgccaggaccatagtgcaccacacccaagcttattttaaatagatctcaaatatacttatttgagatacaagtttcattagtaacagctatttagataaatgtatctttaaattttatttagagtttttaattaaaatataataacattacttttccctttcttgttgcttctccaacccctcctgtgtctctctcactccctctcaagtaggtgaccttttgattattatatatcttgttgagtacactttagtatggcttttgtatataggatttcagggctgaccacttgacattggatattggatacatctgcactgactgctcaggggatgccttggaagaggggacagaatgctaaacatcagttatgagacccccatctcctagaaatgacagggacctcatacctagataaatgtatcttttacaactacctaggaaaagacatattttctccaccggtgagactgtttctagattgtcacaggtgggaatctgtttagagaaacatttgccaatgaagaaagttactggacaccagcaactgtttaatgacctgtcttgtcagtgggtagatatagtaagaagaaaggttttggagtgtcagagacctaaatagaaagagttcgtctgctagtggctgtttatgtgacttgggagtagtaacaaatgtctgtgaacacatacactctctctctctctctctctctctctctctctctctctctctctctcgtgtgtgtgtgtgtgtgtgtgtgtgtgtgtgtgtgtgtgtgtaccccacacataggtatcactcatgacttgcagagaccagaggacttgctggaatggattctctctgtccaccccatgattctggggtcaaacccaggactggctacactggggggagggggcagtgtacagaatcctgagcatgaaggtacggtgggcactgtgacttttcagacagactttctcagactttccatacccagtaagcgtatttcctaaaagaaatttggaaaaacaaaaacaaacaaaactcaagcatttttacccagtagtttttggaaagtgactttttaaaacagagtagatttggaagggtgggggtggggcagaatattcctcaacaccaacagcccttgtgaggtgcagacaggaggaccaggttcaaggccagcgtcagcttcatagcaagttggaggccagtctcagttatatgaggttgtctcaaaaagcaaaaaacaaaacaaaacaaaaaacaaaaaccttacacaaagggtccaaaaggctctgtccagctctttctacataatcctctacaaactgtcctttgccctagctaaacatggggacctttcgaacacttcctaacgcacatagcctggaaacttaggggtttagttagctccactgcatggtgacgacaggagcctctgagccggttctgtccaaaaggccctgctagcttcaggttgggtactgtagccaggttcatagaaaccaattgtcttgaagcccctgctttcaggcaacaagggggaagggcatagaggccgctggggtgggctactctgggctactcaggggtcaagcagactggctgcagaaagctgacttggtggctgaggctggggtcttgctttccacatgcttgccctgtcatcctaactacttgttagggagttatcagaataaagactccttagtgaagaaacccatccccacgaacttattgattccaagagggaggagcatccggtagaactcagtaccaacactttacttgtccaaaatcccagcgttggtagcacgtgcttgttgtaatcttagtactcaggaggctgaggccggaggattgctctggttgccagtgtgggccacatggtgagctcaaaagaaatgcaatgaacttttgaaggagtcagaggtctgggggcgggggtggggtggtggggtggggaatggggcgggagggaggaggtcaggacggccaggggggcggggtgggacggacgggcggcctcatagcaggctttccggacgacttccctttataagggcgtccactccacctgcatctcgcagacacccgtaggcggagccgggtgtggggaccgtggggactgagggaatttggggtcacgtcatgcccggagacgaggagacgctggacctgcctgcgtggaaccgcgtcccggacctgacttggggtccccaccacaggtgggtactcccccagtggaccatgtctggtggtcgtctggattccagcgtcccctcctggaatatctcccgccgagaaggtgtccctgagctcacacgtggaccccattctgcctcgcgtccgggctctccgctacgtagcaaaagtccttcgtgacagcgccctgggtcgcccagcgctgaaggaagtcagcggccgagggtggggacgcggggggcgtggcgggaggacagggccacgcgtagcgaccagggtgcacacagccgcttttccgcaaagtcccggggctgagatcagagcgctgactggaagggtaagaggctttggtcccctaaggctttcatttgggggccactgaacctctgggcggggaatgggtctagctccttcagtcccgggagccctggaaagttctgaaggaggatggctggccctgaaactgacggttttcccaggcaagagacccggagagacagagagggatcagatgttttatgacttttgttttttggtgtgtatgtgtgtgtgtgtgtgtgtgtgtgtgtgtgtgtttctttcctggtgacaggactctgaaaagatcctggtttgctctaccttagagttcttgctaccccgggcaaactaatgctaactgcttgcactcggttaaaaatgaggctgattgtttgccttccggaacaaaccgactttttcttaggtgggagggttgcggtgtggtcaaccctggtttccccagctctatgaaaaggcgttcagtgaagccaggtggctctgccaagcggcctctcctgagtttgaatgtctgcagcagcgcaattgagccggggaggtgaggacaaagtggcctttggctcctgcttgctgctcttaaaacaaatagtggcgggctgttaaagttttctaagggagcagggagcggcctctccttcctagcaggatgttcttgaagccagcaaggaaactgagccatagggaagttagtctatgatggctacctgaatggatgcttttctgcaagggtggcatagacttctcagaccttcaaaagaccggttttgaactataaaaccatgttggtggggctacagaggtgtgttcttttcttttgtttttgtttttttcgagacagggtttctctgtgtagccctggctgtcctggaactcactctgtagaccaggctggcctcgaactcagaaatccccctgtctctgcctcccaagtgctgggattaaaggcgcccggccagaggtgttttcttgcaaactcaaagaacactgttggagccaggtgacagtacttgggacctgtaatcccagtgcacaacaggcaggagacaggaggaccccccccccccaaagttcactagccagccagtcagccctaatttcagagctccaggccagtgagagacactgtctcacaggaggtctgtgttgttcctgaagatgacacccacagttgtccccacatgcacaacacgtgtgcatgcatgtgcacgtacacgaatacacgcgcatccacgaaaagaaaacattggagcaactttgagaacggtgaccagttgtgaacgacccatcaaaatgcctgctgtcatgaaacgtgcaaactatgtctctgaaattagagaaggctttttaaaataggccacatggcacctactcttctgtttttccctgaatgtacgtcctaaacactaaggagcagacaactctggtttatgtgcccgctgtcttttggcttggagaaggctgtattcatggtaggcgagatacataaccttaagagttatttttatttgacttttgtttttcatttggggcttaaatgattttttaatgtgttctgtgtcatctagagtgtgcattgctaaatgacacagacttgcacgtgcacggaaatggcttttggaggcttgtagatgtgacatataccataggcaggtgcacggctgtccagtactggtgggaagagaggactgtggcgttgtaaagtgtggacggaagagaggtgatgcagaggtgggggaaatgcccatgggtgcaaattctgatattttatgtacaaggggccaaggacgcagctctctctggaaatgagcaccaagtttgcactatcaacagctgctcacgttgttcttgatactgtcagccaacagcacacacctggggaggtttgatgggtttcccaagtagagtatgaattctgctaggatttttgctcatcttccaggacacataaatctcaggagacattcaatgcttgaacctttcccctgagacacctttctcgttcagcaaacctttcctacgccaggttctatggccaggatctgtctaaaaacaggcacctcttatgtaaccccctaaatggggactttcacattctcttctcttaaggaggatgtttaaaaaaaaatgtagcagtgctgaagtctgccaacaaagccagaagacttgggacacattttgaacaaaaacggaagtcagggatgaatagatttagagccaagctctctgctcagtggctcccctgtcgatgacacgaaacacaaattaagactgtttttgaagcctagtggaaaaaaaaaatcaccaccaacaaccaggtggcttcttgtggttatcgtttgtgaataaaaacagtcgccaaagaaaaccaatttggccctaagaactaaggtgagccgttctcttcagctggggcttggcgtttaacgtctgaatatcacctctgaagtgggaaagccctgtgtgccccatatggagaaaaagaactttgtttccaaaagttttttcttttaattattatttatttttattttgtgtgtaagtgtgtgtgtgtgtgtgtgtgtgtgtgtgtgtgtgtgtatgctgtgtgtgtaagtgcccatagatgccagatcggggcttcttacccttggagctagagtaccatgtggttgtgagctgtctgaaggggctgccagaccccatccccagggcctgtagaacaacagcaagcaagcacttctaacctcagaaccactgttactgtctcagacactaacaaaagcacaacacagcatggagcactctgttcagcatggagcactctgttcagcatggagcacgtgttaatgagtgtcatttgcttctgcagttatttgcatttcccctctttgcgaggtctctttggaccattctgctgcagaacctctgttctggtttgagtctcatccctgctctttatgctcctagaggagagcctgcattgtagacacagggggtgggggggtctaattcctctcctctcagatggctggcttcacctctctttcaaaagttgctgggcagtggtggcgcacgcctttaatcctagcacttgtgaggcagaagcaggcagatttctgagttcgaggccagcctggtctacagagtgagttccaggacagccagggctacacagagaaaccctgtctcgaaaaagaaacaaacaaacaaaaaagttgcttttatttattctttctttgaactacagatttatgatttcagctaaaatttgatttctgccaggtagtaatttatcaggccaaaagttctagaacattgtcgttgatgtcctaattcttgaagacctgttgtttaaatgatggacatttaaaaggaaattatattgtctattacagctagagagatttgctagagatttgcctgtggcccaccaagagactctggaacacaatattgtgacggcttgttgctaattaaggtgaactaggcatcttgacacttgtaactaatcttgcaagagagctgtctgctggacactggaatcagctacccgttgaaaatttaggaaagagaaggacagtcagtcagggcacaccatcactgcagccagcactcgaggctgctcagctttcagagcctgtagcgctgacaagaggcaacccccccccccccccccgcttcctgtgggccccaggggaccagtgtggcttgctgagaataagcactttggacacatgtggctctacttctgattcccggcagtcttaggcaacagggagggcagggatggcttcataggaagtcagtgacacagctgtcttcagggaaattcctgaaaattcttcgtgctcatcttttgcgagagcactaagggtacctaccgagaagcccttcagtctttttccagggctcttcctgggatcggagtgaccacgtggtttgtctttttcagaaatatactgagaagggacccagagaaccacagttaacttctcttagaagactaggaatccatgtctaatctaatttcacaaggaaattagatcatagtaagaaatggagtgaaaaattggtgggagttctcaggaggcagccaaagtcttcatgtgctggactggctgtctgacactcatccgggcccacgtggccactgctgtgggaaccctgctttgccctttcagacttaccttccctaggtctgtcctctcacccagtacacatgaaatctgggcaaggcagtgcctcgttccctgatatacatcagatgcctttattttaacttgtgataattggttccttgatcatacaaatgctcatagataatggacagatagagttttaattctcacatttctcccaatcgagcgtcccctgtctttgataaacaagggctaggttggatttctgacaacctgactgtacaggatgttagcagctaatgtccatttgcttttcagactctttgcctgtagctgtattgagctgtctttttctcatagttttgcttgtgagcctagcttttaatagctgagccatctctccagtctgcagtctgagctgtctttttcttattaatagtttgggctattagtaacccagtacctcgtgcagaccttctctgagcctgccttttgactctgcttgtgtgtgttagtgtctgcatgtgtgtgggagtgtgtgtgtgtgtgtgtgtgtgtgtgcacatgtgtgtataatcctgctgtgaacatcaggtgtcttcctgagctgctctataatttttacttattgaggcagagtctctcattaaattaatttttaattacaaattaaaaccagttctatttcgtgcgtctggttatccagcttgcccctgatcccctacttctgcttccagagagctgggattaccgatgcttctcatacctgcctgacttttgtgaaattctgggaatatatatatgtgtgtgtatatatgtgtgtatgtatgtatatagtcattctatatatatagtatcattatatatatatgtatatatatatatgaaccatttctctctatagtgtcattctgtatatttagtgtcatatatatatatatatatatatatatatatatatatatatgacactaaatatatgaatcatctatctatctagatggctcatctactgattttatatttttaatgcacttaattttttctctatttttgtatttcatttctggaaggattctttggcccaaagaacaagccacagtggtaataatttattaagttgattccattaaaaaaaaaagcaggacccaatgaatagaataaagaagcactcctaccagcaagtcaggcacctaactacctagaaccttctaatcataatctaagcatgactttattatcctgctcggttcatttaacttttcgactttctagtgttacgtcactagcactactgttgctgtgatttgattttcaaggacaccaactgaggaaaagtttatatagccagagtggttgcctcatgcattgattcatttcatttcttccaagtgatagtcagtgaatacctactgtgtgtcgggtagtctgatgtgtgttgtcagatacagtggagtggggcttgaagaagctctcataggaaaactagttgtgatattgagtccgaggaggttaaaggcatataataaaaaccagaaaggccacatgcactgagcacaagtagcaaagccactctagctgtaatcttggccattagggaggctgagacaggaggagctctacttggagacctgcctggtaacagggtaagtttaaggctagtgtgggctacatagtgagaccctatgtaggaataaaaagtaaaaagacagtttcgattacagcctagagggagagctcttgcttaccgtgtttaaggttcaaggtccagaacccagtcctgcaaggaaaaaacccaaaggccagtctcaaaaaggtggcatgtgagccagggaagggcaagaaggacccagatatgcaaagagctcagatatagcaagtgtaaacccccaggcttgggggaatgttccagggccagagtgactctgtagtgaggaagcagagtggggcgtggggagaagtgagctggagtcttgtgagcaaggccaggaagtggtaggaggtccgtgctagttctgagccgaggagaaagtccaggaggggtttgcagctggaaagtaaacgaaatgcgtgtcatcactttaaaggtgactgagtcctctgaagtgcttccctttagctgagatgtaggaccctgggaagccacccctttcatcgggtgagagagaatggcttggagcagggaggctgcagtaggagcagagctaagctgaggggagacttgccagactgttcccagagtgatgcttctcagcggtatcacctctaactgacaccctggctcctgcttcatacctccaattaggccatgtccagggcctaggctggctctccaatggagccagcaaggaaccacagaactgccaggatgagtgtcacaggtggctgcactgaggaggccagaggcaggtggaggaatacgggcaggttcttctagacacatgggtggaatttccaaaatgacagggtgatggaagctaagggggcgggggagaggtgggggggggaggagagagttaggggagtgagggagaggtgggggaagaagcaagggaaagagagaagtgagaggagaagaggaaggagtcagggggagggagggaagccccactaagtgcagagtgttgaagggcacaggatcagagaagctctctagagtaaaggagaggtaacagaagagccactacatgcatgccctgccatttacaagtcagatagaagaggaacagcaaggagactgaggtagcctggtgtcatgggaaggaagccaaaaactgaaatggtccagaagttgagggaaggactgtgccacctgctgctgcttagccaccaacacagtgcagggggatctgcagggcattcactccgagtttcatggagcaagagagctgggaccagttgtgtggggtctactttatggtggctggcacagcaacgtcaggaaaggaggttttgttttggcccatggttgaggttacagtgcatcatggcggggaagtcaaggcagcaggaatgtgaggaagccagcctcatggtgtcgcagtgaggaaacagagacgaatcctggtgctcagctcacggtctccattttgttccgcctgggccctgagcctggggagcagtgacaccccacatttagagtgagttttcccacctcaatgaactcctcacaggtaggctgagggttctctcctgggttgttctatatcatgtgacctgtggtttcttttcttctccttttgattacacaagagcatgaagtctcctggattcatgcattcggtactttgtccagctttcatgtattttccaatgaagacaatgaacttctgccctctgtccctgatcatgctataggccatcagtttattctatataggccatcagtttaagaaatactaactggatatcaagaaaactacaaactgggaagatgaactttcagaaaaatttcaataatgtatacatttaaacgtttcctgtgtgatagatacttttgaacccaaatgacctttatttttctccaaatatttttttagatattacttttaaatttgcatgaaatttgtttcaaaaagctattggatcttgaacatttattatgtcaactaacattttcttctgtagtttcatcatccaatcaactggtcttacctcactgatgctttcctgtatctgtagcttgcatggcttcgggagggggagctttttccgagagttaaacgtgtctttcttcccactaatccttcccagtattagaaacattgtaacatctggatttgttaagcaaccagtctggaagtttactgtagttcagaccaatcttggtgagtttcactttcgggcttggcttctttttattatcttggttcttcaaaaaccttgttgcttttcctgtctttttttgtggctttgcctgaggtgagtctctctctctctctctctctctctccctctctctctgtatagatatctctctctgtatatatatatatatatgagagagagagagggagagagagagagagagagagagagagagagagagagagagagagagtcctgtgtcttgtagatgcttctgctctacttccctgtaaatgagactacagtgtgcaaaccacaggtggcattttcctgtagattctgggaaatcagattcagttcctgcttataaggcagacactttactaactgagctatagctccctagctccttactaaagggtcctgggataatggaaataccagctacctttcttgaacactgagtagctaaggatgcgaaggaaaggagcagacattgctggatgtcccttgcacctgctgaactacagtgcatgagcctctgacaagttttttttgtttttttttttgagacagggtttcagggtttctctgtgtatccctggctgtcctggaactcactttgtagaccaggctggccttgaactcagaaatccgcctgcctctgcctcccaagtgctgggattaaaggcgtgtgccaccacacccggcttcctgataagtcttaattgtacttctgtcctccacatcttcagtggcctgaactctaaaaggcacaaaaatgtctccagcagaaatcggctctccagatgttcacttgaccaaatgcttcgtattttgactgctctttatgcaaaaataagcttggattcagactttcttacacaatctctctgtctctctctgtctttttctctctctgtctttctggggtgtgtgtgtgtgtgtgtgtgtgtgtgtgtgtgtgtgtatgaaggcttctccatatgtcaggattctaaggatccagaacctcttttcacatttattaaatgaaaagcttattatgaaatataaggatggatcacttagcacttgtcttagtccaagtttcattgctgtgaagagacaccatgaccatggcaactcttataaaggcaaacatttcactggggctggctttcagtttcagagattcaatccattatcatcgtgtcagaaagcaaggcagcatgcaggcagacatggtgctggaggagccaaggcttctacactttgatcctaaggcagccaggaggggactctcttctgcactaggcagagattgaacactaggagacctcaaagcctacctctccaccccactgccactgtgactcacttcctccaacatggccacacctcctaatagtgccacttcctatggttcaagcatattcaaaccactacagagctaaagtgatgttggttgactaaaggtatcactcatacaggcatcttcctggggctctaaagctcctttatgaagatattctcaggttctgggaagatgatagttattgtaactccgtccttccaccttcccagtcaggtgcccttgtagcatcggcctacatattatgaccaagatggggttctccttgctttctacactcctcaccttgaagtcaggacttttgtgcctggaatcatgggtatactggggttcagctcttgctcacctgcttaattacgatgcgttcacaagtctttcctgatggagcttaagtatgtgaccttcaaggaccctactcagccccttgtcctgtcccaagcaccagcccacagagtaagtgctcatttagtcatgaagtccaactaaggggctgcctgtagtaggctcaaggcaaacacatatgtaaattctttcttgagataaagctcggactggcctgagactcactatgtagctcaggttggcctagaagtccttcaaatcctcttatctcagcttgtggaatgctgagatttagatatgagtcacaacacacaaatttatcttgtgaaatgagactcatttggtcgctgatttctcattttaaaaagttatttggtttattcaagtttatcttataggtattttactcatgttgtatggcaagcaaggctactttgtttttcttttcgttttatttttttttatgtgtatgggcgtttgaccctcaagtaattctgtgcaccatatgtgtgtagtgagtgcctgcagaggctaggagaggacattggatgtgatcccctaagggctgaagacaggcagtcgttagcaccatatggatgcttggaattgaacttgtatcctcaggaggagcagtcagtgctcttaaccactgagccggccctccagcctcaacaaggctcttttccaagatgtcctattctgatgtgatgcacgctgtttctgctgcattctaagctctttcgttacttgattaccactggtctgggtatgtttaaagagatgctggtcatagcttacaagttacacgttagattgccccaagttcctggaggctcatctctgtatcccaggacacaaagggcagctctagtttgaaacctccagactcaagcaaccccactctttgaagtaccctagtcacccaagtctgagacccactgtctggtttaccactagcatgtctgggtcttgggtccgactggccagcaagaacaacgctgcaacaggatccttctgcacatgtttattgggagagcttgattgcagaggcgaagagaccccaagcccagaactggtgctacttatataggcctaggagaggcgtgtctcacatccggattggttatgcattctacctcatttgcatgttcctcatctgattggttattctctctcagtacctcacagaacctcattaacatacctcatttgcatgtctcacatctgattggttattctctctcagtacctcacagaacctcattaacatacctcatttgcatgtctcacaactgattggttattctctcagtacctcacagaacctcattatcatgcccgggccaggcagtatcttggcaaaaaactttactgcatatgtacacattggttgtttgcccaaacttatgcatggtggccagcaacagcacatgtggcttcccacatctggggatgggctggcttttccatttcctctttactttggaaataggatatggagtcagtctggtctgcagggtagtcttagcagtggtttatcagcctacttccacagacagaagtgctttgggaagtcctgagccatagtttcttggtcccctttcattaaagcacccccaaagtcccagagtgtttgagtggcagtgcattactctagacatccggcaagactgccccaggagctctctgctgttagatggtctgccaggtcttcacaggcatttccctatccaccttcgagtagcaagtaacattgatttcacgtggggagtgttttctcaacctctttccctcatcttttttttccattcatttttctttctcctcttcccttcctgtcttccttcttcctcctcctctcttcatttttggcaggaggattctagctaacctagaatcttagaagaaaaaaaattaaataatagcaaacttatcaaattagaagcagaaaaccaggacccgcaagacggcttagtaggtaatggcagttgctgtggaggcctggctcaatcccacataaaggtggaggagagagctggcttcgttaaggtgtcctccagcttccacggacaccacgatgtttatgtcccacaccatcatacctttctgagcttcttctaaagttgttaatcaaggcagataacacagattataagatagacaggatgctgtttaaatagactctataaggagatttacaagaataacccccagtcccaaaagcatccgaaggaatctgttacttgaacaattttcctgtgcagagtacgtactcgtttaaaggatataagactccaagacccaagcttgagacggatagcttctgagagggttggaagaaggcatgttggtgacttttttttctggatcctctgactttctggactagctccagcgggaagctccttgccctgtggtggtgagtcccgcctctggaggctcctcccactgtggtggtgagtccagtccctggaagctcctccccctgtggtggtgagtcctgcccctggaggctcctccccctttgagggtgagattccctccaggaacaccacagcccatgcttctcatctatgatctctgatctttgttgactttgtcccaacagtaaccatttatcacactagccccattgtgagcacgctgattacaccactgttcaatctgtacattattctgttatgctgtatgtatagttcagatcagtttgtgctatgcatgttgtatgttatattattattaaaattcttctttttaggttttaggcaatataaaataggagcattaataatttctttactccttgaatgctttgtactcattttggatactgcattaaaaaaggaaaccatgtgtctcaacagttatggtctcagttatttggccacatctcattggttgtctctggccttagggaatcatgtgtccaccaggagtctggagttgacaagcaagttgatcaaaatctggctgggcatgagcagagagctgctgttctaatttcctcaaaccgtttatatcgtcaaagcaaatattttttctttgacaattgcatgcacctatataatgtgtcccaattatacctatgccctgcagctctctcttctggggtcttgtaagcattgatattgattcataaatggaggatttactccttctcagagtcatagaaagagattctctaattcttccatagtttaattccactgccctagatcaaatgccaattatttcaatcccaaagttcctgatagcttcccatcatgtttgcattggtataacacactctcacatagagaaacgctcacgtttccagtcttagcctccctttcacccacacactttctcctaactctttaggaacaggaggcattgtacatcaagatgcagaaaatggcagacaacattttgggttctgctaataggcattttgagtgaactgggtggttaagtgcaaaggcaggcggcaaaggagtggaaagctcttttggatttctagggcttcactggtctgagagttttgtgtctgtggaacaaacagggtgacgtatatgaacaggaggtgcaggtcaggagttctgtgagaagcaggctgttgcggggtattgaaaacctgtcttctctggcagatctgcgatggcgtctctcgattctgaggtgagggaagagtgtctgagggaagacctgaagttctacttcatgagtccctgtgagaagtaccgagccagacgtcagatcccgtggaaactgggcttgcagatattgaagatagtcatggtaaccacacaggtaacgcacaccactactctttcctctgcagtatcctgtacttgcttattagtctgcaagactcataccactgaagttcacgaaactaaaatcaaactgcttccagagggcagagcgcaggttgaagttcaattcagatgatctggttttgataaacagaggctacgtctccataaaaaccagataagagaaggttcacacagaagggagtttctaaattcccccatctctaatccatgtgaggttcacaggtgtcaaaggtgttctcaaaaatccatcagatcttatttaaaatgtttttaaaagtttcgaacacagaaattgctaaattcttcttttattggtagcactgtgcccaaggaagtgctaactactgggctttgtcaagagtgcttgagctttatttacatttggaccttgatataaggtcatactgctgatataaggtcacattaccatggtggaagtggtcattagggctgtcatttagctgctgggctgttgcattgaactcttctgtggcaacttctctgcaggtggttacattggaaacacacatgtctggaaaaaaaccaaacagtaccgacttggggtctttgggtccactggtacactatctactgaaaccatcaatccaaaagtgtgtggatgatttttctggagtgttaatatgaaggatttaaaggacgcctccatctggacacaagagagcttcttcagtaagagcagttgcagctttgctctgagttcgtaagcgagcgagcaggctctttgagttgtgtggcatgctgtgccagcacatccagcgttaagaaaagccacagggctggagagatggcacagagattcagagcactggctgctcctccagagacccaagttcaattcccagcaaccacatggtggctcatagccatatattactccagacctagggaagttgatgctctcttctggattctgtaggtaccaggcatgcatgttgcgtgcagacatacattcaggcaaaacattcatatacactaatggactaaaacaaaataaaaataattttaaaaacaaaaggaaggaaggaaggaaggaaggaaggaaggaaggaaggaaggaagggagggagggaggannnnnnnnnnnnnnnnnnnncgatcagcaacgctctggagcccgtggatacgggaccgtgcgatagtgtcgtgggtaagcgctgctagcacgaagtatgctctagccggcgaaacggcgatttacggagcgggggggggagggtggagggagtgagtgtggcgcggcctacgcccggtagtggggcggtcgcggaggggcgaggtagtcgtgtgcaggatgagtcgtactcaacgcacagacaggacgacggaatgccgcggaccgccgagaacggcgagagagaactgcacatgaggagagcagggggaacagggggagatacaacgagagtcgcgcgacagagctaaccggcagacgttgcggccgggcgggacccgggacagtcagaacagccgccaggctcgtggaggccccggaggccgcgggcaccggacaggtggccgcacgaggcgggccacgcgctcatcggtcggcctcatagcaggctttccgcacgacttccctttataagggcgtccactccacctgcatcttgcagacacccgtagtcggagccgggtgtgggtaccgtgggcactgagggaatttggggtcacgtcatgcccgtagacgagcacacgttgtacctgcctgcgtggaaccgcgtcccggacctgaattgaggtccccaccaagggagggagggaggatgagaaaaagggaaacagtcacttcagaagcactaagaccaggatcaggggcctgtgtggtaaggatgacattttttacacttttgcattcttggttttcaaattttagtcttggtgacctataaattaaggtcctctttattattattcctaaaaggtaaagaaatgatttagttcactacttaccagttttctaacttgcttcagttttgatgatttaatttagttctatcactaaaattgtagctcacataggcataaaaaccaatagtctttaactaaactttctgagtcctgatccgctccatcccattgaccccctcttccaaatgctacctactcaagcttttcctggtctcacagttcttcctctagcgcagtctcttacctctgattcagatttgattgaatttttgttgcagtgcctgtgagcatacacccgtgggcacagtgcctgtgcagaccacagaggacatcagatctcctggagctggcattaaacctggttgagttgcccagtgtgggtgctgtgaaccaaactctggtcctctgcaaaagcagcaagtgttcttagccactgagccctgtttctctccactcctctctccagtttaaaccacaaaggagacgtcatttgcagggcactgagttagagacacactgtaggtaccttatactgctgatagctcacaggttagtgcttgccgctaccagacacaaggaggttttgatgtgtgctagctcagttgattctctctgcaaacatgtgaaatgggttcagctagaatctccctttcatggacaaggaaacttgagaccaaagggttcaataatttccttacagcccttgcattagtgccccggggatctgggatctgaacccggggagactgtactcctgtcctctcctgctgtcttctcctggatataggttctgtcttccaggttcacaggtaggaagactacctatgtcagtgactctgaagagataagaggcatttagtcagggtttcagaacaggaagttttttaggtgtaaaaatacaaaaaaagcagatgctgtgttctgcagcgacttatgatctcagggaagcacctgcagtctctcccgagtttcaatctttccatcacatcgctcacaccaatcagactgcgatcttgcttttcttggacacagcatgttttctcctacattgattttacaatgactgcatttgccagactacatttaacgagtgtgtgtgtgtgtgtgtgtgtgtgtgtgttggttcttgttctcagtaaatcgggagatctagtttagtggcatggggatcatttttcttgctgtcatttcctttttgaaaacaaagtcatctagtcaacaccacctccctcctgctgcacaggcaagcttggttctgtcaaggtctgagtctattatgccatttccccctcaggatcttctctccttagagaagtgttggcagttttagcccattcactggtgatgctgacctgcgtgtaaagaagttgatttgttccagggacaggagggtcgggaaactttcctgttcctcatcccagacagggaggttcctggcagaggtcacaaggccaccatctcagctctgtgttgacggctttaggtttcaacaagaccatggctttaaatatcaaccaagtgtatgcccctctcctgatcagctcctccattccctgcacatacactttgtgatctttctgcttcactgtgagcttgggaggggagcgtcgactttccctgtgtgtagagtctgctggcagcatttggcagagtgtggcaaggagggcgagagaatgaacaggccttcgcgtcaagcagatgtgttcagaccctcagacgctttctaaatgtatatgcctgagtctgtggcctgacttcaggttgtacatgtgtacagtggtgtttcatctgtttgatggtgacagttgggaatccattccctttctgattctttgatgctacgaaaaaaagagggggaaagcccacttcctgttggagttcagtgtaatgggggagttaagtgaagatgcaacacacacacacacacacacacacacacacacacacacacacacacactgcccagtactccctgataaatgactgttcagtgcacgatctcactctcactgtgccccagcatggagaagaaccagtctgcacacaatggctgaagagtttcatccaagggccactgctcaggctgtcgggaggggctggcctcttccacatctcccaaacagccctgtgtgggttccctagtttattattttagctttcaaaaaaccagcctgactttcactgacatcacctgtaggtgccactgacaacatcacatgtcaggagaatttggctttagatggtgtggcttttcagtaccggctggaatagactcaggtattttatctaacgtttttcttagaagctgtgtttctagtaactgctcagttattggtacttgagggatgtgacctggtgacattttaaactttttaggaaggtgtggcttatgtggcacaataaaaagcttcggagctgggtggctgagggagggcaatttcatgaagttattagctgtgtaaagtactagttattagaatccagttaggagctatgcgaagcagagggtgggctctagcggtaacatgataaccagggtggttgtagcagtgggcaagacaatgcaactgaagctgttagcatgagtctcgacctattgcatttgctgaaagcacagtgactagagttttattcattcagtcttttaagaatgaacaaaatatattgccacattcaaccctgaatggatccagtgggttacagaagactggaaccgtgtttactgggtaacgtgtccatgtgaaactgtgagaaccagggttctgactccaaacacctttgtgagtaaaggtagaaaggcagagcagactgcctgtaaccctcctgctatgggaggcagagacaggggtgcctcagatcaaactggcgagctctgggttcacgtgagaaccaaaacgtgcttcatgcagatttaaaacgctccagcccctcctggcctcccctgtcctacccagcacaactccagcattggccaccaccagcccaaccaggcttccctttccaccctcatttgctccagaaggggtcacgctaccagctcacacccaagatccttgaatctatagataaaaaacactcatccatagcttgttactttataacttgacttctaggcacagttgctgggcgcagaatctccctcctggaaaagcatgcccttaccaatttattattcctgtttcttcacttgccctaaacttagtggttagtcccagctagtccctgaccaacacccttggccacccatctgtagcggaggccacaggccccagctctccccaagatcttacatgattgttgcattcttctttctccaaagcatggcacgaaaagcccctctccttcttgcatctgctttttcctcctcagaccaggaagtcccacctgtaccttcaacccagcgactggccccctagccttctctatcgacaaatcaagaaccaattgggaacctcccaatacagactctacttaaatatataaggtggcgaatggtcacaaaaaatgcccagtgttaacctccaggtctccacacacatatgcacatgcattcaaacacacacacacacacacacacacacacacacacacacacacacacacacacagaggaaagcccaaccagacaaaatatgaaaactaaaactgtgagccattgggaagccttctgccagctctgttagtttcagtggctgaactgatttgtacatcgttgtgtggctatagcaaggtgaaagacacaggatgtgacaattgtcagggccacccagtccactctcctgattttatacatgagacacagttcaaggggtcctgatgatttagctgggtgagcacccaagtgaaacactctggagtcttgacttataagacagcttggggaagtgggaatggggtgtgaggtaggcttgctgatgtctgctacacttgcttgtatacgtatgtgcatgggggtggagctttgaatgattgtatgatctgtgtgactgaatacaggggtgaaggcatgtgtgcagccatgtgcgtgtgcgtgtgtgtgtgtgtgcgtgtgcatgtgtgtgtgtgtgtgtgtgtgtgtgtgtgagctttgaatgcaagtacacactctgtgacagagtgtgacatgcattgcaggtatgtgcacatatgcactatgtgtgtgaagggggagcatgcctgtgtgcatgggtgcatgaatgttgtgtgcaggctcctggtttcttttaaagctttggtcctagctgtttttcccatttatggagtctaagagaaaaacttttgctcctgatgaagagagcctttgagtctttaactttgacagtaaatccacaattttgggaagaggatgttgaaacaggatctcattgtataaccaggctggccttgaactcatggaaactcttgtgcctttgtcccctgaatgctggtatatcaggactgattgctatgcctagcagtaagtgatttataagggagcagacatcctgaagggtggaagacatcctggagcaaagtccccagtgtggagtcaactgtcctttctagagtcatttgcttttccctgctcaatgagacagagaagcatgtgacaagtctgtctttccaaagatagccgggagaggttttaaggctgcttcttcagcgcaaggtcctgagcatgtctaaacccagcctttggaatgttttctgagtcctcacatagtcctataccgagaactgctgatgtagcgccatgaggtagttctcttctgtggctcctgtttttgtcatcattgcttttcatgtgtaaattaagggatggatatatttttttttcccctcagatgcttagagtagagaattgatgagtatcagaagtcattttctttccctggtaagtggtaaaagtcacattcctgttttctttcctagcttgttcggtttggcttaagtaaccagttggtggtggctttcaaagaagataacactgttgcttttaagcacttgtttttgaaaggattttctggagttgatgaagatgactacagctgtagcatatacactcaggagaacacctatgagagcatcttttttgctataaagcaggcaagtgttttaaatgacctactttaaacactatatagatatgtgactgtgtcttcttaacaaaccaatacatattattacctcatataaatttcatatagcctgttgaggccttttctattccttcaagtaatattagtagaacttgttcatttaaattgtttccttgggttttaaccctttttagtgtattgatttagaactactactttggggaaattaccttagaacaaagagttaagggattataaaatcaggtttggtgtaggtttgtaaccaaatctgaaagtctgtggtggtctgaaatatgacgtcatagcattaataatcctagcaagtattaaggacatgggatttgatacagtgtaaagttggcagaactgaagaatatatttaggagtagtgtcccccttatcataaattcaataaatatttgggttcctggtatttggtaagtactacacattgatgacgtagcagatgaaatcctggcctgtctagaagggaaagctaggtaaatgaagacaaataagacatataatattgaaggttggttcattaatggaagagaacccaaaacatgctactaagcacagctgagtttcttgctggcagcgttaaggaagaaattcctttgaccatacttagtggtgcctgtggtagggtgggagtcctttcatgaagagggaccttgattaaaattgggtgaagaccatgttttaatagtttaagattggtaaacacagcatgtgaaggccatgggagaagtcacagggtcttggaattgttgtaagactaaaatttttaattgttagcctacttgataaggttttgttttattgagatggggtctcattttgtagccttggctggcctggaacttgctatgtagaccaggccagcctaaaaaaccatagagatccacctgcttttgccttttgagtgctggcattaaagccctgttccaccatgcttagcttctattattattattattattaattattaattattattatttaatattcttgaaactattagtagttgtttgcaacatttctgtaacatagtaaatgtttcttagtgaagtcagagcaatgaagatggagtctagtaaggccctagtagtgaaggcagccagccacagaactgtgttaatgtaagaatgttagtcatgttaacgtgatctgtgacatctgcagtcctcagtgaaccaaggaaggagaggggggggaaattctgatataagaaggatatttgcagttttgaattttcactggattttattgttttaactgacatataattaattgtgttataactattaggtataatatgaggtgatggttaacaaatttcatgagctcacggagggagtctcacttaggaggagctaagtcaccacctcatgggagtggtgacatcttaccacgatttgaattagtgaaccaagttgatagagatggagtccaggaagagagaaataaccgaccagaagtagaatgccctcaggctctgggaagtgcctggaggctggttgggttttacaggaagagccaagggaccacatatgagataaagtctgggagaggagtgagcccttggtttcagctgggaggaagatggcagtgtcctgaaggatattggtgtggtgtagctttctatgaggcggtgtgtccctgtgctgaagaaaatgcctttgtgctgtgtgaagctggacactgctccccaaaagcaccgcataagcaataaaagcgctgaaagcgcattccgtatggtaggatttgtggcttttgagaacccctgtgtttatttaactattatttaactgtgttttttaaaaacagtatcgtcatctgaagaatatttccctggcaacccttggttatggagaaagtgaagacaatagaactggcttgaaggtctgtaagcagcactacaagacaggggccatgttttcttctaacgagaccctgaacattgacagtgacattgagacaggtaacagcagtgactgtttcatcgtgtgactttgtcatttcctgtgacgagcaaaatgtctcccatgtgctggcaactcagtggagcaggctcccctgacacaggctatctttttctcagctgcctccaaaagccttggctcaggaaaccaccccgtgctctgggagatgggaagagagaactgtttctctttgatgtgtctctttagtacatttgaaaattcttcagtgagtgctcttagccaccgatccttctgcttctacttcccatgtgccagaaccgctgttgtgaccatacctgctttactgtttataaaatacacagtttttcaaaggtgaattatggttcataattattattctttctcttgggagattaccttacaaaaacttcccagctaaccatgtagagtgactttgtgccattcggttaaatatgtaaaaggatgtgtgagcacacagtgtgtgctttaagactgaaagtttgctattcagtcaacaaacccaaggcactcactgtttgtttcctgccatggagtgccaaagctaaacccaatttgtccttcaagcacctggcaattcacgaggaggggtcccaggagtggggtgggctttagttacgtgatgtagtctgttcagccatatttttaaatctgatcttgaggtcctttgataacataagaggacccctcacagggtggagattttacctgtttctttgaattggccagtcagaatccatgtgtgaacaagtgtgtcctgggctctggatcctgaaagtagtcactaggtcatattgacccatgcagtgtctggcttccaggctgctattagaggccatcttggggaggggaatccaccaccactgaacattcctggtctttgtgccctgcagccttgctcacctgagacatgtgtggtagttgtgtggcttttgtagggagaagtgaacgagtgtatattcctcccagatagggcaccagtgacagaccagagagctgacttcacccgccaggagctaagtgagccaatgagttggtcagggttactgacagaagtctctgtgactcagggcagctgcatcctgtggaaagcctgcccagtaggggtgatagctttcaaaggcgacatccaacaggcccctgttccactaagggatcacctgaccagcaagtgttcacactttcatgacctcagaaggctccgtggcttgtaactttcagattttcctgaggagtcctgtaagttgccttagctttctgagtcttagcacaccctggtgagcagccctcaaggcccaaggccggatggatagctacccagcaggcagctaggctcaatcctggctcacttggaatctcttcctgagctcagccaagtctcccatgacatgggagcacttcacagctggggctgaaagttggttctgccactttcctcctgaaactgtgacactcaagtgggatgtaccacacgactgcttgtcagccctgcatatgccgtgcatatttgttttttcctgattaaattttctgggaaaattgcttaaagaaatgtggccaaagtcaatatgaatggcccaggcagacggacaggactgaaaaccagggcttacatattcctcagtggtgacatcgctcatttcctttctgtaagtgtatggaatatttcagagtaaatggagagaggttgaccatgaatttgacctgaatcgagattacctaactgtattcattgcatcctctgaccttattaatataacttgtcaaaagagtccgtcagtgtattaaaaggtatgaagatttcaaaagttatctgatacttaattttcttgcatatattagagaaagcctactaatgaggtaaatgcgggttgattttacacaacgctggcgcctccagacagtgtaaacctgatgacattcgactcacttgggatgtggttgtggttaaggagatgttgtcctatctcagccgctcacaaacgtgacattcccttggctacatagtaaatcagactccagtgttccaatccaaacaacgcccatcttgccagccacccattgggctgaagctccactcgcaaaactgctgggtagaccaagtggagttttggttttcgtttatcgacgcacacttatctgtgagttggatctgaggctagcccagcaaatgagctggctacataggcagtcgttggcattgagcacatgggaggattattctctcagtagctcaggggaaagtcaaggagcttcctccggtgtgtaagattaacccatgcgtggttactcattagcaggcttctgccaatgtatgcaagaaaaggaacctaaaatcaagaagaagaagggtcagtctcggctccggatggagaggcaagaatgggtgggtctaaatcttgatagacagcaaatgcttgtgcaaccatacgaaagtttcttgacttctgtgctttggtttatttacctataacatgccatcagtttgcattgaggattaaagagcacaattcattaaccagataacatacgtggccacagcactttgcctgtaacacgctgtttcatggaatcgtctgttcagttctgtgccctgtgtttggcccagcatagcacatttttattaagcccgttatacttaaagtatgacttaagctaggagttcatgttatgagagcagagagatccagagaacccatgggaagccagcttgctctaggtccagacctctccatactagagacagcagagcagagcagcgtggatgtcacacagttccacgaccaggtctccatgaccttgctagtgcttacctctggatctcctcgttgtcctgtgaagcaatgatacagggccacgctgttcagaggctaatctttatgggtgggctctgtagtcctgcctggcttggaacttgctatgtgaaccaagacaaggctaacctggaactcacagagttcctgcccctctctcccgaacgcctccatctgttctctcctgaacgctacaatatagaggagaagaacttcctctgccgggcatttttgtttaatcacaactgcagctggggaagaaacattgtatcccagagcatcgtagcaggaggcatctgaagcctgcttctgttcgagactgacaatgttaacgtggtccctgggtgaaagcggcacctgccggcttctctactgaagggtgaccgtgctccatgtggtaattagttgatattttctgacagccgttttgaggcgttcctagggtcctgcttctcatcacatggctgctggactcatttcagcatcagactctggccaggagtgaccattccctgtctgtctgtccgttgctctagactgcattcacctggaccttcaggtgctcaccacggaacccgaggactgggcacagacatctttcttcaggctggatttttatcggtaaacacaatgtcaagtctcaatacccaggagaggaggcctggggcggtgggcgggggcacggacactaggatagtgacgctgacagttgtaccttttactgtattttatttaggctcgtgcaagttgatatctcctttgccctcaaaggaattgacctacaggcagttcattcccgagagataccggactgttacctctttcagaatacggcaagtgtttttgtgtgatgtcagcctctgtttcactccctgcaactttgtagtggagggtaagcccttcagctacagatgttagatactgttgtactggaaactgcttcagtgatggtgtggtacccatctagagactgttccctgtgaagatggatccaaccctttccaactctctaaaaccctattcttgggctgggaaggtggcttgatacataaaacatggggatatgagttcaaatccccagcacccacagaaaactttcatcctttatgctatagttttttaatcattaaaaaatatataactaaattctcccagttagcttcggctgtcagcctgacatagcccatggtgtcctgagggtgtgtccactgaaggactacccagatcagactggccagtgaacatctcagtggggcatcttcttggctactgattgatgcaggagaggctcttctatccttggacaatgggtcctgggctggaccaagaagcaggctgaatgaaagctgtcagcaagccagtaagcaggacttcctctggggcgtgttctccagttcctgctggagttgaccagagttttaccacagtaacagcagctggaccagaacccacgtgcagaggcattttcatccctgtgatctctgtatcagagttctatctgggtactgatgacttttgtaagtagttgacctgacaacccccaccccaccccgcctcgttggactataacctctttgtttctgtctctagattaccttcgacaacacagcccacagtgggaaaatcaaaatctatctcaacagcgaggccaacatcgaagagtgtaaaaacatgaacatatctgggtctagtaagtgtaccgttcagcctgttgtctgtgggttagaggaggtttggggggcttagggaacccacgtgattcgtatggaaggtggtggggaaaacgtttcagaaaaacagttcaaacgctagtcctgagcgagtggtccaagtcagcaagtgtttattgtttcttgagtcagtggtttacgcagttcgcctttgcagcaagatggcctgggtttgcattctggttctgtgagccacggctggaggcttggacctattgcttggcctctctgtcttagcagttttctctacaaagcaagagcaatggctgtacttattgagggggttggtgccgaatgctgggagcagaagtcatcagagttgctccgcaactcatcagcgaggagaggccttagggagggacatctatgtgaccagatccttggggtgctatgggtagccatagccagggaagtatggaaggtctgagtaggaagggaaatgatcattttgaccgagctcagtgggaatcctgaattctcggaggaggtatgttctgatccaagccttggacaaaggagaagagtggagacctcagggtgcatcttgaataaacacggggacatctcctccgtcacccgatggtccacatgcttaaatagccttgttgagctagcgatgacatcatgtactgtaatctcagctatgcaggaagaaactgggagattttgacttcaagaccagcctaaaccactttgtgggggagggtgttcctgtctcaaaagaggagtgtaagatatgtgcatcctgctttgattattagtggtcagggcgatgtctctgagtgtggtgaactggcaagctccgtttacacgaactcacttgggccagatgaccagaaagacaaatatgagtcacgtggttttttattccaacaggtgactcattccttttcagctgtacaacggctgatgatttcgaagttttctctttttttttctagctttggtttcagtcattcctctaaaggaagcacacagattgggttcctgataaaatggattttctatttcgcagcagatactcaaagaccagcaccatcaaggcagtcctcaggtccaagtaaaggctgaagctatgtcttggtggtgtgggggaacgtaacctttgccatatataaactgtgatttgcaatagtcactgtgagactggacgtgtgcctcatggctccccaatgatcctctcaccacgcatgccagaacggaagagctcttgctcccccctgtggccaacagagagaagcagacctaaaatgtgattcttacggccatgtcttagaaactcgaccttatcactaggaagacatgaatttaaaataaatcaaggggttttaaaaatcattaaaaatatgaggtttagaaaccagtttagaagatgggttgtgctgcctcttccatttgaagccgtggactgagaagctctgcctaagagaggccagaggcgccacctggtgggcactggccgctgttgtccaagtattctgatgctctcttctcacccagcttcccagctgctgcttgcttcctcttggcgttatctacaattatccacatctcctcaaagcaaaaaccggtaatgtccacgttcacagacatctgcttcccaaggagccttctctgagtgcgcttctgctctccagaacttatattttatatactatagtttatagccagccacacgaggctttagaagaatggggtgggcagggctcccgctgatggagatgtaatggtatatatttattgcagagctgacagttagtaagcttggatagcccgagtcagagttccttaggcagatggtgggagagcgtctgtgcacatcaggtatctgggagggtggagtgagtggggtgtgccattactcagagtggcaggacatatttctgaaccagtgttttccaaactcagatttggaagagctttctgaaatgcaatatggcttcagtggggtaagcaatctatggctgctggatgttcccaacacttgggaagctgaggcaggagaattcccactacttcacattcagcataggttgctgtgttcgttacttttttgttgttgctgagataaaacaccatgaccaaggtgacctagagaaggaagaatttattggggcttacaggatgaaagtccatcatgacaggtagacgtggcagcagaccatagacatggagacctaagctgagggctcacaccttaacctacaaccaagaagcagagagaggaggagtcgggggagaaggtggtggaggggaaaagagggaggctgtgagatgatgtcttctaggcaagccacagccatttcaaacacatttcgtcctcagactcagcagtttcgagtcaaaggccttccctgggaatgcataagaccaggcgggtcgacagtcagacaagagtggaggaggggctcaggggacctacggcacactgaggagctgtacgcaacacagattcagtgaggcagaaaccactgcgttctggtggcttcccgttcgtgaccccaccaggctccaaccctccgggctccgacacaatgttctggccaacggtcacacagatgggtcacaaaccagatcacgaatctgagtgggggggggactaggtattgataagaaagagagagagagatgagaggacagggcatgaggttagagtacgttatataaacatatcaagctgtcaagcagcagaattaatcaataaaaagaaaaatctgaaacttgacccctaaaacaaatcatgtgagcaggtgtgtgtgaagtacggctctggccaaatgcaagtgtgtgtggcttgtggatggtcccctaggcaggaacagagacaagggagaccgatccagtcatagtgaggccggggagagcagcagccacaatgtggggccatgtagtctaagagcagctacacttacagatcagcctctcttgtcccgtcccccccgcaacccccacccccgcactgtacgttccaaacactcattcgctcgctcgctcactcactcactcactcctcagtccctgagttcctttcttggtgttgacacacaggaaaggcatctcagactggcttctggcaggacggtgtaccttgaaacagaggagcacaagtgggacctctcagtgtggcatttaactttgctctcttaattgataaggggaactcattgtctgtgttgctgtgtgaagcaacgcaggccatggtggcctcttctgaatggagcccaacgggattgcattctgttggattctgttctgcagtaaatatttataaagagcttaagtgcgttgattaacaccgcctacgtttgtaagtgcacggcccttccctccagggtgtgttggcttgtctgtggagtgcggtatgctgttgcttctgatggttgccgctttaacaagagaaaggggtctttcccttgaatttcccttcagactaccatttgctgaaaagactactctccacaatgtgtgcgaggcgtacttcccatttgtactctgccttgctctgcagctcagagaagcactcactacctcctggtgtttgatgtgttcgtcattatgatctgcctggcatcccttatcctgtgcacgagatccattgttcttgctctgaggctgaggaaggtaagagagaaactcccctgtctccctccactcagccaacagcctgcatttgtctaaatcaagggaataaaatggcagcatccaggcaggcatggtacaggaggagccaagtgttctacatcttcatcttaaggctgctagcagaatactgacttccaggcagctaggatccttatcctagggtcttaaagcccacactcacagggccacacctaatccaacagggccacacctattccaacatggccacgcccactccaacatggccacacccactccaacatggccacacctactccaacctggacacacctactccaacctggacacacctactccatcagggctataccctctaatagtgccactccctgggcttaaagttgagctaacaactacaggtatttgtggtgatctctcaagcgtttagaggtttccagaatgaagattttatttcagggatgaccctaagagcatgcgtgggttgcatcattttctgtcttcaagtcagaattcactttgaggaggaggcaaatgggttataatgaaacacaaataattagatttgatttcttgaatagtttcattgtaattttttttttttttggctgtttaagtatgttttctcaggagtgtgtactgacttcagcttactgtgtgtgttattctggcgtgaggtgggaatctagggtcccactggggtcaggggaaacaggaagacactgaaatacttcagagcaggaaatggctcatgttctatttcctttgatctcgacttccactttgactttaaattattattttttttgagatttatatattttaattttgtgtgtctgagtgttttgcatgcatgcgtgtctgcacaccatgtacatgcggtgcccccagaggccaggagagggcagcagatctcctgaaactggagctacagacagttgtgagctgaccccaggtcctctggaagaacagccagtgttctcaagcagacatctctccagacccttggctttcactttgtaaacatctacttcatatctgccttccaggcctctggatattctgtatccaaggttgaagtccctctctgccaagttcagggacagcattggggacacagtaccctcatctggaccacaagaggatcctagttcaaggggttgccatcaatcagcttaaatgagggcatagtttgcagtatttggaacacagtctgtgttagtgttcttggaaggacagcataggtgctcagggtttgggttaatctagcagatgttcaaatgcttgcttacacgggagtagacaactccactcggctgtggcaccgcgtctccctgtgaggtggatctgccagctcggaattgtttgctcttgtcttctgcctccggaggtcagtgtgacttgtaagacgtcttttttacatgtttgccgtagagatttctaaacttcttcctggagaagtacaaacagcgcgtgtgtggcgctgaccagtgggaattcgtcaacggatggtacgtcctggtcactatcagcgacctcatgacaataattggatccatattgaagatggaaatcaaagccaaggtcagtgacatctagaaccttatattgtcccggatgacctcaggtcatcctgtaagacatggagtctttctggggaatctttctggggactagcctgcttcttgtgttttctcttttctgtcacccattgcttcacgttcttctccaggaagagtgcgctgtggaaggtgacaccctatggccttcctccaggaatgcaggtagcatcatttgaacaggaattaagtttggggagactgagggaatgggctttatattcatttatttttcgatgtatctatttacttatgtaagttgcaaaggaggcggctggtacacagagcagacatttctcctaaacacctgaagggccagtggcaggtgtgaggcatcgcagatgctgtgagccccaatggccaagagatccccagctctcaagtgcctatatggtctgaccagttgcatatgttggttggtttgttctcacgactaggctgagtctctcaactgttctcttctctgttctacatcactctcacaaaactgccctcaccatagctacagggtctccctgtctctattccagcttcctttggcttccctcgggctgactccctctctggcctggcctccctcagcagctttgtgattctgaccttctatcccgcagacccagccgtacagtggctgggcagtcttcctgaaactacccatcttgctgttaccatcctttctgccttccaggatctacttaggatgaagtgacctccgcttcatcatggcctctagggtccccatcatttatctctggttccatcctggctctaatactgccattccacacaccaggcctcagcctcggggtgtgttcagactctgtccctatgccgtagacttctctccagcctgcgctgtgtgtcccgctgcgctccaggtcatccccatgcgaaggcctctgggacaagtgtcagcagcatatctctcattgaatttagcatattgtattaaatggctgcttgtctcttcagtgaagcctagaatcccttgagagcaggaactcgtgtctgtaagtcacactggagtttgcttccgaaagtcaatggattatattgcttgttctttgccaaacaccaggccctttcatgcctaggccagtggcaaatgcaagtcctatttcagaataataagttctaaaaaatactaaaataaaacccaaaaatttgaagcttccctcttcttccttcccctccccttccctccccctccttctccctctttcttctcctctcccctcttcctcttctcctcctcctcctctttttcttctttttctttttcttcttctgcctcttcttcttcatccttctccccactcattctctttctccttcttccttttcttcatttttgttttgaaacaaggtctcactctgaagtccaggctggcctagaaattactatgtggtccaggctggccttggaaatgcatgttgattctgtagtctcagcctcccaagtactggggtgatagacataggtaggggacagtcagttcttctcatctgttaaagtgaggtaagcaagccaaggggactggggtgtcggctcagctgttttcttttccctcctcagaagctcacaaactatgacgtgtgcagcatcttgctcgggacgtcgacgctctttgtctgggttggagtcatcagatatctgggttactttcagacgtacaacgtaagctctcagaagtgccattgtggttgacacgggctcctcctctgagttctgccagctggttctcatcctccgagacgagctgtccgcgcctttgtcttccaggtgctcattttaaccatgcaagcctcactgcccaaagttctccggttctgtgcttgcgctggcatgatctacctggggtacaccttctgcggctggattgtcttaggaccgtaccacgagaaggtgtgtagcaccaattctttctgcatcgagggcacgtggggccctttgcctgagtctcgagcacgtatctctgccactcttctccagcgaacaccctggatgtctgtcttgatgcttctttttctatttctctgccgtctccttttcgggatagtgaactcactttaggatattggaataagaacacctctcatagtagtctgagccaggctgaggatctgacacattcaatcagctgattagcagggaacagtgtttacctgtgggatcactgtcagcaagctaaaaacaaaagagtaagggaattatgatagagtcgctctagtgtgaagcattagggtctacatccacattggctgagagcgacagagaagagtgatggccctgcctggagtgagcacttcatctgtcttaacatacgcacacatccttgaaggtggttttgacagtctcaggtctgcgtctcagctgagtttctaactatatttcctttcagtaccatcctaagtccaggaccaagcttatagtcaagctatagtcaatcctgagagctctgaggaagaagtgctgtgagttcaaggccagcctgggcgaaatgctatattctgggctagcctaggaagagaaggagactttgtctcaaaacaatgatataattgatcggtagaacatcacaagaagtgagtgaggctgtgctccaagccaaacaatgaaaagggtcattgcgcctcatggcattcctttccttgtccctgggtccttggaacaacagaaaaagaatagcagtcaccattactgactggagtagtgctgtgtgggaccttccagggtctctctcatgtcacacacaatcctgtcacactcctcagacacccagtaaggaggaaggaggcaggaacagaagggatttcctccaagctaagttctgaccttgacattaactgaaatatgtggtttgcaagcttttcatagaatgagtgatacacatggctcggaccctccccgctgtccctatccaatcaaaccccagtgtggaataccagcgatccctgcccgtctgttacatttaatgtgtccaaaaagagtcctgattttttttttcccagtgagcaaggaggcagcctccagcatagcggcaaatcctgacaatcctattgattttccctgcctcgtgtcacgtctttgaaggtgactcacgggtaaagattgctctttgatatgataactccaacatggagagctcactgtctttaccaagtccaagagcatttgcagttttcttcctcttgcttgcctcctgctccgggagcagcttcacctatctgtcactagagggcactgttgcaccgtgtggaataaataaatactgggtctaaccaggctttcatcaatccactggtcccaagacagccggacaagcggtcctatgtcctttgtcacacgctctgtgcagttctgtccctagtcattattctgaaaggttcgaagttaataccgtttgaagtttactgaatggctgctattctttgctttttgttaggcctggtgtccaagttctttatctccctggctattcctcctctcattagtcttctgtcactgggataaaatgcccggcaaaccagctcttaaggacgaaaggattattttagctcatggctccagtgcagggtcacttggccccatcgccttagggctggtgaccaggcagtgcatcatggaaggacatgacaaaggaggcctgtttgctacacagtagccataaggaaagagggaagcaggaagggttggttttccaacagccctttcaaagcatatccctagaagtctcccactaggcgctgtctcctaaggtcgcccagtggtgctacagtttggagaccaatcctttaacgcatgtgcctttggagtcactttgaggtcagagctaccataccccatcttctctttcccgtgagatggcaccatcctttacggagagagaaccttgatataccaaggcatttctgtggtcacccagacagtaagtcacagcgtcacaccaggcctgcccagcctctgttatcatgctttgatatcaagaacagctgagcatcgaggccaacgttattagcacttttagaatcgcagcaaccttgagtgtggacgccattcaccatttccaacacacaagccaacagaagactctaaagggaaggtgtcgggaaaattcttacttggtgcgaccgactggagtcaaagcagcagactttagcttcctgccttcctgttacacatctgatttcagcggttcagcctcagggacccaaccgtcacatcgatgcccatttccagcactaatggactttggcactgtgctccttgaaaacgcctaggtacagggagctaaagacagcggatcgtctttcacactgcattctgaattattaagcacgcctctaatgtggcttttacatttcctgtcttcaggggactttttttttttttactatgatgcatgaataatagttttgtattatctccattttacaaatacgaagaacaagccactgataaatcatcgcactttgctaaggccaggggcaaaattgtgacatttccaaagcttctggtcttgcccagacacttcgcttactcataatgagccagctaaaacattttactgttataaaagattcttattacctgcctcaaaccatactttaagtcattctgacatagcgattgcaggctgtatctgcattaggacgagaggtctttcagctcgctcacaagcatcatttgtgacgtaaaggttttggttccttctgtgatttcatacgaccaccaggactattgattggaactacccattgactgtttattagcagtctctgtgcacatagcgctggggcgactgagttcccagaaggcagagactgtggctcattcctcttcatgtttttggtacccaccctggtgcctgcaatgtgtcaagtgttcagcgagtttgctggtgagagccagttgccctgccttccaaggtgtgatggctaatctgcacggtcaacccacctggactgagcgtcacctcggagacacacctccaggcataagcatttgggcatttccagaaagttctaacagaggagggggggggggactcatcctgaatgtgagtggcatcatgaaagggttcagagtccagaatgaataaaagggggggaggaagagacctgggagagagtctgattctcgtcctgctgagatgcaagcaactggctatgtacactcccactgccccaccttcctgacacgacaaattgtatatctaacccccccaccccccaaaaaactgtaaggaagataaatcctccttccttgccaagtgtttgttcatactgacaagaaaatcagctagacatggggtcttgctgtgcctaagagctagccaatgtgctacccaactgaagacattttagctcccgccattggttgctttttttatgcccatgtgttggaatgtggccactaaaacaactttggttttagtctattcttgtggtagaaagatgacccagtatgctttatcaggtctttgctgtaatctggcgggctagagcaggtcttatatgtacacaggagggagaggtataatggttataaatatgttaatgttgagacgggcattgtgtctatattgagcatgttcacacaggaagctaaggcatagatctgataggtactgaccaacaagctacctgaagttctgaaacaggaagcacacagtgttagaggccttgaaatgaaagaaagagattgaccaggttacaaaagaactgacgagctccaagatgctgttaaaatgtcactggcattcagagaagccaactttagcctgattactgtcttaagctggtgacagtaggaaacatgccaggaacttcccgtctaactgttaagcagtccgcatacttactgcttaagagatctgctcaactggatgcttcctgcaagactccaaagagagcaacattagcctcgctctgcagagtgactttgtgagggctagagagtgatcactgttgggacatgttctcctacccgcatcctgcccgtctctttctagtgttaagacaagtgtaagatgtaagctttgctctgcaactgaggtatagaaatgcattccagggcatttaaaggacagccctaccacattctctagagttcttgctgataaagagcaggggctgcagctgacagagcatcctatccccaagaagactttgatttagctcttgaatgttgactttgatgcagagggaaaggaagaatacatgagaggaagagaccagattctacagggaaatttgcggtgggaagagctaagcatggatattaatattgacaagaggcaactgtgaggcaacatggaaggacttactggaactttctgtgcttctgttttcagttttatggccatacgcaagagaaatgtctttaaacctatctttatgagatttagtgaggattggataaagagacgatcatgtcaaagacttccctagaaaggaatgacatcagaaaggaagagggagggaggctcgtatcatgaagcacacgggctttggaggaccacagagtagggagatggactggccacaccagcatagatttgaatgttctcaattattttggtacagatgtttcttttgggtggaggttggcatcagttacaggaacagaggaatttggaaggagagcccttttcttggatagggcgatgggaggttcactttctatctgttacatgacagcacgtccctcttcccccaggacgatgtcctagacacttatcaaggccttggatgtacacaaggccatgctcaattaatggacatagagaccccaacccctaatgtcagaacagatagaaaactctacagtaacccctttcatgtatttctgaaaaccatgctgtctttggtttattaagtcactattaccccagcagtttttcatatacatcctctgcttacacccctggctccagggacatgtttattaagggcatacggtttgttttagtggagttggacgcagattgacaagttctcagagccaggatgactggctgtggagtgtagtgatacactgtgttcaccttggatcagcacttaagctcagagtgcttaccttcagctgaacaacccagtgtcccagttcccgccttgtacctcagatacactgtgtctaaaatgtcaccaatagtgacttttcttgtggttgtgacaaaatagctaacaaaagaaactaaaggaagggttcgctttggcttgcagtttgagggtacgttccaccatgctgggcaagtcacagtggtgagaccatgaggtagttggtcacatggcatccccagtcaggaagcagacagagagagatgctggtgctcagctcactgtctcctttttatttatttatttttttaaaaggcctgggactttagtaagcccaggaagtgttgccacctacatatagagtggatctttccacctaagtttaactagaaattcctctgatacctgcaggggcatgggaggctcttaggctcaggcacttgccaggggcacagcaggatcctagggagttctgggtcagcttaagtcaacaatcaagattaaccatcacacacccttcctagccttcatgcggatacactttctccagagtctcttttattctggcaaggactctgcctcacttggactcctgatgtcacctctgactggcatctgcccttgggctaccctgctctaggagatctccgacatgcttttagttcttaaagaagtatgtgtcgaatcacattgctcccgtggctgagatgtcactcaagtctgctcgtgagctggattgagcctgatgtatgcccaagtctcaaagaggctctgggcaattcagcacaaatgcctctcatcagccattgctatgtctccgccgaaccacacttttccacagtcagtgactacaaccccttcctccctttgttgagaaccagtctggagtgtcattgagctcatatgtcttaccccagctctgccacaggccttgctgtctgtcttagctgtggtctgtctttgggggtgggggatgggaagctcctggaaaaatgttcatcgtacggttgggaagtctatggcataggcctttagaaaaacccttttatattgtgtcgagtctcaaccttttccaaatgttgctggctgtaggatagagacatcacatccctgtagctccccacagcttctcacagacacctactgccccctgctgccccctgctgtttcctgctgctccctgctgccccttccctgcagctcctcacagctccctgctgcccccctgcagcttcccgcagccacttgcagctctcagcttcctatggtgctcagcctcaggggttccgttgcatttctcccttgcagtttgaaaacctgaacatagtcgctgaatgcctgttttctctggtcaacggcgatgacatgtttgccacgttcgctcagatccagcagaagagcattctggtgtggctgttcagccgcctctacctgtattcctttatcagcctattcatttacatggtcctcagcctcttcatcgcgctcatcaccgactcttaccacaccattaaggtaaggcacgaccagtgtttgctgcccaaaagcatcataaactttgtatggattggagcacgagaaaaggctgtaatcttacggaaatacaattttattcttcttttaatctttttagaaaaatagaccttggtttgttttggtctgacgactaattttaaatatgtgcttgtcttagttaaggtttctatcactctgatgaaacaccacggccaaagcaacttgggggagggaagggtttattcagcttacacttccacatcacagttcggcatcagagcaagcaggacaggaacacaaacagggcaggaacctggaggcaggagctgatgcagaggccaaggaggggttctgcttattggctcgctcatcatggcttactcagcctgctttattatagaactgaggaccaccagcccagggatggcactagccacgatgggcttggaacaacctccgaccccatacactccgatcactcccccaatcctacttccccacagtgcgacccctcttaacccaaccccaccccgcatatctttcctctaccaacacacaccttaatcactccatcatttatatccccttccactacccttccatccccctcaccgcccccgtcgcccctctcccctctaccgaccttcccccaccacgctcaggaatcgcgtccagccccacgccccttcaccccacacaacaagnnnnnnnnnnnnnnnnnnnnggagtgtaatggaatatagtgggttacggacgttagtatatcggatagggaatgtgaattatgtttgacggggttgtgtgttgtggaggtgtatggtggatggcgtgattgtatggagaggttagatagagataggtatgggagaagggataattatgatgggagagggggttaaattattgggggcggggggttgttaaaatttattgggaatagagtattgaaggatgataggtgttgatagtttcggggggggggaggttgtggagggtggcggtgggtttttggtaggtttgtgggggtatttggaatggataatttatagaaggtgggagttttggagagggatgggcgtattgatggttatgagttaagttgatgggtggatttgagatatgggaggaatcgagttagggattagaatgatggatcggcatggagtggttgtgttattgcttttggttttcggggatatggaatatgggggggagaaatgagtaaaaagggttgattgggttttgtgggggggaatgtttgtttgtttgggaatatttgttgagatgaatgaggaatgttgagtgatgtttatgagtgagatggttgtgggtttgtgggatagggttgttggggtgggggtagtgaggttttgggatatagggggtatggggttggaaggatttttgggtggggggggagggggtaggaaattgtgagatatttttggaagagggtggagggggggggtgaggtggttatagtggagggggtgtggttggtattgggtattagggttggtatggatggagtaggggattgggatggtgggaagggggaatgggaggggaggagggggaaggggtgggggggggaataaggtgggtgtaggtgagatgtggtagataatattgggatggggagggggggaggatgtggttgggtggagttggggagaggtgtgtgggggtgttccccccccccccccccgtcaatccgtaattgagaaaatgcccttcagccagatcctgtggagtcattttgtcagctgaggttcccgcctttcagataacctccccttatgtcaagttgacataaaacttcccagcacagtacttgaaacatttcacttgttaccgtggtatgggtcggaagtatgtagggagaaatagagaaaggggagaggttgattctaatgaactcaacaacccgactgctgttctcagagctgacagatgctcctgcctggatggctagctaggacacagtgtaaattctagcgatgggaggtgattgccaccctggcaactgagaaatgaccatgagatagcatatatatttacagtgcacacttcattaaggggaaggaaaggacagttccagctttcctaaaccatggtacatcccgtgctctttctcactggtcctgtgtggttgctgtattgcagctccaaagatgctcactgtcttaggagctggtacccccacaacagatggttgtgttaggaaaactacttcagggccagcacctaaacgacgtcaggacaagtaccacggtggtgtccttgcctctgctcagtccttctcatacaaagtccaagaaaagctgatgagtggtcagcgtgtgaggatcagagtcagggcgttcgtggtagctgccccgtagcaaggtacggggacagtattgcaggttcttgccatgaagattcatgtctttgacatggtcaaaattgatatgtgtccttgtgtggggcaagtctgaactttggtgtggacgaacttactaaacatgactgggtgctaggagtgttttatctgttaggaaaaatctacccctgtcccactctgtggtcatcttccatgtatgtgaattatgtccctgtgagattctaggtggacactgtgccgagtgacaactgctggcctcatgattaacactctggctttctggtttggatgatttctttcaattcttttcaactcacttctccccctctcccctggcttgttttctggagttttcccttccattgttctcagttcccccctccaccgccacacttagctgttctgggacggacagattgttctgggactgacagactgactctgcattgttcatagcactccttggatctgagctagcacccgggagttgcatttcacagaggcggggtttgctttcttgacaaagagaaccattgctcatgccctggacaggaggtaacaacagcgctgtctgctttttcaaaagaagtaccagcagcatgggtttcctgaaacagatctgcagaaattcctgaaggagagcggaagcaaagatgggtaccagaagcagccatcggccttgctgtcctgcctctgctgtctgaggaggtcagtgttgtctgtggagggaagacagtcatctcaactgaactctgctctcagaaatctgccggtggtgggaaatggttgctcttttttttctctcctcccacacaggtttgtttgagaaatacattgtttcttgtaaaacaatgttccataccacaaggtttgtgtagaaagctccatgacatcactgaaacttttagagaccttgtgggaaccctaggaggagatggactgtgaccagaagcaggaggatgaatcttaagaggcccaaggaagaggtcagagtgtatgttctgaaggtgcagctccagacatggcaaaggcattttctcccctcacaggatgtggagcaaaccagttccttgaacagataggacatgatggagaggaagcctttggtgtctgtcttacttaccttcctgtagctgtgacaaagcaccaagataaaagcaaccaaaaaaaaaaaagagtttattgaggttttagtttcagagggtgagcccatgaaccatcatggaaggggacgtggcagcaggcaggcatgatgctggggcagtagctgagagcctacgttctgatccacaagcatagggcaagagagacagctaactgggaatacataagtgcttttgaaacctctaagcccattccaagtgcaaactcctccaacaagccacacccccaatcctcccaaatagtcccaccaactggggactacgcattcaaatatataaaccattctcaagcaaaccaccacagtgttcttggttaaaagcacgcctcagtagctcttcattgctggctgtttggactctgagagaaatgacctggttctcagtgaccagagggtgctacacagttgggtggtgaccagcatggaggtcatggttttctcaaacgtacccagatttgttttcacttgggtcagaggtagacatttttcaagtattccttgcctttgctttctgagcattccatcaatccagttcctcaagggagatgggagatcacagctacttaggctcacatgaggagttttctgtccgttgattcacaccgcatcttgagatttttccatgagacgagtgagcacatcccgaggatgtctggtaaacacgagacgaggtcttctgagacattctcaaaattgcatttcatcctctcagagcgttaaactattgccgcggatgccagggtaaaagaagattaattttcttaatttgcaactgcctccgaagacatgggaaggctatcacaggtctctcggggccgccatggcatcctgtagttattatattaatggcttttctggctgtcgtgacaaatacctgatgataaacagcttaagggatgaaggacttatggcagctcagggtctgagcaagcaaagctggtcacactgggcacggagcacatggtagctggtcacactgggcacggagcacacggtagctggtcacactgggcatggagcacacggtagctggtcacactgggcatggagcacacagtagctggtcacactgggcacgaagcacatggtagctggtcacactgggcacatggtagctggtcacactgggcacagggaagaagcagaagatgaaggctgattgcttagcattcattcactccaaaccaaggctgcccaccttccggacttcctccttctcagttaaatgtctctagaaataccctaagctgtgtactcgggcatagatagtctatggttctcctgaaccacttgatgcctgcagggtgaacctgctggcctcaggtctctcttcccagactgacaggatttggctctttggaggacaaggcttggatgggcagatatgagttgtcaaacgttctcttctatgaaggaaagtgtctggcccttgtagccattgatcagctctgatagagcagggtcctgagagatgatggttgctcaatcggttgtttccagagcctcaatccaagcctcaaagtatgtacatttcccgtgctccattttcttcctctttcacatttggctcacataagctatatgtgtctagagcgtattctagtctttttgtaaagattttggggagtccaggtagaaaagttgcctagactgggcaagaccctcagtttggtccctaacatcactatctgaataataaaataaaaaaaataagagctgtcaatgtcagatgtggcgttgcgtgtgttctgggaggggaagcagaaggaccaggaattcaaggtcattatcagctacatagtttgaggctaacctgagctacatgagaccctgtctaaacaacaacagcaaccacaacaatgacaacaacagcatcaatgacgcaggactatccaaacaaaaattcttaacttgacgttctcttactccttcatccccttttctgttacaggagaagaagcaatgaccacttgattctcattgactaaaacctttggctgatgtcagtcaagtccagatccctttatgctgaggtcattcagagagaccccagaggtagcagcagtcggctcaaagattgtcctgctgaattgtggaaccagaaggaggggtgtccatgagctgctgatcagacctgacattccaaagttacttttcatagacatggagtgtgaagagtaagcctcttgtgaggccagcgtggcaatgaaattcaccaggagtctggtcgtttgtgacatcataatgttgagatgtaaaaagaaatattcccacttcagagtgtgtaagcaatatttaaacccagataaagatgcatgcttattgaaaaaacaaagatttgtttcaaaacgtgacacttggatttgaagacatttgttaatttatggtctgcacagaaataaatttgcttccaaaccaaattaagacttgaagctagagagtggtaagccactcagttcgtgactggttggactgtgagcttgcttcttcagcaagcacaacaccagtgtctgttagcacagtcagcgggatgaaagagcacctggctgtcccctcaggtgagctctccctggactggacacatgatgagtgagtcaccctaagcttggagtggccatctgtttcacaagtcagctccattgtggtggggatttgcccttgtcatggaaggaagtgtagatttttcattaaataaatttattttcacgatgttgcattgtactattattgtgttacaatgcgatgtctcttgacagtcactgagtgagagttccattttataccatccctcttgaatactttgtccacctgagagatccgtcatttttaaacaagtggtgaaggagctatgagggttggtccatagaagctatttgataaagacttgagactaagatcattatgtcatagctgagctatctggggctatgagggctactggtgcagagtaagatttgggtttgcatctcagagcagctcctgcccttccctgcctttgtctccgctccaagaaccgttgtctgattctccatctgctccttgctcctgctcttcttcatatccgtccaacaaatccagacagagaaaaccctgcagctaataactgtaagatctgtaggtgagggcatgtttcatgctagggctgttttttgctgtccttgggggacaatctgagttttgtgcccagcacccacagtgtgactcgagagaccccataattccagagaccctataattcagggagcacatgcctttttctgacatctgaagaatcatacagatgcagctaggcaaccgaaacgctcatacacagcatagaaaccaatctttatttttttaaaggaaaaagactcgtgactacatatagagtacttagtcaaagtatcattttaattaatttttctttttacaaaaaaatagttcaagagtcacaggacttggttttaaaactaaagatcatcagactgagggtctgggcttctttctctggttccagatcaggtatagggttaagccattgctagcctggttggctccgaacagactagatttgtagcctacagctttgactgtcatttgatagaaacttaatgatgctatctcactcgtccttagctacttcttaaaatcagctattatgtttcctttcatttccttttgttcggttggctccaatgctttcaggaagaaaaatatttttcaaggttaccatggaaacattgtttcttttgctcttagtcattttgaacaatggcggcttttctcactgtggtctctttcccgagttattgaggatgtagtagggtaactgctgatggacaggtctgggacaagccctttcttctctcagaccttagttacttcactgtgaccgaagatacaatcttttttaccttttatttacattctgaaatcgctaccccttgtagaaatcacctccttggcttacagtgacacagccaaagccacacacagtaccctgaggtaactgactggaatggcagaaacaagcagagtatttgggcgccttgaaccccactcatcctgtagctttggggctctggacaagccacgttccgccctgaggtgatggtgataaatctgcgactgacctttggctcacagctcctgccgtgaactctggcactagagtggaccttgagcctcttccctcccatcctctgcagtgtttagacgcagattccatgcaatggtgcagacaaagcatttgcttctgtagctagtctatctgggatcgtctccatctttggacagtacacagtgtgtttccatttctctgtgtgcacaatggagactgaaacttaaaagagtcaaagttcatagaaaggggtgtggctcttaacggctccatcacgaagcgagaaaggagaaatgctctctttccccatgtttctcaattcagtctgggcagatggtgctgcttccatccagggtgggccttgccctcggctaatcctttcagcaaactctcttccagtcacaccagaagtgtggctcactagtgttctggccatttcttcatcccaccaagctgatgagattagcatgcaagctcctcctgacattcgactccatcctatggagccctgaccccacggagacccaggcctggatccttgagcacatgaagtgcagttgtgcacttagcttcttatcaagggcaaacagcagtccttagtaccctcacctaaaaatagcctggcactggcacagggcaccaggagtctaaaggtcattagcaaagtatgtctgggaactgccctatggagttggccagagtcctttccacactagagatggctatgcgtccctgttctatgacagctccgcatcgcagtgttactggacagacagacttcactgttaatcggctccacctttattttcatctgaaactttggcaaattttattttcctctgtctgacttcaagttggaacacttcaactttgtgttctctaccaaatatctagaacctcacgtggttcggatagcttgcacgagtcctctcttgcctggcagggtgaagagggtcctaccaactaccccaagcacagcattctatacaccagcacttcagaaagactggcatcatcatagcccgggaaccggagagatttgctgggtcagggaaatgctgtgcccctctgctctccctcgcttgggattctcaggctctcaacagggataacttcagagtcggcttggtgctcacgtgacctggatgttctcagaggcgcctgcattttactgaatagcctgtcctccacagtcttgaaattcttcgtgtattttggacaaggggcccatgtgttcacgatttagtggcctctgcaggtcgagtagctaatcctgatgagatgactcgatgatcacagcgcgctttcaaatatttaattttaaaaacatatgtgtataactgtgcatctctgtgtttgggtgctcacagactccaatgttggattcctggatctgcagtttgcaatcatttgtgatccgcccaacatgggtgatgggaagcaaactaggaacttttccaagagccgtatatgctcttaactgctgagttatctctctagccctcgatgcattcttatttttttttattttcttgagattataatattgcaaaaaaaacccttttaaggcaagattgaattctggatttatattttatttgttgtcattttggttttgtgagttaggtaggatcttactccgtaatccgggctgacccagaactgagtatgtagcccaggctagacttggattcacagaaatcctcctgcctcctgagtgctagcgttacaggtatgtaccacaccgaacgaacccacacagccccccatggccttctctccagtacccccatagccactttggatgtgaagggcttgcggtatggccaaccaggcccatgtcttagagaaaagggtacatgagctctggaagaacggaactaaatcccgcaatgaactctcaagctgatagagaaacacgacatcgcaaggctggtctgcatgggactcctgacagcaaacgcagccgcaaacaagtgtgcagaaagcaatggtcagtgtttcctgtgcctcagtctctgcaagtgagctagggagagagggtgaacacggccctgtcacatccttgcatcataaggacgcagaagcctgacttcttaaagaccctggggagctgttggctgcggtgaatggggtggggggaggagacaatttattagtgtgatatatgttttctactttctaatgatacataaatcatcccctgagccacaatacatatggttaagtgggaattttaatgaaagcccccaccccaccccccgcagcactaattgctcagcagcagcagcagcagtaaattactcatccctgttgcctgtgggttgtggccattactctctcctccaggttgagctgatgtcccccaagaggaatgtttgctctgacaaagtggatttatgtcttccctgtgagcacaacacactaggttccaggggagagcattaataacactctggaccctaccctgcacatgtgtcacactgcccatattgtccacagtgataggtcagtgcattcggtcctgcctcttggtttgcctttcgggaggacatcggagtgctgctatcaatatttaatctcctcccactgtgagatttaaagatagacttggctaacaagcatgggtgtttcctaagtggcatgaaggggagggagaaggaaacatgattaatttaggaaaacactagataattacatggcgtgggatggaaaatgatgatgtcattaagaatcatgaattcaacacttatgtgttaagctttaggaccatgctgtgcaccgaggttgcaagggatgcgtgacaagatcactgtcctggtgagctgagttagtgtccaggagggcaaggctggtgcacaggcataaaatctcaccaaggtgccccaggagaatagaggccattcctgtgcctctctgaagtgtaaaatggggagaggactagacaggctgagagctgaggcacagggacaccacttttggcaggtaagggaacagaatgagaaaggcttgaacctctgaaagagaacttagttaggacaagagatagatcagccattagggaaaattatagaagagaagactgaagaagtgtccaggccagggcagaggactttgtgaaatgaaccacgagaccatagacttgagagccaagtgactcgatgacttggggtacagagaaataggcatgaagctttatgtgattataaaaagataaagagatataagatatattctataggggtgtggtgaggtatgggggaagaccccctccccccccccccctccccctgccccctcccccccccccccccccctcctccacctctccctcccctccctccacccacacccaattccctagcgcgagggtggaacactgagtaacaaacgcgtggaacatggtagaactaactgagttgatccagactacaccgatagctctgaaccctatcccttagtaatatagactgagctgtctgtcctgcttggacctaggaaacgaattctagatggcccaccgtaggcaggggccaggcccctgcaaaccaaccgatttcatcaaccccacactgacgtctgccctgatcttcacttctgcaatcctgcgaggatcccaggacggcacggtgcgtccgtgtggatgccaacgcccgcggtcccccgatccccgctcgcctcgagactgctactcccagccatgccccgcacctaacccccgcgccggcccgaccggctccccaccagccccggcgcccacaacccccccgcccacgcctgcccatcggcgcaaaatctcccgagtctcacgcaccccaggcccgtcatcctggcacccgcgggctgcacggccggcccctagccgccccgcgagagcgatcagcacggaatgcgccgnnnnnnnnnnnnnnnnnnnnccccccatcctcctcctcctccttcttcctctctctcttcctctctctctctctctctctctctctctcacacacacacacacacacacacacacatatacacacacacacacacacacacacgcgcacacgcaccgagacagagagagtaacagagacacacagagagatacagagagcctgtaattaagtgcaatgacaagcacagcagaaaactgtctgcacaggaacatatatgttccttctttctttcctttttaaaatctacccatacacgtgtttttctccctcagaaggttttttttcggccgtgttccagaggcttcctgccctcgggctgctcacctggaagggaaggtctggtttcataacttctgatgctgaggaatagctgtgtcaggccagataggtgatgtatttctttctctctcttcttttattagatattttcttcatttcaaatgttattccctttcctagtttcccctccgaaaatcccctatcctctcctccctccccgacccccaacccacctacccctattcctagtcctggcattctcctacactggggtatagaactttcacaggacctagggcctctcctcccattgatggccatcctctgctacatctatagctagagccacaagttccaccatgtgttttctttgattggtggtttagttccaaggacctctgggggtactggttagttcatattgttgttcttcctatagggttgcagaccccttcagctccctgggtatttttctggctccttcactggggacctggtgcttcctccaatggatggctgtgagcatccacttctgtatttgccaggcactggcagagcccctcaggagacagctatatcaggcttctgtcagcaagctcttgttggcatctgtcatagtgtctgagtttggtggttgtttatgggatggatccccaagtggggcagtctctggatggctgttccttcagtctctgctctgaactttgtctctgtaactccttccatgggtattttgttcccccttctaagaaggattctgagcttctggctaatatccacttatcagtgagtgcatatcatgtgtgttcttttgtgattgggttacctcacttaggatgatatcctccagatccatccatttgtctaagaatttcataaattcattgtttttagtcactgcatagtactccattgtataaatgtatcacattttctgtatccattcctctgttgaggggcatctgggttctttccagcttctggctattataaataaggctactatgaacatagtggagcatgtgtccttattacatgttggagcatcttctgggtatatacccaggagtggtattgctggatcttccagtagaactatgtccagttttctgaggaaccaccatactgatttccagagtggttgggtggtgtagttctctcctagagagggttgaggagaaacagctctgcaaggctctgtttcggcatcagctgacgatagcctcagcagttctgtgtttacaaaggtgtcaggaggtcggtgctctcactggcctgatcgcctgagtctggaagtgaacgtggggtcccaccactaacccagaagctatttgcaactgatacctgctgggtcaggttttctccaatggagtgtcactgcgtctaacaaccacatcacccaccccttcctttaacccaagttccccctctcacagtccccacaagcctcatcaatagacttcctcctacatcttttctcttgaaggtcaagttcctggaaaagcttttaaggcatggacgaatggataaatgaaggggtgggtgtatctgctggttcctctactagatctttgtctcaatgcataaatggttccacaggaagataagcactcggagacggaacctcaggctggtaagggatgttgggatgtgggagttagctgatagatagagtggtgacctccttagccctcccttatccttctctttaggactttaaaggaggtcttgacctgtaggctttaggtaagatgctccgccaacttgtccactttctgcattaaaaatgaaaccagaggccggtgaggcattcctgcttgccatgcaggggtaaggacctgagttcatgtcttcagcactcacgtaatggtatacccgcgatcccagcagcaggcatgaatgtggagatgacccctagagtctctggccaaccagcccagccaagtcagtgagatcctgcttcagtgtcagaccctgcctcgaaaaataagttagataaaagaagacaccatgctaatctctggctcatacaggtatgagcatgtagaacatgtagacacatgcacatatgcatgcatattcatacaaataggcacgtgtgctgtctgagtagctcctgcacatgttcacacacacacacacacacacacacacacacacacacacacacacacgagcacacacgatgaaggaactccatacgacaaaccccatagatatacatttggactctccccccacccccaccccaggagtaatagtccacttcacagtagcccgctgagaagacagtccactggctcaaaagtggctggagctagcgtcgggagctgtataacaaggaggactgggtattcagaggactccacacttaggaccttttagccacaaacattccagatgggatacagagtgcaatgtgacgggggaaaaaggtgtagagagagagaggagaaaacacagatgaacacggatctgaccctggaaatcacgaagggctttcggagttcaagactacaagagacagttttgaaaaccagatagagctgactatgtaaagcaaagcagaacaacaaaaccttcatgaaattgggagtggaaataaacgtcaaaagtacaacaaggggaaaacaactgaaacattgtagcatttcggctgcatcagcgtccttgcctctggagggacctttaagaagcctggctggggcagacaaagtttaccttctctcattcatatgccttatttaggttcctggagagaggcagggacaaaccgtttggatttatgatattgtttgaggcagggtatattctgtagctcaggttggcttggaactcacaatatagctctggctagtcccaaactcatagcaaccttcctgactctgcctctaagtgctggggtgacaggtgtgggccaccaagctcagatgtttgattgacttactatcacctacaagttttattgctatttgacctaccaagcacaaggagatgtatcaaaatgtccagggtcaggaatggcggcagtgtctctataaccatagcgctggcagtggtggtgtgtgtcagcagtggaggcaggcagatgctctagccaaatggtaagctcaaggctcagtgagagcctcttcaaaaactgaggtgacccttaataaaggaagacgctgcatgttgacctgtgacctacccatacacacacactcagcaacatttccattttactggagcaggtggggaaaggcgttttcaaatctgagggtttggatacccaagctgtctccttcctagcccttctgttctctgcctttatgggggagatgcttcattgtaacagaatggcagaatagccagaggtttctttgtgcaaggaaggacttctgttttcaaataacaacttgttaaggctttgaactcaaatgctgctggcgccgatgggtagctgaatatcggttcttacctttgtgggggagtcaaagggcccttagaagctccaagcctaaggctcagttgcttggtgatttaggtatgttaggttcctctgggtcttggaatccttatctgtaaggacacagataataaactagagggggcagagaggcccagaaagtgttcagggtcacacaggggtcactgctggtgctgggtgagacccaggcagcccatctagagagctacaatgttctcaggtcaatggaatgtccaggagaagtgacatgtcgggtgaactgagataagacttgaagaagtgaggttgatttagcacaagaattgttggaaacagaaaatgctctctggtgcacacagcatccttactagcccggtttcttctccctaatatggtttacatgttatgtggatagacaaagcatccgaacccttcaaagtaaatcagctcagttctgactaatggatcaaaagccagaatgtgcacagttagagcttactccttaaaacaaacaaacaaacattgctgcttggggtgggggcagaaggtggaacaaagccctgcccctccctgaagattcatgccaggtaatggttctgggggaggagacattttcatcaatagtgtaatgactgatggtttgcccaaacttctgtaaggaactgtgatgaagtttgttggttcacagaaaaacaataacaagaagaatctagggaggttgaggaagcaaaggggaactaattgggcgcatgattgggagttgggaggagacgggagagataatggaggatgaatatgatcaaaagacattgtatacatgtaagaaaacgccacacccaagcccattattatgggtgattggtatacgctagcaagaaactgataaaaatgtacatcctctaggatgttgtttctggcgtgaacagtgagtcaccaaatga

SEQ ID NO: 34 - DNA, 2385 bp, Mus musculus
ttccgcaaagtcccggggctgagatcagagcgctgactggaaggatctgcgatggcgtctctcgattctgaggtgagggaagagtgtctgagggaagacctgaagttctacttcatgagtccctgtgagaagtaccgagccagacgtcagatcccgtggaaactgggcttgcagatattgaagatagtcatggtaaccacacagcttgttcggtttggcttaagtaaccagttggtggtggctttcaaagaagataacactgttgcttttaagcacttgtttttgaaaggattttctggagttgatgaagatgactacagctgtagcatatacactcaggagaacacctatgagagcatcttttttgctataaagcagtatcgtcatctgaagaatatttccctggcaacccttggttatggagaaagtgaagacaatagaactggcttgaaggtctgtaagcagcactacaagacaggggccatgttttcttctaacgagaccctgaacattgacagtgacattgagacagactgcattcacctggaccttcaggtgctcaccacggaacccgaggactgggcacagacatctttcttcaggctggatttttatcggctcgtgcaagttgatatctcctttgccctcaaaggaattgacctacaggcagttcattcccgagagataccggactgttacctctttcagaatacgattaccttcgacaacacagcccacagtgggaaaatcaaaatctatctcaacagcgaggccaacatcgaagagtgtaaaaacatgaacatatctgggtctactcagagaagcactcactacctcctggtgtttgatgtgttcgtcattatgatctgcctggcatcccttatcctgtgcacgagatccattgttcttgctctgaggctgaggaagagatttctaaacttcttcctggagaagtacaaacagcgcgtgtgtggcgctgaccagtgggaattcgtcaacggatggtacgtcctggtcactatcagcgacctcatgacaataattggatccatattgaagatggaaatcaaagccaagaagctcacaaactatgacgtgtgcagcatcttgctcgggacgtcgacgctctttgtctgggttggagtcatcagatatctgggttactttcagacgtacaacgtgctcattttaaccatgcaagcctcactgcccaaagttctccggttctgtgcttgcgctggcatgatctacctggggtacaccttctgcggctggattgtcttaggaccgtaccacgagaagtttgaaaacctgaacatagtcgctgaatgcctgttttctctggtcaacggcgatgacatgtttgccacgttcgctcagatccagcagaagagcattctggtgtggctgttcagccgcctctacctgtattcctttatcagcctattcatttacatggtcctcagcctcttcatcgcgctcatcaccgactcttaccacaccattaagaagtaccagcagcatgggtttcctgaaacagatctgcagaaattcctgaaggagagcggaagcaaagatgggtaccagaagcagccatcggccttgctgtcctgcctctgctgtctgaggaggagaagaagcaatgaccacttgattctcattgactaaaacctttggctgatgtcagtcaagtccagatccctttatgctgaggtcattcagagagaccccagaggtagcagcagtcggctcaaagattgtcctgctgaattgtggaaccagaaggaggggtgtccatgagctgctgatcagacctgacattccaaagttacttttcatagacatggagtgtgaagagtaagcctcttgtgaggccagcgtggcaatgaaattcaccaggagtctggtcgtttgtgacatcataatgttgagatgtaaaaagaaatattcccacttcagagtgtgtaagcaatatttaaacccagataaagatgcatgcttattgaaaaaacaaagatttgtttcaaaacgtgacacttggatttgaagacatttgttaatttatggtctgcacagaaataaatttgcttccaaaccaaattaagacttgaagctagagagtggtaagccactcagttcgtgactggttggactgtgagcttgcttcttcagcaagcacaacaccagtgtctgttagcacagtcagcgggatgaaagagcacctggctgtcccctcaggtgagctctccctggactggacacatgatgagtgagtcaccctaagcttggagtggccatctgtttcacaagtcagctccattgtggtggggatttgcccttgtcatggaaggaagtgtagatttttcattaaataaatttattttc

SEQ ID NO: 35 - protein, 536 aa, Mus musculus
MASLDSEVREECLREDLKFYFMSPCEKYRARRQIPWKLGLQILKIVMVTTQLVRFGLSNQLVVAFKEDNTVAFKHLFLKGFSGVDEDDYSCSIYTQENTYESIFFAIKQYRHLKNISLATLGYGESEDNRTGLKVCKQHYKTGAMFSSNETLNIDSDIETDCIHLDLQVLTTEPEDWAQTSFFRLDFYRLVQVDISFALKGIDLQAVHSREIPDCYLFQNTITFDNTAHSGKIKIYLNSEANIEECKNMNISGSTQRSTHYLLVFDVFVIMICLASLILCTRSIVLALRLRKRFLNFFLEKYKQRVCGADQWEFVNGWYVLVTISDLMTIIGSILKMEIKAKKLTNYDVCSILLGTSTLFVWVGVIRYLGYFQTYNVLILTMQASLPKVLRFCACAGMIYLGYTFCGWIVLGPYHEKFENLNIVAECLFSLVNGDDMFATFAQIQQKSILVWLFSRLYKFISLFIYMVLSLFIALITDSYHTIKKYQQHGFPETDLQKFLKESGSKDGYQKQPSALLSCLCCLRRRRSNDHLILID

SEQ ID NO: 36 - DNA, 91697 bp, Homo sapiens
gttgaatcacggcgcaggtctttcccatgttcttctcatgatagtgaataagtctcactagatctgatggttttataatggagagtttccctgcagaagctctctcttttcctgctgccatccatgtaagatatgacttgttcctccttgccttctgccacgattgtgaggcttccccaaccacatggaactgtaagcgcactgaaccttgttcttttgtaaattgcccagtctcggttatgtctttatcagcagtgtgaaaatggactaatacactgctagattcagttagtattttgaggatttttacatctatgttcatcagggatgctggtctgtagtttcctttttttgctatgtcctttcttggttttggtattaggatgatacttgcttcatagaataattagggaggatttcctctctctattttttgaaatagtttaaataagattgatataaattcttcgaatatctgatagaattcagctgtgaatccatttggtccttgacttttttttgttggcaattttaaaattaccatttcaatctcgctgtctgtattgatcttttcagtttctatttcttcctggtttaatctaggatggttttgtatgtttgtatatgtgtatatgtgtgtgtgtgtgtatatatatgtatatgtacatatacacatatacatacatatacatacacatacatatatgtatgtatatgtacatatgcatatatacacacacatatatgtatgtatatgtacatatgcatatacacacacacacacatataaaatatatatattatatatatatatatatatatttttttttttttttctttgaggcagagtctcactctgttgcccaggctggagtgcagtggcatgatcttggttcactgcaacctctgcctcccggattcaagcaattctcctgcctcagcctcctgagtagctaggattacaggtgcacaccacgatgcccagctaatttttgtatttttagtagagatgagatttcactatgttggttatgctggtcttgaactcctgacctcaagtgatccacccgcattggcctctcaaagtgcagggattacaggcataagccactgtgcctggcccttctaggagggttgtatatttctaggaatttatccatctcctctaggttttctagtttgtgccttgaatgttcttttgtacttctgtggtatcagttgtaatatcttccatttcatttctaattgagcttatttgaatcttctctcttcttttcttggttaatctcactaatggtctatcaattttatcttttgaaagaatcagctttttgtttcatttaccttttgtattttttttttgtttcaatttcatctagttctgctctgatctttgttatttcctttcctctgctgggtttgggtttggtttgttcttgtttctctacttccttgaggtgagaccttagatcgtctgtgttttttcagacttcttgatttaggcatttaatgctatgaactttcctcttagcactgcttttgctgtatcccagaggttttgataggttgtgtcactattattgctcagttcaaataatattttaatttccaccttgatttcaactcaacaatcatttaggcacagattatataatttccatgtatttgcatggttttgtgagttccttttggagttgatttccaattttattccaatgtggtctgagagggtacgtgatagaattttgattttcttaaatttattgagacttgttttgtggtctatcatatggtctatcttggagaatgttccatatgctgatgaaaatgtatattctgcaattgttgggtagaatgttttgtaatatctgttaagtccatttgttctagggtatagtttacatccattttttctttgttggctttctgtcttaatgatctgcctagtgctgtgagtggagtattgaagtcccccactattattgtgttgctgtctatctcatttcttaggtccagtagtaattgttttataaatttgggagctccagcattaggtgcatacatatttaggattgtgacattttcccgttggactagaccttttatcattatataatatccctcttttttaagtgttgttgctttaaagtctgttttgtctgatataagaataactagtcctgcttacttttggtttccatttgcatgatatatccttttctacccctttaccttaagtttatgtgagtccttatgtgttaggtgaatctcttgaagacagcagatacttggttggtgaattcttatccattcagccattctgtatcttttaagcggagtggttaggccatttacagtcaacgttattgaaatgtgaggtactattctattcatcgtgctagttgttgcctaaataccttttcttttcattgtgttattgttttataggtcttttgagatttatgctttaaggagattctattttggtgtattctgaggttttgcttcaagatttagaacttcttttagcagttcttggagtgctgacttggtagtggttaattctctcagcatttgtttgtctgacaaagactttatgtttccttcatttatgaagcttagttttgctggatacaaaattcttggctgataattgttttgttagaggaggctaaaaataggaccccaatcccttctaacttgtagggtttctgctaagaaatctggggttaatctaacatgttttcctttataggtttcttgatgcttttgcctcatagctcttaagattccttcattcatcctgactttcaataacctgatgactatgtgcctagttgatgatctttttgtgatgaatttctcgggtgttctttgagcttcttgtatttggatgtctagatctctagcaaggccaggaaagtttcccttaattattgcctcgaatcttctttctcagaaacaccaattattcttaggtttggttgtttaacataatcccaaacttcttggaggctttgttcattttttaattattttttctttgtctttgtcagattgggttaattcaaaagccttgttttcaagctctgaagttctttcttctatgtatttgattctatttttgaaactttccaggtagcttgcatttctctaagtctgtctttcatttccagaagttgattgtattttatttgtgttatttttctggagattttttgtccatatcctgtatgattgtttaaatttctttaaattggctttcacatttttctggtgcctccttgagtagcttaacaattgaccttctgaattctttctttggaaattcagagatttcttcttggtttggatccattgctggtgagctagtgtgatcttttgagagtgttgaagaaccttgctttgtcatgttaccagaattgtttttctggttccttctcatttgggtagactatgtcagaagaaagatctgggactcaagggctgctgttcagattattttgtgccatggggtgatcccttgatgtggtactctcacccttcctctagggatggggcttcctgagagctagacagtgattgttattgctgttgtgggtctagccacctaatggagcttgggctccgggctggtactggggagtgtctgcaaagagtcctgtgatgtgatctgtcttcaggtctctcagccatggataccagcacttgctccagtagaggtagcatatgagtgaagtggactctgtgagggtccttggttgtagttttgtttagtacactggttttctcaaatgctttctcttgtcttttcttatatgggtgctagggcactaattgccccaggctacaagcctctccactgaaaaagccagcagggctttcaggccctacctctcccagcttgccactgcttctgtggtcctatctgcacttcccgtccatctcccactcctggattctgcctaggaaaattcacacttggtcaaaattattacaaagctcaactggaagtttccttctccctatggtccttccccaattccattggcagccctccccaaggaccccagtgagataaagtcagaaatggcttccctggtgactgggagcacctagagggctcttcccagtgctgcttctacttttatatttttctcagctctctaaattcatttcagctctaggtaaggttaaatccttctcccgtgatctggattttcaggttccccagtgaggatgtgtgttcggaggtaggctttcccccttcacattttgggcactcacaatttttcagctgcctcacagagtttgcagccacaagccactttttcaaagagtctgtgaatcctttcagtgttcctggtatgttcctgtggtagttcttggagcaaaagctcatgatgtcagtctccacatgctgttctgttcatctgagtgggagatgcaagttagtcctgcctcctatctgccatttttttttcctggaggctgactttttaaatacaacactgaaagcatgatccatgaaataaataattgataaattagtctttattataattaaaaacttctactctatgaaagatatcatcaagagaaagagaagacaagctgcaaactaggagaaaaatacttgcaagagacttatctgaaaaaagtattgttattcaaaatatataaaaaattcatatatttttctttttgagatgaggtttttgttctattgctcaggctggactgcagccttgaactcctaggttcaagcaatcctcctgcctcagcctcccgagtagctaggaccacaggtgcataccaccaaacccagctaattaaaaaaaaatttctttcatagagacaggatctctcttttttgcccaggctggtgttgaactcctggcctcaagcaatcctcccacctcagcctcccaaactgttgagattactggcatgagccactgtgcccagcctaaagaactcttaaaactcaacaataggaaaataaacaatcccattaaaaattaagcaaaagacctgaagagatacctcagtaaagaagacatacagatgaaaaataagtatatgaaaacatactcaacatcatacgtcattagggaattgcaaattaaaacaagataccactacacacctattagaatggccaaaacactgaaaattccaaatactggcaagtatgtggagcaataggaactctcattcattgctggtgcaaatgtaaaataatacagccactttggaagataggcagtttcttacaaagctatgcttttaccatacaatccagctattgtactccttggtatttaaaaaaaggaactgaaaacttgtgttcataaaaacctgcacacagatgttgataacagctttatctgtaattgccaaaacttggaaaaaaacaaaatgtcctttagtaggtgaatgaacaaatatactgtgatgtattaattcaatggaacattattcagtgctgaaaagaattgagctatcaagccatgtgaagacaaagaagaagcttaaatgcaaaaatgccaaatgcttaaatgaaaaaagtcaatctgaaaaggctaataccatatgattccaactatctgaaaaggaaaaactattgtgaaagtaaaaagatgagtggttgccaggggttggagggagggatgaatagaaggagcacagaggattattagggtagtgttttaatcagtttgtgctgctattacagaatactacagaccgggtggcttaaacaacagaaattgatttctcatagttctagaggccacagaatccaagatcaaggtgctagcacacctggtgtctgctgagggtgctcttcctggtttgcagacagccatcatcttgttatatcctcatatggtggagaaagagatatatctctctcctgttttttcttatatggttactagggcactaattgcattcacgagggttcgaccctcaagacctaattacctcccaaatgccccgtctccaaatgtcatcacattggggatttaggttgcaacatataaattttggtgggggagggggattggtaaagtggggacaaacattcagtccacagcaggcagtgaaactattctgtatgatactatagtggtagatacatgtcattatacatttgtcaaaacttagagcctgcacacaagtgaaccctaaagtatggactttgagtgataatttgtcaatgtatattcattgattataacaaatgtactactctggtgtaggatgttaatagtgtgggagaggctatgcgtatgtgggagcagggaatatataggaactttgtactttctgttaaattttgcaataaacctaaaactgctctaaaaagagtctatttttaaaaaattaaaataagaataaatattttgtaatacatggaacacagccactctcttttttacatattgtgtatgattatctttacactagatagttaaatatttgtaaaggagaaagtacaatccgcaaagcctacatatttgtatctgaccttttacagaaaaaaaattagccaaccctgaattataagatagcttgctggaaactggcttacttgatgtcgaaaaatcgaggtgcattaatatctcccaccacatgcaaagttgaagtacaatggaatttgatatgaaggataaaactattacagaaaatgcagaagaatggtgaattaagggtagagaacaacttctttaaaaagatcataaaagcacaaactataaggattaatatccttaattttgatttcctataccaaaattaaagactttcatccaaggaagaacaccatggacaaaaagatagatgacgactggaagaaaatacttataatgtttagaactggcaaggaattaatatctacaatatacagaacactacttgcacatcaaaaaatttttgaaagaatgtgaaagtaaataaagagcatcgtttttctcttattttattctattctccctccccatattcttcacaataaatattttttgtctgcccaacctagaaaatttaaattgttgcatttctactagcctgactcacattttcttttcttttctttttttcttttccttttcttagactcggtctctgttgcccaggctggagtgcagtggcacaatcttggctcactgcaacctcgacctcccaggctcaggcaagccttccacctcagcctcccaagcaagctggaaccacaggcgtgggccactatgtccagctaatttttgtatttttggtagagacagggtatcgctatgttgcccatgctattcttgcactcctgggctccagcaatccaccctccttggcctcccaaagtgctgggattacaggtgcaagccactgtgtccggcctatctcacattttttagactactttctaaaatttcccttttaacactaaatcagtgaaacttccacatgaagacaaactgctagagaaatttaagaactttaggttgtaaaattaaaatgtcatattataaaacactgttgagcaaaagattcttgtgttatttggttattggtcattacaaatttgagtcaggacacaaagctttttgtgctatgatattcagaacagaacacaaatgcttgaaaggattaacatagcacaaaacaatgtctattactacacactgaaaaatgagccatgatctttaccacaaacaagtgactttttgaaagttaaaaacttaatgcctactgagaattaaatttactaattgagaatgattagattcaatggctgaaaactttagtatgtgttatatttataataaatccttcagccatctgactccagtaattttccactcttactcttctccccccttaattcccgcacacactcagattaaatatttcttagaaccttgctacttacagagtgggaccagcagcagcagcagcagcaggagcatcttcttgctagaaatgcaaaacctcaggtcctactgaatcagtctgcttcaataaaaactctggtgactcatatgcacattaatgtttgagatcctcagatctcccttttgaaactatttctccgtctgcaggggtccccaaaccccgggctccagactggtacaggtctgtggcctgttaagaaccaagccgcgctgcaggaagtgaacattgagcaagagagcagcggttccactcgattctcataggggcagaagccctactgtgaactgcgcatgcgatggatctaagttgcaggttgtgtgctccttataagactctaatgcctactgatctaaggtgcaacagtttcatcccgaaaacatcctcccctcatccccccacctgtccgtggaaaatatcatcttccatggaaccagtccctggtgccaaaaggttggggtcttactatgttgcccaggctggagtgcagttactattcacaaagctggatgattgcgcacctccgatgaaaggggctcaaaaccaaggcatttctgcctaataaccccttggaagtgccttaaaagagggtcaattatgtgtgcttttatatacatcgtctgtccaactgcttctgcctggacacgcatattaaaataattacctggcagaatattctttgcctgagctaaacccggagatcttttaaacgcttgcagactcacagagcctggcactgcggactttgctgctgctacctcgtgaaaaggaggggtacgagctctaggaggctgtcggccacgtccaaactaccaagctaacatcactaggagccgaacacggcttttggtcatgtactgacgactctcatctctaagattcacgaacggcgaccgattgtctgttcgatttcccacaggcgtcttcctttcgtgcaccaagagggaaaagcaacggcggctgcagcagggcgctggggttacgagtccagccctggggccgtgcgccctccctccgcgcccgccgggccacgctgacgctccctcccggctccctgcctttcatcccgacgcgggcgcagggcaactcgcttttcctattccttgcgcgccggtcgcactttctaacatctcagaaatatggcccttgtcacagactttcatgatcgtgcactttagagaaaagccagaatgaatgaacttgtcagtttaatgtgaagtcctcaagggaaaggaccatgtctttgtcatcccagagaccacagtacccaacggtcggcttggctctcagtgagtgtttccctaagcatcaaaacaggaatgaccaaagcaacggacaaattaatgcatgtggaaacaagaaatgaatgcatgagagagtgaagaaaagaaggggccaggcgcagcggcttacacctgtaatcctagcactttgggaggcggaggcaggagaatcgcttgggtccaggagttcaagactgcagtcagcagtgatcgcaggtcaggcgacagagtgagacccggtctcaccaccacccccccgaaaaaggcaggaaccccagagggccgggagtgccaggtgcggccgcccgggagcggtgtggagggtgcgtgggccactttgccgcagggcccaccgcccgggtccctctgtaaggcgcttctccggcagacaccccgagccaaagcgggccgtaccgcagcgttgggcacttgggtggagagtgcaagggcggcgggcctgcgcccagacaggtgtagccgtcccacgctaggtgtcctcctgccgctccctggccgcgccatgcctcgaggcatggaggtgctggacctgccggtgtgcaaccgcgcctcgggcctgtcctgggggccgcaccacaggtcagtgccccacggcgcccttggcgtgccccacgcctccctgggggccccaccgccgcccccttttgggactgcttacttcctcggctcttctcgcgcgcgcctcggttccatcccctacggcccccaccccgcctccgcgtcgccgacccccttctccgggagcgcggggaggctggtccgctgaagcgtggaataagtcccctaggaccccaactggggaagctccggtccccggtaggaggcggcggggcggggcggggcggggcagccccttgggggcggggcgggagcgcctggccacgcgccgcatcctgcagggtgcacacagagccgcctttcagccgcccgagaactgcccgccgcactccgcgactgcggcgcctgctctcgggccggggtctgcgcgcaccacgcggccggcagaaagggtaagagaagggaaccccgctttgcagggctccaacttcggcggacgcgttacggcgagggcgaaatgagtcggccgtgaacggtgtttcctgttccgaatcccgagagccctggaaagttttgaaggaggaggcatggcccggcagccttatcgttttccccaggcaaggattccggagagaggatcaggtgttttcaggttaaccgtcaggtgaggagtctgggcttcatctttcaggatgctggactggagaaatcttcctaaagtcgatggctttactttcgtagactagagcttgcttgctgccttgggaatgcttatattaactgcttgcagttagttaaataaggctaggctgtgccttccagaacaaacaggcctttccctcaggtgggagggttgtagtgtggctaaccccagttcctcggcctttatgaaaaggcgcacagttcagccggttggcgctgccagcgggcccctcctccgtggtcaaagctccagccaccccagcacagttgagccaaagttgtgagtacaaacagaccttggctcccccgtttcctgctctccaaacatatatatatatgaaatatatacgtatgtgtaagtgtgtgtgtctctggttgaacggtacttgtgggaaacaaaattgtgtgtcattgtaaactgagaatggaagaaaaggttagtaagagaaaggtgggagaggtttcttatgggtgtcaggatgtagactctgatattttatgtagagggaaccaactacgtagttctccccagaaatgggatgtgggtttcactctcaggagctgctcatcacctttgtgatgtgctaaccaaaatcgcacaacttttgggaaatttgatagctttcccctattgagtcagaagtttcttgagactttagcctgtcttcctcttcataccttaagaggagtcaaactcccgttgccgtgaactttccacaggcacacccttctcctttagaaaaccgttcataggtcagtttctgtggccggaactctaaaaacgacacattttccatacagaggccatcataataccaattttatttaacctcctgtaataaaaaatgagtgaatcctaataaagtgtttgaggtagccacattcttttctgtgaaggaggaacatatcaaaagtgtttttttttttaaaaaatagagtaatagatataaaatattttaatgaagcaagtgagaagaactgagagacatagtttgagcaaaggggcacaaaatacagaactgaaagtcaagaatgatcatattcacaagctgatctctttggctatgtctctgtcagtgaagtgaaacctagaacaagacaattttaaaaccggcggaaaaagagatggcttcttgtgactatagctttcaaagtaaaagtagtggccaaagaaaactcttctggctgtaaaagtaaaagtggactttcctgaagctgggctgttttctttaaggcctagggtctaagttccgtgtgtcagttctgaagaattaaatcactctttagtgagctcttgtgtcacatgttaaggggttcatagaaaaaagtgcaggcataccttgttttattgttctttgctttattgcactttgtagatactgcatttaattcaattttattttattttacaaattgaaggtttgtggcaaccctgtgtccagcaagtctattggtgccatttttccaacagcatgtgctcactttgtgtctctatgtcacattgtggcaattctctcaatatttcaaactttttcatcattattattatatctgttatggtgatctgtgaccactgatctttgatgtgactactgtaattgttttggggtgccatgaactgtgcccatataagacagggaactcaattaataaatgttgtatgtgttctgactactccaccgaccagccattcttctatctcttttcctctccccaaccctctctattccctgagacaccacaatattgaaattagcccaactaataaccctacagtggtctctaagtgtttgagtgcaagggacaatcacaggtctcttactttaaaggtaggagtgattaagcttagtgaggaaggtatgttgaaagctgagacagaccaaaagctaggcattttgtgccatttagccaagttttgaatgcatatgagatgttcttgaaggaaattataagtgctactccagtgaaaatacaaatgataaggaagcaaaacagccttattgctgttatggagaaagtttttgtggtctggatagaagatcaaaccagcaccaacattcactaaagctaaagcataatctagagcaggcccaaactctcttcaattctgtgaaggctgagagaggtaatgaagctgcagaagaaaagtttcaagctagcagaggttggttcatgagctttaagaaaggaagccatctctataacatgtaagtgcaaggcgaagcagaaagtgctgatatagaagctgcagcaagttagttggaagatctagctaagatcattgatgaaggaggctactctaaacaacagattttcaatgtagacaaaacagccttctattggcaggagatgccatctaggactttcctagtagagaggacaagccagcatctgatttcaaaggtgcaaaggacaggatgactctctagttaggaactagtacagctggtgacttttaagttgaagccagtgctcatttaccattccaaaaatcctagggcacttaagaattatgttaatctactctgcctctgctttgtaaatggaacaacaaagcctagatgacagtacacttgtttacagcatgatttactgaatattttaagctcatggttgagacctactgctcagaaaaaaagatttctttcaaaatattactgctcattgataatacctctgatcattgaaaagttctgatggagatgtacaaggagatgaatgttgttttcatatatgttaacacaacatccattctgcagcccatggatcaaggagtaatttcaactttcaagacttattatttggccgggcgcggtggctcacacctgtaatcccagcactttgggaggccgaggcgggtggatcatgaggtcaggagatcgagaccatcctggctaacaaggtgaaaccccgtctctactaaaaatacaaaaaattagccgggcgcggtggcgggcgcctgtagtcccagctactcgggaggctgaggcaggagaatggcgtgaacccgggaggcggagcttgcagtgagccgagattgcgccactgcagtccgcagtccggcctgggcgacagagcgagactccgtctcaaaaaaaaaaaaaaaaaaaaaagactattatttaagaactacattttgtaacattataggttgccatcgaaaattattcctctgatgaatctggacaaagtaaacccttctggaaaggattcatcatcatggatgccattaagaatattcatgattcatgggaataggtcaaaatattaacattaacaggagtttggaagaagttgattttatccctcatggatgactttgaaggggtccagatttcagtagaggaagtattaggtcagtgaaaaagtaattgtgggttttgtccttacttttaatggcaaaaaaacacaattacttttgcagcgatctgctaaccacagatgtggtggaaatacccagaaaactagaagagaagcctgaagatgtgacagaattgctgcaatctcatgatcaaactagaatggatgaggagttgtttgttatggatgagcaacgaaagtggtttcttgagatggaatctactcttggtgaagatgctatgaacattgttgaaatgacaacacataatttagcatattccgtaaacatagttgataaaacagcagcaagttttgagaggactgactccaattttgaaagaagttctactgtaggtaaaatgcaatcaaacagcgttgcatgcaacagagaaatattttgtgacaggaagagttaattgatatatcagacttcattgttgtcttcttttaagaaattgccctaaccaccccagccttcagcaaccaccaccctgatcagtcagcagccatcaacaaggaggcaagaccctccaccagcaaaaagattacagcttgctgaaggttcagatgattgttagcattttttagtatgaagtacttttaaattaaggtggttttttttagacataatgctattgcagacttaatagactatggtatagtgtaaacataacttttatatgcactggaaaaccaaaaaatttgtgtgacttgctttactgcagtatttgctttattgtggtgatctggaaccaaacttgcaatatctctgaggtgtgcctgtaattttatttccagacttcatcttatcaaactacaatgttctgttcagtattaaatgtttacagccatgtttttggtttgtttatttgtttgctttggcaatcatctgaatttttttttcttcccgttcttctcagcctgcctatagctgagcttgctactctgttttgagcttgggcctcagccccttttttcctggtatgagagactgtgtccagcgaatgttgtccatattccttttccctcagctgggtgggctgtttcctttcttctcttttgaaggttgtgttttgttttctccccttgaatacatctctgtaatttcagcctaaaacatctgcgaggcaataattgataactcatgaggcagaagattcttgaaaatagtctttggtgtaattctagaagacccacaatttaaatggtggccttaaaaaattgtactacttatgccaactacagggattttctagagatagctagaatgtagggattcaccaacatgaaactgagttgggcttgtccaaaattaaggtaacctcaatgctttgaggaaaaaatgattatttctttataatttcttttccttagggagagtcatcagcatgactctattaagttgggctcttactgaaaatattggagaaagaaaaatgttaggaaatgtcataattccagtcatcttcctcagttttaactgcatgtggaatcctttattgctgagaaatggagtttccctttctttatctcttcctcagagaactgtttcttctagtttccaaaggagtgtggcttgtttagaagaagcactttaaaagtatgcagccctagttctgctttcctggtgttcagaggcagcaaagtggtgatcagaggtgatttttaggaacttggtggcacggttgtctgtagggaaactcctgaagggttagcatgttcatctttcatgagtggctctaatggaaaatgaaaagcccctatggcctttcttcagggggcttcttagggttagaatgaccatgtcatttatgttctgagagctgtgctgagaagggaaccaaagttttcttctttgccttttttcccctcaacttcacttaattgacatctgcctgccctactcagctacctcaaaacctcagttggctagatatttttctttcttcctctcttgtgagactagcagatcacgagaaaatttgttcatcataggaattggagtgaaaaaatgacgtgcgagttgttaggaatggtctaaagcattttatctgttgaactgcccctggtattatcctggggccaacacagtcattactgtagaaacattgaattttagtctccgtatctatcacttcttccaccctctaccccaaaccagtcgtgcacaaactaaggcagggaaatacctgactagctgatacataccagactctttctttttgaaatggcccattttaactcataataataactcaagaattcatacgttaaccaccaaaaatgaaaaaaatatggaaaacttaatgaagaaaattaagattacctataatactacttcacagagattataaaaatatggaggcttttttggctggctcacatgcttctagactttaaaatgtctatatacacatataaatgctagcttttttttttccagcctgggtcgtgttctgtcacccaggctggagtgcagtggcacaatgacagcttactgcagcctcaaacttcaaggctcaagcgatcctcctgcctcagcccccccaagtaattgggactacaggtgcctgccaccactcctggctagcttattattattaattattattattatttctagagatgggggtctccctatgttgctcagactggtctcaaactcctgggcccaagggatcctcctgcctcagcttcccaaagctctgggattacaggcctaagccaccatgcccagcttatgctgacattttttgaaaaatgagatctcactatatctattctgtaactttaaaaaaattacaatatgttatagacatcttcaagtcagtgcaaaggtacgaatagggccgcaattaacatttctataactaactcattattttaaaatttgtattataaatccatagaagtttgattcttttttttaattattattatactttaagttttagggtacatgtgcacaatgtgcaagttagttacatatgtatacatgtgccatgctggtgtgctgcacccattaactcgtcatttagcattaggtattttttttttttttttttttttttttttttgagatggagtctcattctgttgcccaggctggagtgcagtggcgcgatctcagctcactgcaacctccgcctcccaggttcaagcgattctcctgcctcagcctcccaagcagctgggattacaggagcacaccaccatgcccggctaattttttttgtgtttttagtagagatggggtttcactatgttggccagacttgcctcaaactcctgacctcgtgatccgcctgccttggcctcccaaagtgctgggattacaggtgtgagccaccacgcccggcccagaagtttgattcttaagtcacttttatagatactgcccaagtgccaatccaaatttacatttcttttaatagtttgaaaatcattcctcataaataaaaattaagataggtttttaccaacctgattgttagtaaatttttattgttcaatgttcactggcttgttcagattcattgcctattacattggattgtctttttcttaatagtctggagctctttacagatcacaatagatagttaacttttgcctgtgtaaatatattgcacatttttctccaaatctctttgtcttttaactttttgaagtcttaaatttttatgttaagatctttcagtcatttttacatcttctaaatttttttgtacttaaaaaggcatgttaaattattttaaaaatcctatatattatactactatcaattttgttttaaaaatatgtctaaattttatttttgcactcagtttgagagaatactctttctctttcccaaatggatagcaaattattttaataacaactcattgaataatttattctttggaaagactaggaataatgagtaaaacaaagtagggtttctatcatcagcaaaccaggcaactaaattacctacaacttgctaatgtatcttgactaagtaagacttacttttaaatatatttttaattcactttttaatactaatattttagactttctattatttttatcatgttattaatattgttgttattattatttgatcacaaaagatattaaccaaggaaaagttcgtgtagtcaagattgatgtctcattattgattcatttgttttttccaacagattttcattgaacacctattatgtgttagatactatgctgtatgctgggctatatggttataaacaagacccacccttcatgaagtccattgtaggggagaccaataaagattgtgattgcaattatgaaggaaataaagtgatgatagaggcagtggggaaggccacattaatagagtggccagagagccctctctaccgaggtgtcatttgtgctgagagatgaagggtgacaggaagaaaccagacacacaaagagctgggggaacagcagtagggtggatgaaatggtgagtgaaatgtgcagagcggggactgtccacacccaggaaggaagtcattgtgtagtgaggaaggggaagagggtatgggaggagtgggcaggagtcttttagcagttgtaggaggtttggattttactctgagagaaggggaaagcccctaaagggttttaaacaaagaagtgatatctgacttatgcttttaaaattacccctctggccactatgtgaagaattgggaggctattgcagttgggtaagagatgacagtgcttggaccagggaggctgcagtgcatagacagtgatggggaccactccttgtggttttgaaggaaaacttgataaattgaatgtgagaattgaatacaaagggaactcaaagtatactttagagcagtatactttagagcaaagtatactttgctacacattagaatcacctgagtaacttataaaaatcttgatgcccagttcagtcatcctactaattaaatcagaatgtcttggggctgagaggcaagcgctgaaatattttaaaaatcctcaggtgggctggacacagtggctcacacctgtaatcacagcactttgggaggccgaggtgggaggattgcttgagtccaagagttcaagaccagcctgtgcaacatagcaaaacctgtctccatttaaaaaagcaaaaattaaaattaaaaaaaaatcctcagatgattctgctgtgcacccaagatggagaatggactaaggattgcagctgggccactgattgcactaaggattccaactgaagcattttttaaaaatactaatagcaatgcatttcttttaaaaaaattatttcagtagtttttagggaacaggtggcatttggttacatgaataagttctttagtggtgatttctgaaatttttgtgcacccatcacccaagcagtgtacactgtacccagtctgtattcttttatcttttacgccattccaaccctttcccgagtcgccaaagtccattgtatcattcttatgcctttgcatcctcacagcttagctcacacctataagtgagaatatatgatgtttgtttttccattcctgagttacttcacttagaataatggtctccagatccatccaggttgctgcaaatgccattattttgttcctttttatagctgagtagcattcaatggtgtatatataatctatatacatctatacatctatatatctatatacatatatacatatgtatgtatatatttctatatacatatatacatatgtatatatagattgatatacatctatatacatatgtatatatctatgtatacatctatgtatacatagatgtatacatctatgtatacatagatgtatacatatatacatatgtatacatctatgtatacatatatacatatgtatatactattatgtatatagtatacatatgtatatatgtatatatatctatatatacatatatgtatatatgtatatatctatatacgtatataggtatatacatatataaatatatctatatacatatgtatatatctatataaatatatggatatatatctacatatatctatatacatatatctatatatctatatacatatagatgtatatgtatctacatggcatatgtatatagatatatatatacatctatatgtatatctatatacatatctatatagctgtatatatatgccatatatatagatagatagatagatagatagatagatagatatgcctatatatatcaccttttctttatccattcattgattgatgagcatctgggctggttttatatttttgcagttacaaattgtgctgctataaacatgcgtgtacaagtatctttttcatataacgacttcttttcttctgggtagatacccagtagtgggcttgctggatcaaatagtagttctacttttagtcctttaaggaatctccacattgttttcagtggttgtatgagtttacattcccatcagcagtttaaaagtgttgccttttcaccccatccccgccaacatctattttttgattttttgattatggttattcttgcaggagtgaggtggtatcacattgtggttttgatttgcatttccctcatcattagtgatgttgagcattttttcgtatgtctgttggctatttgtatatcttcttttgagaattgtctattcatgtctttagcccacgttttgatgggattatttttttttcttgctgatttgagttccttgtagattctggatattagtcctttgtcagatgtatagattgtgagattttctctcactcattgggttgtctattctgctgattgtttcttttgctgtgcagaagcttttttttttttttttttgagatggagttttgatcttgttacccaggctggagcgcaatggcactatcttggctctttgcaacctccgcctcctgggttcaagtgattctcctgcctcagcctccctagtagctgggattataggcatgcgccaccaccatgcctggctaattttgtatttttagtaaagacagggtttctccatgttggtcaggctggtctcgaactcccaacctcaggtgatctgcccacctcggtctcccaaaatgatgggattataggcgtgaactaccacgcccggcccagttttattcttctacatgtggcctgccaattattccagcaccatttgttgaatagggtatcctttccccactttatggttttgtttgctttgtcgaagattagttggctgtaagtatttggctttatttctgggttctctattctgttccattggtttgtatgcctgtttttatatcagtaccatgctgttttggtgactgtggccttagagtatagtttgaagtcaggtaatgtgatgcctccagatttgttctttttgcttagtcttgcttcagctatgcaggctcttttttggttccatatgaattttaggattttttttcctagttctgtgaagaatggtggtggtattttgatgggaattgcattggacttgtagattgcttttggcagtatggtcattttcacaatattgattctacccatccatgagcgtgggatgtgtttccatttgtttgtgtcatctatgatttcttttagcagtgtttggtaggtttccttgtagaggtctttcacctccttggttaagtgtattcctaattttaaattttggttttttttgcagctgttgtgaaaggggttgagttctttatttgattctcagcttggtcagcagctgaagcatttgaataagtgtgtacagatcactgctttgagcagatgggtggaggagcaggtggagggcaggtttgagagaccaattagacctgtgggtggagtttcataaaaagggttggataaggaagtctgctcaagagagagatttgctggagatgcaaatatggaaacccacatcatgtagagagtatttaaagtcataggattggacaagctgttttagaacagaagatggagactagaagaacccatactgtgccccaaggcactctgacatcaagaggaggggggtgtcctggaaactgacagaagaggttgtcccaaggaggtagtggtcagctgtatcaaatgctgctgagccaataagcctgaaaagtgtttattagaatctatagcaagaaatggtttaccctgagcattttaatggagtaatagaaatgggaacccagtgtttgttctagagaatctgtaccacaaagtcagcttgaggaggtaaatgctgggttcgttccatcagatggctttacttttttttttttcctcattttgataatatgaccatgtagaagtttcttgaatgtatggactaggatggctgtttgccaaaatgtcacacatttttaattttatttcaatttttctttgagacagggtcttgctctgttgcagactggagtacactggtgtgatcacagctcactgcagcctcgacctccctggacttgagcaatcctcccacctcagcctcccaagtagctgggactacaggcacgagccagcatgcccagcaaactttttgtatttttagtacagacgggttttgccatgttgcccaggctgttctcaaactcctgagctcaagtgatccaccgccttggcctcccaaagtgctaggattacaggcaagaaccaccacatttggccatattgagttattttatcctttggtattaatatattgcttgctttcaacaaaacaggaagagaggaatggatactgtgcaggcaactagtagtgtctgtcacaggaagtcttaacaatttacttttcaggcttcctttcccaggaagggattgaagaatattctccacaaaatgagagagtaaagaaagaagcagacatgggatccaagagatggggattccaatttaggaaggtggtgaaggagttcccaaagttatggccttgaaaagtgattagaaagcaaccaggtagatttgagcaaaaggattgtgcaaaaagcattgatgtatctctgtggaagaaaggaattgacagggtacctggcttgtgtgtatttaagggtgctgtcagattcagccagagtttggtgataaagttatagttggtatgcagaaaactaaacaaatggggaaaagggcagttaattccaggaaaatagttggaatgatgaagaatataacattacagtatgttaatagctcaactctgaagaatttttacatattcacttcataaaatctaatgttaatttatccaaaatttgcattaaaacttggttgggaagatgagtagggaggtgaaatgtatgttggggagcagatataagagctaaatccatattttccaagggaggattcaaattgataatacctaaaatgaaaaaatagtggcataagtattatttagaaattttaaagtagggctgggcgcagtggctcacgcctgtaatcccagcactttgggaggccgaggtgggtggacataaggtcaggagatcgagaccagcttggccaacatggtgaaaccctgtctctactaaaaatacaaaaattagctgagcgtggaggcgtgcgcctgtaatcccagctactcgggaggctgaggcaggagaactgcttgaacccgggaggcggaggttgcagtgagccgagatcgcaccattgcactccagcctgggtgacagggcaagactctgtctcaaaaaaaaaaaaaaaaaagaaattttaaagtaaatgacttttaaaaagacagataaaagtagttgcacctaaggaacagaaatcggaggtggggtttattaataattcatttaaaattatgtacagaccaggcgcagtgtctcacacacctgtaatcctagcactttgggaggccagggggaaggatcatctgcatccaggagtttgagaccagtctgggcaacgtggcaagaccctatctctacaaaaaaataaaaaataagctgggcatggcagcatacacctatggtcccagctactctggaagtgaggcagaaggattgcttgagctcaggatgttaaggctgcaatgagccatgattgcatcactgcaatcccacctgggtgacagagtgagatcctatctcaaaaaaagaaaaagaaaagaaaaacaaaaatacagttgtgtacattattaaatttgggggaaataaaggtggtggggagttaggtgagaccagattgtgcagagccacacagatttgggttgctggtgtggagacctgggaggctggcttaccactcactgtgatgaggataaaaatgaaggatagatttgggaagtgatttgccctgcctaccctgccccatcccctgagactggtaagatatacttgtgaattaaaaaaaaaaaattcttccggactcagtggctcacccctgtaatcccaacactttgggaggccagggtgggtggatcacctgaagtcaggagttcgagaccagcctggccaacgcagtgaaaccctgtcactactaaaaataaaaaataataataataaaaaattagccgggcatggtagcaggtgcctgtagtcccagctactctggaggctgaggcaggataattgcttgaacctgcaaggtggaggttgcagtgagtcaagatcgcaccactgtactccattttctgtattttctgtttgtttgttggggtcaggggaacaaacataaatttctttaaagctaacaagtttataatagcagttaggacaacaaagaacaaccacagctaaggggtggttggagctctgaaacaataaggaagtagttccaaatattttttataacttgttcccaacagttgaaagaacatttaccctctctaaatacgtattcatttacatatcatatgctgaaccatatgtatattatgaaacagataaaatgaacattttaaggcatgggatagatgaggatattaaaaatgaattgccaggctggacatggtggctcattgcctgtaatcctagcattttgggaggccaaggccggaggcttgcttgaggccaggagttcaagaccaacctggccaacatagtgagaccccatctctatttttttattttaaaaaattaaaataaaaaaatgaattgccaaatgcagcaactttatgttatgacttcatagtgtcattagcaaatatcttatggtactatatatttagagccatgcacctcatttagcagtagtagatttaaccaatattttaaattgttttcttgataaatctgcttccccccaccccagcttcttttcaaatcagatacacttttcatcttttttttaaaaaaaaaaaaacccatggctaacaacatttagagtgttagctctcctattttttgatattaatttaggcttacattagttttacaataaacgtaattttttgcaataattttttatcttttatttttaatttttgtgggtacattgtagatgtaatatttatgggatacatcagatgttttgatacaggcatgtaatgcattataatcacatcatggaaaatggggtattcattccctcaagcatttatcctttgtgttacagacagtccaattatactctttaattatttttaaatgtacaattattattcactgtagtcaccttggagtgctatcaaatactaggtcttattcattctttctctttgtacccattaacccatccctactgcccctttatcccccacctctctgccacactattcttcccagccgctggtaaccatccttctactctctctgtccatgaatttaattgttttgatttttagatcacacaaataagtgagaacatacggtatttgcctttctgtgcctggcttattttacttaacataatgatcgccagttccatccatgttgttgcaaatgacaggatctcattttttatggctgaatagtactccattgtgtgtatgtaccacattttctttatccattcttctgctgatggacatacagattgcttccaaatcttagctattgtgatctggtctgcaacaaacatgagagtgcagatatctcttcgatattactgatttcctttatttttggcatatacccagcagtgggattgctagatcatatggtagctctatttttagttttttgaggaacctccaaactgttctccatagtggttgtactaatttacagtcccaccaacagtgtatgagggttcccttttctcaacatcctcaccagtgtttgttattgcctgtcttttggataaaagccattttaactggggtgagatgatatctcattgtagttttgatttgcgtttctctagtgatcagtgatgttgagcaccttttcatatccctgtttgtgatttgtatgtcttcttttgagacataatgagtctattcaagtcttttgcccattttgccataaccagattattaggttattttttatagaattgtttgaactccttatatgttctggctgttaatctccagtttgcaaatatcttctccctttctatgggttgtcttttcactttgttgattgtttcctttgctgtgcagaagcttttaaacttgatttggtcccattcgttcatgtttgctttggatctgtgcttgtggggtattgctcagtaaatttttgtcctggagattttccccagtgttttcttgtagtagtttcatagtttgaggtcttaaagtctttaatccattttgatttgatttttgtatatggtgatagataggggtttagtttcattcttttgcatatggatatccagtttccccaacaccatttatttaagagactgccttttccccagtttatgttcttgtcacctttgtcaaaaatgagttcactgtaggtgtgtggatttgtttctgggttctctattccattccattggtctgtgtatctgtttttgtgttttgtatctgtgtaataccatgctgttttggttagtaaagctatgtggtatattttgaagtcagataatgtgattcctccagttgtgttctttttgctgaggatagctttgactattctgggttctttgtggttccatatcaattttagggttttttttctatttctatgaagaatgtcgtggatattttgatagggattgcattgagtctgtagattcctttggagtgtggacgttttaacactattgattcttccaatttatgaacatgaaatttctccatttttggtgtcctcttcaatttctttcatcagtgttttatagttttcattatagagatctttcacttctttggatgagttaatttctaggtattttatttgtggctattgtaaatgggagtactttttaattttctttttcagattgcttactcttgcacatagaaatgctactgatttttgtatgttgatattgtgtcctgcaactttactaaaattgtttatcagttctaactgttttttagtggagtctttagtttttttccaaatataagatcatctcatctacaaacaaggataatatgacttcttcctttccaatttggataccctttatatctttctcttatctgattgctctagctagaacttccagtactatgttgaataacagtggtgacagtaggcatctttgttgtgttccagatctgagaggaaaggctttcagtttttccccattcagtatgatactagctgtgggtatgctgtatatggttcttattatgttgaggtatattccttctatatccagtttattaagggtttttatcatgaagcaatgttgaattttatcaaatgctttttcagcatcaattgaaatgatcatattgtttttatttttcattctgttaatatgatgcatcacattgattgatttgcatatgttgaaccatccttgcatcccagggataaatcccacttggtcatgatgaatgatctttctaatgtgttgttgaatttggtttgctagtattttagttgaggagttttgcattaatattcattagagatattggcctgtaattttttttatgtgtctttgtctggttttgatatcagggtaatactggcctcataggatgagtttggaagcattgtttcctcttctatttttcagaaaagtttgagtaggattggtattagttcttctttaaacatttggtagaattcaacagtgaagctgtgatggttaatatgagtgtcaacttgattggattgaaggatacaaagtattgatcctgggtgtgtctgtgagggtgttaaggagattaacatttgagtcagtgggctgggaaaggcagacccacccttattctgggtggacacaatctaatcagctgccagctgggctagaataagcaggcagaaaaatgtgaaaagagagactggcctagtcttccaccctatgtctttctcccatgctggatgcttgcagccctcaaacatcagactccaagttcttcagttttagaactcggactggctctccttgctcctcaacctgcagatggcttattgtgggaccttgtgatcatgtgagttaatacttaatatatgtattatatatgtatatatgtatatgtgtgtgtgtgtatatatatatttatacacatatacattccattagttctgtccctctagagaacctgactaatacagaaaccatcaggtcctgggcttttctttgctgggagacttcctgttacagcttcgatctcattacttgttattggtctattcaggttttggatttcatcctggttcaatcttggtaggttgtgtgtgtccatttcttctatattttccaatttattggtatatagttgctcatagtatccaagaatgatgtgaatttctgtagtatcagttgtaatgtctcctttttcatttctgattttatttattggatcttctctctggctaaagttttgtcaattttttttagctttttgaaaaaccaactttttcattgatcttttgtatttctttatttcagtttcatttatttctgctctgatctttatttatgtttctactaattttgggtttcgtttgctcttgcttttctagttctataagatgtatcattagattgtttatttgaagtttttccttttttttgaagtaggcagttaaagctataaaattctcttttagtactgcttttgctgtatctcttagattttggtaggttgtgtttccattatcatttgtttcaagaaatttttaaatttctttcttaatttctttattgacccactggtcattcaggagcattttatttaatttccatacatttgtatagtttccaaaattccttttgttatttgtagttttattctgttgtggttagaaaagatacttgatattatttcaattttgttaatgttttaagacttgtcttgtgacttaatatatggtctgtccttgagaatgatccatgtgctgaggaaaagaatgtgtattctgtagccattggatgaagtgtcctgtaaatatgtattagatccatgcagtctatagtgcagattaagtccagtatttctttgttgattttctgtatggaagatctatctaatgctgaaagtggggtgtttaagtctccagctgttattttattggggcctatctctcttattagctctaataatatttgctttatatatctgggtgctccaatgttgggtacatatatatttaaaattcttatatcctcttgctgaattgacccctttatcattatatagtgaacttttttgtctcttcttatagttgttgtcttaaaatctgttttgtctgacaaaagcatagctactcctgctcttttttggtttccattggcatggaatttctttctccatccctttattttcagtctatgtgtgtctttataggtgaagtgtattttttgtaggcaacagatcagtgggtttttttttcatccatttagccagtctatgtcttttgattggagagtttagtccatttacatcaatgttattattgataattaaggacctactcttgccactttgatttattttctgattgttttgtggtcttctttctctccttctttcttgtcttcctttaatgaaggtgattttctctggtgatatgatttagtttcttgctctactttttgtgtatctgttgtatattttttggtttgaggttaccatgaggcttgtaaatactatcttataaaccattattttgagctgataacaacctaaccctatttgcataaacaaacaagcaaaaaaaaataactaacaaaaactctatgccttaacatcgtctccccaactattaaactttttgttgtttatatcttattgtactgtctatgtcttgaaaagttgttgtagttattattttttattggtttgccatttaatttttctacttaggataagagtagtttacacaaggcagttacagggttataatattttttgtttttctgtgtactttctgataccagtgagttttgtaccttcaggtgattacttattgctcattaatgtccttttctttctgattgaagtactctcttcagcattttttgtaggacaggtctggtgttgatgaaatccctcagcttttgtttgtctgggaaaatcttttttttgagatggagtcttggtctgtcacccaggctggagtgcagtggcatgatctctgctcactgcaacctccgcctcctgagttcaagcaattctcctgcctcagcctccccagtagctgggattacaggcctgcgccaccatgcctggctaatttttatatttttagtagagacggggtttcatcatgttggtcagactggtctcgaactcctgacatcgtgatccacccacctcggcctcccaaaatgctgggattacaggtgtgagccactgcacccgaccttgtctgggaaaatctttatttctttttcatgtttgaagaatgttttcaccagacatactattctagaataaaagtttttctccttcagcactttcaatatgtcatgcccctcactcttggcctttaaggtttccactgaaaagtctactgccagatgtattgatgcttcattgtatgttatttgttttttttatcttgctgcttttaggatccattctttaaccttgatctttaggagtctgattattaaatgccttgaggtagtcttctttggattaaatctgcttggtgtcctatataaccttcttgtatttggatattgatatctttctctaagcttgggaagttctttgttatttccctttgaataactttctactcctgtctctttttcttcctccttcttaaggcaaattactcttaaatttgccattttgaggctatttcctggatcctgtaggcatgcttcattgttttttattctttattcttttgtcttctctgactgtgtatttttaaatagcctgtcttggagctcactaattctttcttctgcttgatcatttctgccattaagagactctgatacattcttccttatgccaattgcatttttcagctccagaatttcttttagattctttttaattatgtcaatctctgttaaatttatctgatagaattttgaattttctgtcttatcttgaatttctttgagtttccttaaaagagctattttgaattatctgtctgaaaggtcacctgtctctgtttctccaagattgggtccctagtgccttattaattcatttgatgaggccatgttttcctggattatcttgatacttgtagatgttcatctgtgtctgggcattgaaaagttaggaatttattgtagtcttcactgtctgggcttttattatctgtccttcttcagaaggctttccagatatttgaaaggacttgggcattgtgatctaagttctatctgctttggagggcaccccaagcctagtaatgctgtggttcttatagactcatggagttaccaccttgaacaagatctagaagaattctttggattaccaggcagagactcttgttctctaccctttttgtctccctaacaaatggagtctctctctcagtcctgagccatctaaagctagggatggagtgacacaagcacccctgtggctactacctctgtgactacactgggtcagacctgaagtcagcacagcactgggtgttgcccaaggccggctgtaactactccctggctacttcctgtgtctgcttatggctctggggctctatagttagcaggcagcaaagccaaccaggcctgtgttcttccctccaggatgctgagctcccccaggaccctcctgggtccagaggtgctgtccaggagtcagggactacaataaaaaaccttagaagtctacctagtgttctattgtatcgtgcctgagctggcactcaaattacaagatgcagttcttcccactcttccctcccctcctccaaaagcagaggagaccttccccatggtcatcaccaccagaagcccatgggcagtactgccagactaccactatgttctcttaaggcccaaggtctcttaagtcagcttgtcatgaaggttgtctggcctgagactcatccttcagggcagtgggctcccttctggcccacggaaggtccagaaatgccatccaagagtcagctcttagaactggggactccaggagcccacttgttgctccaccccccaatagccgagatgaacctgaagccagcaagtctcagaggctcacccaaggccctagatgtagtacctgggtatcgctgctgattattcagtgcccaagggctcttcagttagcaggtgatgaatgctgccaggaatgggttcttcccttcaaggcagtaggttcccttctggcccagggtgtgcctagaagtgttgcccaggagctagggcctggaacagaggcattatgactctgaccctatcatgctgtggctgagccggtatccaagatgcaagacaaagtcctccccactcttctttctcctctcctcaagcagaaggaagggatcttttttggagccactagttgtgcagcctggggttaggggagaggtgatgtcaccactcctttagccaccctggtagtttggtagattgcatgcccctctagtccactgtttctgggcccagttcagcactaggactcgcctagagttgcagtccttgtggcctaaattgcctttcaaattcacttagacacccagagcactttagcctgcagtggtgaagtttgtgggaactcaagttccaaccacaaggacctgtgattcccctctggctagggctggtttaaatgttccctccgtgggtgggcatcagctgaatttggtccagttttcctttctgctctaaccgggcagaaccgtttactgcctcacaattgctgtgctctccctccctcagcatgcagaggcactctgcgcaccaggtggccactgctggggctgggggaagggtggtatcagtgcttcaggactgttttttctacctcttcagtgcctcttttagcaatacaaagttaaaagcaggtagtgcaagtgctcacctgatttttggttcttatgaaagtgctttgcttacatagatagttgttaaattgatgtcctcttgtgaggggatgatcagtggaggcttctcttctgccatcttgctccaccttctgggcttttgcaagaatctttatgtcctttgcctatttcgcaagggttatttccacggaaactagatgatacattctaaaaatgcttaagtgggcccacataaaccataactggtgggaatatgctgaaaatcaatgggggtaccaccatgaaccccctaatttgggaaacttgacaatttccccaggatgtctcacatacctaagtgaaacacaggcacctgatgttttgttttgttttatttacttgagacaggatctctttctgttgtccaggctggagtgcagtggcaaaatcatagctcactgcagccttgaactcctatgcttaagcgaatctactacctctgtctcccgagtagctgggactataggcatccaccaccacactgggctgattttaaaaagtttttgtggagacagagtctcactatattgtccaggctggtcttgaactcttggcctcaagtgatcctcctgcctcagtctcccaaagtgttgagattacagacatgagccactgtgtcagtcccatcagatgttactgaccgagtgagggcaccttaggtgtgataggtaacaattcatatattaaatcttgggaattctttacttctctattttctaaattaacacaattagaagccctaatagtttcttctcacataccagtgaatggtcttgcatacgtccttgtgcacaaggaccccactttggagacaactgcagcaggggataaaaacaactttcaggccccttgtcaagtagggggatcacataagccaaaggcaatagcatcctgggctggttagcttatttgctgacaaaataccatcactgaaactggtgtattcattttcctggggcaaaggtcaagagcctttttctgttctcataggggtttataaccccaataaggttaagaatcactgacatcttgttttgtttcaaaacttcaggcttccgttagactcttagtcattgttttgataaagctgaaattgcccttgatcatatgatagccttaaacttagccaatgtcacacagtcctgattatttgtggagagagtaggttttcttaatgccaacctcatagtcctgattatctgtggagacagtaggttttcttaatacctgacagtagctttgttgtgccttcctcctggtttcttaccacagtaccagtctcagccttcttttctttcattttctattccagcatctctggcttttatttaacccactgtatgggtggctttctattctatttcagatcttatttttatgccttcaaatactatgctttttttctttgatattttgttctttagtgctgccattattaagcttataaaaatccagatcatgcatttcctatgggttaatgaaacataaataattcataaaagctgtgattgctcttatttatttcatgcaatttcaattgcatgacagccctgtagctgatgggtctgtgtaatttagatcttcattgatttctgttccttaagtggttttacggtacagttactttcattctcctgacttatgttaccacaagttagcagctgtatgcttttcttaaactgttggtgattttcatttgtgatggaagttgcagtatttctgccgtctgctgacttaatttttttgtttgtttgtttttgttgttgtttgtttttgtcccccaggttggagtccagtggcacattctcagctcactgcaacctctgcctcctgggttccaagtgattcttgtgcctcagcctcccgagtagctggggttacaggtttgtgctaccatgcccagctaattttgtatttttggtaaagacagggtttcgccgtgttggccaggctggtcttgaactcctgtcctcaagtgatctgcctgccctggcctccgaaagtgctgggattacgggcatgagccaccatgcccagcctctgctgacctaattcttggttatgaagcctggttgtaatttaagactcctgtaaaacccccagccaggtgttcagcattgcaaggtatatagggtaaatatgtgttaaataaaagagtgttttatttctatgatattgtgttgtctctctctttctctgttttaaaatttttttccctctttactttgcaccatttttataccattttatttttgttatagcaataagatatcgtgtgtgtgtgtgtgtgtgtgtgtgtgtgtgtgtgtgtgtgtatgtctgtttaatacccttcatctaccaggacaaacctacaaatggggaagagggaggcaataaagagccctcagaaaagtaaagtttagaaagtttatacatttatattttccttgaaatatcagaatttttaaatttttaaatttttaaatttcattatcttttcctcccaaatgtacatattattttaaaacttaggtttattaaaaaacagctatctcatcatgcacctttattattcattatcaactcttttcccctacatgtctatcattttttcatcagttgactagtactagcttgtatttcactagttggctcatgtactcttgagggaaatgtttttcctgctagttttttcatttttcatctttcatattgctaaaagtattacaactgctctgtaaatacccaaatgaaacaattatggaaggatagatagtataaatagtgtaacacaatgagtgatctcacagtcattatctgctactttgacctttttcttttctttttgcctgagacttcttaataaagtttcttagggcaatgctaacatcagttatcatttcttgaacacttaatggccactcagtcaaaggaacccagcagtcagaagaattatttgaagcctcttgaagcaattgggctgcatcaagcactctctgtttccagggcactcagtgaatatttccagtataactcttaactcattgtatcattcttttatctattcacatttgctcctggaaggcaggaaaatgtctccagcagagcatggctcacaaggtattcttttatttatatttatttatttatgagactgagtcttgctctgttgcccaggctgaagtgcagtggtgcaatcttggctcactgcaacctctgcctcctgagatcaagctattctcgtgtctcagctgcctgagtagttgggattgcaggcgtgtgccaccacacatgcctgttattttttttttttttttgtatttttagtagagatggggtttcaccgtgttgtccaggctgatctcaaactcctggcctcaagtgatccacccacctcaccctcccaaagtactgggattacaggcatgagccaccatgcctggccagtattctttaagtatttgattaaatgccttgttttgcaccactgtttcgagaaaacaacttcttcgtccttcagttcagtgtttctcacccagaggctgtgtgtgtgtgtgttggggggtggggggagttggggggtagtttctatggctttattctcaagggcctgagaattcagtgtacaccatttcatatactctttttattaaatgaaaaagcatattttgagtcatcaggagggatgctttagcaacactgatccactacagtgatagcaattaacactaaattcagtattgctgaaacatgcccacaggggattcttacaggcatgttctcaggagatctgaaagttcatgtttgaggatgttgctctcaggcacagttaagatgcacctttttcttggaaatgcctccctcaatgcgcccagtcacatgcccccgtagcacttaccacatcgtctattatgactcttatgggctttcccaccagctctctcacccctctctctagagtcaaaactctgcttccgtaatatttacttattttacagcattcacggaactctttaataattatgcattgacaagtctttctcttctactggacactaagcatgtgcagttcagggttattcagccttgtgtacccagcacagtgcttgctccgcggactaagtgctcattaagttggtcaagttgagtcaagaggtgagtgtgtcaggctcaggacaaacacatgtttaaggccttcacattcttttgaatgagactcattgtggtgattgctttttcatttcttttttttttttttttttgaggcagagtcttactctgtcatccagactggagtgcagtggtgccatattggcttactgcaacctctgcctcccaggttcaaacaattctcttgcctcagcctccgaagtagctgggattacaggcatgtgccaccacacctggctaatttttgtatttttaatagaaatggggtttcactgtgttggtcaggctggtctcaaactcctgacctcaggtgatccacccgcctctgcctcccaaagtgctgggattataggcgtgagccaccgtgcccagccacctctggaacttctgactgtccaacttcaagttagggttcccatgactccctctttgggtttgaatgatttgctagggaggctcacagaactcagggaaacacatttactggtttattgtaaaggttgttacaagggatacagtgaagaatacatgaggtaagctatggggaaggagtgtagagcttccgtgccctccccgggtacaacaccctccaggaactgccatgtgttccggaagctctcccaaccctgtcctcttgggccttttatggagactttattggataggtatgattgacaaccatgtagaaatgtgactggacaaaaagggtatgaacaaacactaatagactgcatgagggaaacccagcaaggcctgtctgttcagatccttctggcctctctgtgcagccttccttcttccagggtttggggcaggaccccttctgaaatgggagtcttgtgacctacaatcagacagggtaggtcagagaatttttttatggctggctcctacacagcaaggtggggaagatgcctgtctttgggacaagaaggagcaggttaaaggagatcaggagaaggtcagagagattatgttttctgaggcctgctcatgaggccttaaggcgcctcaacagtataacaaaagctatgggagttatgagctaggagctgcggacaaaaaccaacatgtatgtatgtcataatatcacagatggtaagcatggttattttctaatgtgtctaatttccaatatgcttagtcctgtttctgtttttagtctgttttatgtcacttggtttcctcatgtgcttagttatatttaactacctgtttgtcattgtgttttataagttatttattagagtgccaagtcttaggatgaacctaagacacagagttctgtgggtgtttccggggatatgaagaacagttccagtctgggtcctccagaaccaagcaggcccacagtttgaagttccctggctcacccaggtgtaaggctcaaaggtttatgagccttatttaatcatggcctggtttatgggcattctttatcaggatgggtctatttttaaatttcctttttcttttctttgatttggaaccactctggccttctctgtagtcctataaatttgaggacaggcagttttgatgcctttgggcctagaatcttggctctcttgttcccgtttcctgaggccacagaacggaagctgagtgtacttgaatggtggcaactggctgttactcgtgtaggtatcccccaagattgacccaggagttcttgctctccttaactcttcaatcttttaaaggtacttcttcaccctcctcaagaagaatgtattgtatctaggatttttcttttccttccttccctccctccctctctccttctctcccttcttccttccttccctccctctctcccttcttccttccctccctccactactttctctctcctccctccctctctcctttttctccttccctccctccctctctcctttttctccttccctccctccctccctctctccttccctccttccttcccttctcttcttctctccctctttccttgctttctctctttctttcctcttttccttcctttccagcatgatagttctgaataacttagcccactaatactagaaacaggagatttaaaaatctatttagaaatagtaaattattaacaactgacaataagctttaaaatgggcatccccttttaggattcttttagattcgtcagtcaaggcagataacatagatcatcagtcagtataaaaatatgtcacttacatatttccagtaaacagaaccttaaaaaatgacccacaagtataaaacctttccaagaaatgagtaacttgaatgattagcctaacttactagaatttattctttacccttaccatcaagatacttcctaaggcaagaagtcaaactcaaactggcttaagccatgaagggtatttgttgactcaaatggaaagacttgggatggattacttcaggaatagctggatccaggaattcaaatattgtcattaggcatagtgcctgtctacctgaccttcagtctctgacaagctctcctttggtggtgagatggattttaggaactccggactcacagtctatgcttgaagtcactgatctccaaactttgttgattatgtacccaacagtaaaagttgagcataatagtcccaatgtgtatatatttctttatatatgatatgctactggatactacttttatgtgttatataatgtatattctttgttatggtgtacatatgctgtaagttatattgctgtgttgtatgtatattctatgttgtactaattatggagttcaatttttagtttttaatataaataataaaatagaaatactaatattttttatactcccaatggattgttttcggcactccactttggggactacaataacagtcctgtgaaccatgtctcattggttctttttggcctaccttgagtcatgtgcccattcctgagtccagagtccttgaaatagtaaaagcaaaattttattaatataaagtgacaaatatctgagtaggcttaaatagagagatgctatttatctttttgaagctatttatattctggaatcatataatcactgatattttatccaaaaaaggagtcatagtccttctctcagtacagagttacagaacaaagattctcttcttccataacaatctaattccgtttgtttatactaattttctgtaatgtcatacctggagtatcatgaaaatgtcctgtctggtttttgttcatatactcactcacttacaattcatacacacacactcacacaaacataaacatacatactttctgtagtgacagatgaatgctctatgttaagatgtaggaattgatgagtcttgtaagtaaaatccaatttttataattcttgagattgaccattttgttttttttattttgtttttaaattttaatttttttgagagggagtctcgctctgtcacccaggctggagtacagtggcgtgaccttggctcactgcaacctccatctcctgggttcaagcaattctcctgcctcagcctcccgagaaactgagattacaggtgcccgccaccatacccagctaatttttgtattttagtagagatggggtttcaccatgttggtcagtctggtctcgaactcatgacctcaaatgatccacccgcctcggtctcccaaagtgctgggattacaggtgtgagccaccacgtctggccgagattggccattttgaacaagatgggtggctgtgtggaaaggtaggaggtagaaggtctggaataatttttcatgtagttttagaaatgggagaacctccctgccataactagagttgcttttttattttgtgttcataaagaggcttttcagtatatgacatgccatatgtaccaactcaagtttagggaaagcaagttacttcaaaaggaactgagggagaggctttcctggatatttaaaattaatcttctgtggcagaaatgcaatggcacatcgtgattctgagatgaaagaagaatgtctaagggaagacctgaagttttacttcatgagcccttgtgaaaaataccgagccagacgccagattccgtggaaactgggtttgcagattttgaagatagtcatggtcaccacacaggtaacctatcttattatttcatttggtttttcccttaccacaagacaaaactcttttcatgtgttctgtacttgacttttgttctgaaaagcccacactcaagttcataaaactaaaattatattgactctggagagcagaggctaggttgaagttctgtttagaagacaaccttgtcatagtaagagatcctgagggcctctctgtacagattctataaatgctgaataaatgcagatctgtggggaggggtttctatatctgagtgacacacatttgtgttctggaactctctattaaacacagcttattcaaatatacttccaaaatctgcatttttttgtcttcagacttatggaatcctaagttttccttttatcgtaacagtgtgctctatctaagtaaatactgatcccaggcgctatcaggattatacaaaagctacatttagaccttttgttcaagttcgtattattgagctctttattaccatgatcaaaacagccatcagagttttcctctagttttggggcctgtattgctgaaccagtattggggaggcttctctgtaggtcagggatccctaacccctgggccacggacctgttaggaaccaggctgcacagcaggaggtgagtggtaggcaagggagcaaagctttatctgttttttttagctgctccccatggcttgcagtactgcctgagctctgcctcctgtcagatcagtggtggcattagattctcataggaacgcaaacccaattgttaactgcacatgcgaaggatctaggtgcggctccttatgagaatctaatgcctgatgatctgtcactgtctcccaccacccctagatgggaccttctagttgcaggaaaacaagctcagggcccccactaattctacattatggtgagttgtataattgtttcattatatattataatgtggtaataatagaaataaaatgcacaactagtgtaatgcacttgaatcatcctgaaaccattacccacccccccccactcctgccccactccagtccctggaaaaattgtcttctacaaaaccagtccctggtgccaacaaggttggggatcattgctgtagttaaccatatttgaaacacacgcccttttaaactgattggggatatttggctctattggcaaataatcattctgttatcagtgtagaggtgtgtaaagatgttatttctggaacataaaaataaatacttaaaaatacctttagttttagaaatgggagacggtccctgccataactagagttgcttctttattctgtgttcataaagaggttttcagtatatgacatgccatatgtaccagctcaagtttagggaaagcaagttacttcaaaagaaacaacaaggttgagatgcagagacattgttaaatgtgtatgcttattgttagcttatttcattctttgttttgaagttttggtcttggcaaccaataaaatagatacattgatacattgttagtattacttggaaggagaagaaataatgtccccttttttcagttggttaattttaattgtttcccaaaatcttttcttgctaaaccaacttccttcaattatttgatctattaacgttactaaaattctaatttacccagacataaaatatcattgccatctgtattagtgtgttctcccattgctataaagaactacttgagactgggtaatttatgaagaaaagatatttaattgacttagttctgcaggctgtacaagaagcatggctggtgaggcctcaggaaacttacaatcatgggggaaggcgaggaggaagcaggcacatcttcgtatggcagagcatgagagagagcaaaggggaaggtgatacacacttttaaacaaccagatctcatgagaactcactcactatcatgagaacagcaagggggagttctacccccatgatctagtcacctgtcaccaggaggcccctcctgcaacattggggattacaattcgacttgagatttggccagggacacaaatataaaccatatcaccatcttggatttaccttctttttcctgatacctactaaatcttattgattcttccttcaaaactgcatctatttatgttttcccatactcactatcttctctctagcacagactctttagttaatgaaaaataaatgtgaagcatctcatattgtgggccttctgttgggaatacaactgtgactgtattaccagtgctgctgacagctaacagttagcttagtgtttgccatgtcctaggcacaataaatgttttatgtacttcaactcatttcatcctcattgcaatcctgtgaggtaggttcaattataatcccctttttatggatgaagaaactggagcaaagggagttaagtaatttgcttacaatccttcagttagtaagtgacagaactgggatttgtgcttgggcagtctggctctggagtctgtactcttctcagactgtttctattctagatataggtcctgtcctcagagtttgcagtgttggaatatagataagttaattaggcagcttctagctttgtcttatgcctacctttcttatccatatacattcgatgctaatatcagcttaatttttcgtagaatagactttattgtgtcactctcctgttcagaaactcctataaaaccctacttcccaagaagaaaatttcacctctctagccaggaattcaaagagttccagtctccttcaacttgtctttccaacaagttttcatctactatttcctacccaaatcccagccagacaggccaacccaatgattctcttccacatcttgtttgttcgtccaagtccggggtgattctttttctccctcacctttcaggtactatttgaagtcccatctcccccactgggccttgcctgaccatccagcacatggttttctttggtacttcttcctgtctacatgactaattttattttttattattttttcaagatgaggtctctctgtgtcacccaggctggagtgcagtggcacaatcatagcttactgcaaccttgaactcctgggctcaagagatcttcccacctcagcctcttaaacagctgactaaaggcacatgccactgcacctggctttttattttatttttgtagagatggggtcttgctttgttgcccagacttgatttgaacttgtggcttcaaacagtcctctcaccttggcctcccaaagggctgggattacaggcatgagccactgtgcccagcctactaattttactttaaataacaaaatatttctgggaactgtagtttacttttcatgtgggcataccctgtttcccctaataaaattgggaaggattaaacttttgtttccatataggatcattctaacaaattttgctatttgggtgatatctaattggagcagatttcttgatcacctttccttgcataatatctcacttttccctccctctctttttctgtctttttgtgtttcatcctcaagtctaatgggatgggtatgaggactgatgagaaagaaaatttttttaaaattcctgctctgaattgtgcagtaatttataatcttgagagaggtgtctacattcttttgctagttctactctttctctcccatatcctttgtacataattagagcagtatcttgtttttacctggtacagaatattttatcctacattgatttcataatgaggtcttaaattcacaatctttgccagactacacttataagtaattatttttctgtcttgtatcatactctcagcaaatcttaatgtctaattagtgggactaggatgcattttgctgtcaatgcctttaaaaaaaacccagtcatttggccaataccatcttcccttactcttactctgcagggagtgtttggttctgtcataacaagaaagggacttcgcagtttcctcccaaccttccccaatgctgggccatacatttttatcttggcttgttctatgaatagaatggaggaaatttcttgctcctgatgccagataggggaggttccaagcagagattacaacagagtcctctcatccccaaagctgagttttgatgagctttgagtttaaggttatggcttcaaatatcagcaaactatataccactttcatggtcagttttttcattccctagtttacatttttttttatttctttagcttcactattaatgtgggaggaatgggtctaatatccctgcctctagagttaaattggcagcatttcagtttaagaggctgtggggccaagaggttgagagaacaaacagactctagaatcaatcagacctgggtccagatccttactctaacattttctggatattccaacctggataaattacttgacttcagattgcatatgtatcaaatgggattatattcatcagctgattcagtgtttgacattgtgatgggcattatttcatttcctgagtatataatagcagggaaaaaggaaaaacattcctgtccttgcagagcccagtgtaataatagggtgttgagaattaaatgagaaataataattataaattttagcacaatgcctggttctcaacagataagagttgttattccgtaccatgcagtgttcttttccacgttgtataccagcttggcttagagtaagcactcagcaaactttgattgaagaacttcattcatgtgtggtgtgtgtaccagttttttcatatgtgtcagtagttttaataaaactttgaagcaatcatgtatgtgttgcttccctggtttacattttagctttcaagagcaacatgaccttttctggcttctcctacaggcaccattgacagacatcacatgcttagaagaacttataaccttctgttgcttaattttcagcacaagctggatgatgtgggacttcttatctgatgttttccttagaatagctgagttttagcagttgcacaatcctttgacatggcatttgaggaatgtgacatggtgagactcaaatgctgaacagtagcatctgtgtaccttctcaagcgatagttgcctttcctaattttgaaaagctagcacttaagttcattataagaagcatcctaaagaactttttcagcagaaggaagttgtttttatagcataacacagatgactttggaattagacttggcttccattctggtgacttgggcaatttaatgaggctaaatctcaggttgcacgtatgtaaaatggaataacagtagtaacattttcatagtccgcttggggtaaatgaggcactgcatgtaaagcagttagcacagtacctggcatataataattgctgaaaatggtgattatttttcctaattctttagtattttttaagacaacaaaatataaaagctaaaaaatgtaaaccatgaaaaaaccgtatgcctgtatgttgtttgcatatgcaaattaatattagctattttactttatttttttagagacaggtcttgctatattgccaaggctagccttgaactcctgggcttaagtgatcctcccacctcggcctcccaagcagctgggactacagccacaggccacctcacccagctaaattaacattagttttatctgaattgttcagaattgtatcttgtatattattgttcagatgtatcatattgaaccatggaatgacaacaaataacagaactgtcagggtcatctagttacacttgctaattttacataggaagaaaacagtcccaaaatttggtggcttagttgagtgaggacttggagcaaactttctagtctcattgttttataaggcagctgaagaaatcacttagggaggtggggaaaggtgtgtgggacagggcttatagagatttgactaccgtcactgcctgtgtatgtatgtgagagagacagagaggacgcacgtgagagagtgtgaatgtgcgtgtgagagtgcgtgtgtgatgaggtatgtgtgtagctgtgtgtgtagtttcctaggttttgtgtaaacttttggtgctgactaatttcctccatttattgggttccaagaagaaaactttcacttctggtgaagagagcccttgggtgcctaaattctgccagaatacagtgaaagggagaataagtgggcattttttcagtaggtggatgcttggtgacaatgaatgggtttgacatcatacaagtaaagcatgctctgttattctttcatgtgctttgatactgtagaatttggtgagggaaactctcaggtgtaaattttatacagaattcttgcagagctgaattaattgaattcttttgacaactattacctcctagctggagtaagtttttatgtaggctacttttcaaaaaacacttttaaaagccatatgtaaaacatagttgtgattttaaaaaatactacaatttctaaatcttaaatcaatacaatgagttactgctttactaagtaattgattttgaaaacaattaacttgaaatccaaatataagaaaaatggattgagacttagctgatttggattctttctttctttcttaaaggccagtagagtcagtagtcattgggagcagtaatctcttcaaattttatgctactttgaattgctgatgtagcttgatgaggttattcttctgtgggacttgtattttgacattgatgctattagtataaaccaaaaaaaattgatattattttctgacgtttataggtaatggttgatgatagtgagaagacatttgcctcccctgataaatggtgtaattcatgtgtttctattttattttattttttagcttgttcgttttggtttaagtaaccagctggtggttgctttcaaagaagataacactgttgcttttaagcacttgtttttgaaaggatattctggtacagatgaagatgactacagctgcagtgtatatactcaagaggatgcctatgagagcatcttttttgctattaatcaggcaagtgttttgttgtgaatgacctataccttaacaatgtattgatacttggccttgtcttagccaacaaacaaaaattatacacatgttaaaatattctaatgtaagttttgcagtctgccaaaaaatgtttattgctatttctgaagctacatttctacacaaaagagtttgcctattttgactttttaaaaaatatttatctttttaatttatcacttcatacctactgcttttggaaaattaccccagatcaaatagcaagagtagatttttaatctcagaaggcttgatgaaagcttaatataaaatcaaagattccagcctggcgtagtgactcatgcctgtaatccaggcactctgggaggctaaagtgggttgatcctttgagtccagtctgggcagcattgtgaaaccccatctctacaaaataaataagtaaataaataaaaaaatcagggattctgtggccttaattgtgatgttttagcattaataaccctagctgaatcttaagaatatggaatataaaatagttgtatctagacaggtatgagaaagcagattagtagacttgaagaaataatttaggaaagagaaactgttcctgctctttttcattcactcaataaatattgaagtatctaatatgtagcaggtgttattccagtcattgaggatgcatcagtgaataaaacagacaaagcgccttcctttatagagcttaattctggaacgaagagctagacaaaaagaagtgaaatgtgtaatatcaaatgctagctccctgagaataccacacaaaaaacatgttgatgagcaaagctgagcttattacttagagtggtaagggagatgctatattgatcagaggccatcttgccttgggtgaggagggagttctttaatgtgaggggagcttgattagaattaggtaaggatgatgatataataatttaggactgatggacatggcaaggtgaggattgggaaggcagtttcaaagaatcttggagttgttttcagacaaaatcttccaattgttatctatttcaatgaattttttggatgttcctgaaataatagagggaattttatggtccagggcaaaaattttcaggaatagtaaagtcgtattaatgaagacagagctagtaaagccctattagtgcagatagccaacagtaaagccatgttaatgtaagctgaggtaagctaatgttggttcatgttagtcattgatgtaagctgtggagtgtggatggctcatgtcctcagtagatattagaaagtaataactgctaaggagtaaagcagggaaggagatgggaagtacctgggtgcagtgatggatgtttgtgattttctttctttctttcttttttactgcatttattttatttttatttgacagggcataattgcacacagtatatagttatggggtacaatgtgatgttttgatatatgtttgcaattttccttggcttggggagggaaggcctcattgaggtgcggaattgagagctgaaggagtgagtaaaccgagcgggtatgtacgtgggtctccaggcagagggaacagcaaaggccagaggcaaaaatatgcgtgtgagctccaggaactgcctggagggcagtgcagctttgcaggttggagccaagggactggagtagatgaggtcctagagataaggcaggaccttggctttggctgagtgaggtgggagctgtccatcaccttgttttgtttcgagttctgtgaggcagtgtcttgctgaacaaactgagaagatttctttgtagtattttaaattgggaagttctattgagagccatgatgtaaacaatacaaagtaactgaaagtacattctatatgctataacctctgatcaaagttataaaaggtcatatgtggtttttacttgactattttttaatagtatcatcagctaaaggacattaccctggggacccttggttatggagaaaatgaagacaatagaattggcttaaaagtctgtaagcagcattacaagaaagggaccatgtttccttctaatgagacactgaatattgacaacgacgttgagctcggtaatgcagtgataatttcatgatgtacctttatcgtcttctggtaagagcagaaatgccctcatgtgctagcaacccagatggaaaaactttgctttggtgagagctaacctgttaggggctgacactccaacactggcctgcagaggggctttggctcaggaaactgtggggttgtggcgatgggacagggacagcatttgtggatctgtttggagcaactcaagattgttggtttgggggtatattcacaggtcctgttttttgtttttttttccctatgaaggggtgattaggctttctgaaaaaacggtctgtatgtgttaaatgaaataatatacataaagatgttttgtacacttgtttttattatttgtaaaatatagaaatgctcttcaaaggtgaattgtgattaacaactcactttctctcttaggagatcccttggcaacaagttaatggctaatcaagtcgaattgttttgtgctattttgttaagaatttaagagcatactgtatgtaaatacgaggtgtttggcttaagactttttgttttttaaaataatgtttcattattttattgttttgttgttcactcaacaaacctctggtgtgtagtcatcatgttttcatatcatactgtaataatcccagttattcaagccccgtacttgaagttgccaatttccccattttcactgccaccactgtcatccaagccactacttgtggtctccctgcttctggtcttgcctctacgagcccctgccctgccctgcagaaaccgcagtggtaaatcaggtcatatctcttccaggcttaaaaatcattagtggcttcccatcccatttagaataaaatccacaagtccttatagaaactagccccctgcctgcctctccagacccctgtcctcatttctctgttgtaacatcctttctgtttgctgagcaagccaggctctttcttgcttggaggtcttagtgcttgatttttttcctgtttggatctatgcatagctggttctttttcctttcaggaaaaaggtttcagttcaaacatgtttcgcaccgtgaaagccattccctaactatctttcctaaggtggactccccctctgtattagtctgttctcatgctgctaataaagacatacgcaataatttataaaggaaagaggtttaattgacttacagttctgcagggctgtggaggcctcaggaaacttacaatcatggtggaaggggaagcaaacacatccttctttacatggtggcaggaaggagaagtgcagagcaaagtgagaaaagcctcctataaaaccatcagatctcatgagaactcacccattatcacaagaacagcagcatgggggtaactgcccccatgatttaattacctcctactgggtccctctcacaacatgtggggattatggaaactacaattcaagatgagatttggttggggacacagacaaaccatatcaccctcttagttattcttgttcactttatcttcatagtacttctcacactgtgaaattaccttgtatatatttttacttactgttatctcccccactagaatgtgagctccatgaagatggtaaccatgtctgtcttgttcattgctttaccttcagtgcctagcacagtgcctggctttcagcaaatatttactgaataaacgaatgagttgggtatggagcctgggtctttgatgttcttctaaaatatgtgctcagaggtcaacctcctcagtgcactggttgagctcaggctctagaaccaagcacaagtcgaattaacttttggatacctagtagctacctgtgtgaccttgaggaagtttcttggcctctctgggccttggtttgttcatttgtgaaatggcactaatagtgcctatctcacaaggttgctttgaagattaaatgagatgatgcattaattgagagaatatataaagtccagcacagtgtctggtatggagttaagtgccaatatgtttttgctatttctatcatcagtcttttcctgccagaaacaagtttcttttgaccaactgccctcactgtactaattaaggtctagtcaggaaaaccagtattgagttgtgtaatactccatctgccaaacacagggagacacactctctgcaactatcttttaaaaatattgtgtctattgagttgtctgtttagctctgggccctgtttctggctcaggacatctaattttcattaaacgtaagtgtatcccgtgtatcaggacatattttgagtgccagctacatgctaggcaatgggcgtttagcaaggtgcaataaagttgtgctcttgatctcaaagaccttatactctagttggaaggataaataagcaaatgaagagttgcagttgtggaataacacttttgaagaatcagccagtgagttttccaagattcatgaacacctactaggtgccaggcactgcacaaggccccaacttttccatttcaaagtcagcatggaaggggcagcaacagcctgggcaagggtcacccatgctggtttcataccagttctgtcactaggtttctgtgaccctgaaaggtgcttgtctttagagctccttgtttcctgccctgtaaaacaagggtgttagcctacacaataatgagactaatttttatgtgaggttcttggaatctttcttctatcatttacagctcataatctgtttttacttgaatacaacctgtgttctttttctttctatttttttactttgaaaaagtgccagacttaccagaaaagttacaaaatagcacaaatatttcctgtatagccttcatccagatttccccaatactaacattttttttttttttttttgagatagagtttcgttcttgtcgcccaggctggagtgcagtggcgcaatcttggctcactgaaacctctgcctcccgggttcaagcaattctcctgcctcagcttcctgagtagctgggattacaggcgcacgccaccacgcccggctaaattttgtatttttagtagagacggcgtttcaccatgttggtcagactggttttgaactcctaacctcatgatccgcccaccttggcctcctaaagagcggggattacaggtgtgagccaccgtgcctggccaatactaacattttatcacatttgcttgatcattctttctatgcataaatatttctcctggaggtgcagacatgctattcctttgcccctaaatacttcagtgtgcatttccccaaaacaagaacattctcctacacaaccactatacagtgctcaaaataatgagttatcattgatacaatactatattctacaaaccctattcacatttcataaattttcctaatgttctttatcataaaatgaaaactgcacccaactccaagatcctattcaggataacatctggcatttagttgtcatgttatgtcttttcagtctaaagtttcttggtttttgtttgtttaacttttatgatcttgatacatttaaagagtagaatgtctctcacgttgggtttttctgtttcttcatgactagattgaagttatacattttttggcaggaataccacacaagtgatgtcatatgcttctcagttcattgtatcaggaggtacatgtctgtttatctcattactgtgatgtaactgatcacttggttagtgtggtgtctgccaggttcacttgacaggtgtctgtgaggttactatcatttttcctgaataattgctaagtattttctagggagatactttgaaactccgtaagtaacctgcttcttgtcacactttcacccattagttttagcacctaattcttgcctgaaacaaccatttcttgttctttcattgccctagattgtgttcaattagaccttcaggacctctccaagaagcctccggactggaagaactcatcattcttcagactggaattttatcggtaaatacattttaaagtgttattccctaagagatgagggtgggagaaggagaatagtatatagtaagattatgacaatttatacctttcaatatattttattcaggctcttacaggttgaaatctcctttcatcttaaaggcattgacctacagacaattcattcccgtgagttaccagactgttatgtctttcagaatacggcaagtatctttgttttactagctacttccttttatttttttcctacactttttgttgatgcagagtataaaacacagcagcctacagatgtgttaaatgcagtcatgtttaaaacagatttagtgatacaatatgatactcttttctttttttctaatacatagtctcgctctgtcacccaggctggagtgcagtggcgtgatctcagctcactgcaatctctgcctcccagattcaaacgattctcatgcctcagcctcccaagtaggtgggattacaggcatgtgccaccacacccagcttaacttttttgtgtttttattaatagtaaagacaagacagggttttgccatgttggccaggctggtctcgaactcctggcctcaagtgatctgcctgcctcggcctcccaaaatgctgggattacaggcatgagccaccatgcccagcctcattatggtattattgttgatccagagaccattacttctgaagatgaagcaaacccttttcaacttttaaaaaccaagtttctacattgaaaagaagagtttaaaaaattggctttgactttctactctcctaatacattttttaaaatgtttatgaaggtgttttacatgtctatagtgttcttcccagctttagaggaaggtctttgcaaatgttatagcaaatattttcaaacctcgaggcataaactgctccactgatgtgaagaccagtctgcaaaggagcagttgtttctctttttattttgggagggggcatgtatagtagaagagacagttcacttttatggggaagtaagctgccttctcattttcatagactttctctgtccttctcgccttccttctttttctccctccctgccttccctgttcattaagggactaaactgaatgcctagctgaaagttgtatatactgtcctttagcaattcagaagagtgtttcattcaactatcaataaatacttaatgagtccatactatgcaccaggcattttgctatgccctagaggcacagtggccctcaggaaagcttacagcctagtaggggaaacagaaaaacaagtaaacgaaataaaagtaactacaggttgtgatatgtggtaaggaagaatgtctccagctgcaagctctctggggtgggtgggccagaggagcactgggagcatctgcagggatgaggagaaaggcaggagaggagcatggagtttggtctgcaaggatgaggtcattgatgactttgtcatgatatggtcggaagtgtgggtttaaaaatattggcttttcatttttattttgttctttggacttctgtctgctttgagaaaagcattttaggggctctcctgggggaaacagagatcttgagtgccagtgctaatggaggtttaatcataacttacaggtatagaaatgaggatggtatggtttaattctcaaacctttggtttgagtgtgtgatcttgggcaaacctggcttgtgttcagagacaggcaggtgcatgtggatttgatcacctacatatccggctctccaagctctgccagtgaactttttggttttcttaatgtgttcaccctaataagtacttggcatatatcacttataaactgtaaatgatttaaatgattgatttaaatttcataaggtagaagattgagggcatttggacatcttaagttcagcctgcagtcttggagcaatctttgttctttctgaaaacattatatgtagctcttgaaacaaatagaaaaataatttctagcctaacaaaaactagaatttcatacccaaagaactaaattgaaggaaatgcttttaaattcaattcagaataataaatgagatcatttgtgttctttcaaaggttagttaattttggtttttattcctaggactggttgtctgtttttctctaggatttctctgaaccagatatctgatatcctgtatttagtaaaacttcacatattagccctttcaatcatatttgtttcactaataacagaaagttgtgaagaaatcttgtgatgtgaacattttcattggcataattctctttgttgccttaatttatgtctttattgtgagttccttagcctctaattgtacttgtgtttgttttttacaattttgacttaaaaccttcatactagaggactaagagatttatatagcaccattccaatactggggtattctgaatttgattataaacttacctctactgttgagttttatgctttcacatgttttcatgataattattgttcatttccagttttagtgctccctcaagcatttcttgaaaggctggtctagtggtgaaaattccctcagcttttgcttgtctggggaggtctttatttcttcttcatttctgaaggatggctttgctggatatagtattcttgactgacagttttgttgtttttttttttctttaaaccctttgaatatatcatctcattctctcctggcctgcctggtttctgctgagaaatgttctgatagtctaatggagattctgttatgtgtgacttgatgtttttctcttgcagtatttttttatttttattttttgagacggagtcttgctctgttgcccaggctggagtgcatgcagtggcacaatctccgctcactgcaagctctgcctcccaggttcacgccattctcctgcctcagcctcctgagtagctgggactacaggcacctgccaccacgcccagctaatttttttttgtatttttagtagagacgaggtttcaccgtgttagctaggatggtcttgatctcctgacctcgtgatctgtctgccttagcctcccaaagtgttgggattacaggcgtgagccaccgcgcccggcctatttgcagcttttagaattgcctctgtctttgacttttgacagattgattataatgggccttggagagaatctttttggggtgaatctaattggggatctttgagcttcctagatctggatgtccatatctctcccaagacttgagaagatttcaactgggttatttgaaaagacctgtcttcaagttcagaaattcttttcattttattttactttatttttatcgagacagagtctcaatctattgcctaggctggagtgcagtggtgtgatctcagctcagtgcagcctccgcctcctagattcaagtgattctcatgcctcagcctccccagtggctgggattgcaggcacctgccaccgcacccagctaattttgtattttctattagagatggggtttcaccatgttggccaggctggtctcaacctcctgacctaaaatgatccacctgccttggccttccaaagtgctgggattacaggcaggccactgcacccggccagaaattcatttttctttgcttgatgtagtctgttgttgaagctctcaattgtaattttttaatttcactcattgaataattcagctccaagatttttgtttggttcttttttatgctatgtctctctgttgaatttctcaatcaaatcataaattatgttcctggtttcattgaattgtttgtattcttttatatctcactgagctttcttaagatcattattttgaatttttcaggcatttaatgaatatccttttctttggggtctgctacttgagaattattatgttcttttgggtgccatgttttcttgccttttcatgtttcttgtgtccctacattgttatctatgcatctagtgaaatagttgctttttccaattttatggaatagctttcacagggatagactttttcctgtagatgggccctagggtgttggttggttatagtggctttggttctgggcagactcagtagtatggtgtccatgcagtttgttcagttgtactccttgtcagtgatgtctgtgattggctcagtggcctaagctgagggagtttttaacagcaatgacacagttttgctggaggcagggatgccagacttgttgtcgggctggacatgtgcatacatgataagcagcaggctgtgtggcaggctcttcaactgggtaggggcaattgctgcccagctggttgtcaggccaggtgtgcatggttgtggtggggccagtaggctgtgaggcaggctctttagagatgcgaagttacagctgaactggctgtcaggcctgtgtgggtgtggagagacagccaactgtgtggcccaagtgtgcacaagcacagcacaccagccagctgtttggcagcttcctgctgtgcacttctgcctgttcccaggggcaggggcaggaaggggtgctgcatggattcagatgtcagggtctcagatgttccatcaggtctaggctctaggcagccagtgtcatggtgttgcaggcacctttgtgaacatggtagaataatggcaggacttcagggatggagagacacaaagagtactggcccccagggcagaacacactctgttagcatctggtctctaaatggtgtcatgccatagcagcttaggtcacagaggtgaagagtgcgcaatgtgtgcttccactctggggcagcatggctgtatgaactcccggcacctctccaaactggattcaaagcctgtgaggactggagggctctcctgtagcaaggactgctggcattctgtggccataatgaggaccaccagagtctctagcctaacgttttcctatccaaagagattcccctggctctaagctgatcctggctggggagacagtgtggcagaggcagggtgccttgctccccttcctatgttgctgtcctgggctttcatgctccacaggattttcctgctaccctggtgctctccagtgtacttctttagtgatttcagtcaaaatatagttgtttattcattattttggtcccgtgtgtgtgtgtgtgtgtgtgtggtggggggtgcaggaaatgagtgtcaagtaattctagtcagccattttgctggcctgtgtaattctctttggatcagcacactggatgccagtgattttttttttaagcagatttgatctaacatgttatactttcttctgtgttgtaatctcgctatacatttgtgtctccagattatctttgacaataaagctcacagtggcaaaatcaaaatctattttgacagtgatgccaaaattgaagaatgtaaagacttgaacatatttggatctagtaagtatgctatatacttgcccatgggaattatagatgatttttaacactttattttgtggcttggggtatttaaatggtttgtttgcatgataataggaagaaaaccgcctcgagcattagatcctgtaaagaatatcccaaagccttgtatttttgtttaattcagcaaatgtttattatatgcctcttagaagaggtagcatgactcagtggttaggagcttagctctggagccagattgcctgggtttcggtcccagttctgtttactgtgcctgtgatcttgtacaagttacttaacctgtctgtctcagtatctttctatgtaaaatgagagtaatagtataggttgaacatcccaaatcggaaaaatctgaaatcaaaatgctctaaaatttgaaacatttgagcactgacatgaccaaagctcaaaggaaatgcttattggagcattttggattctgaatttttggatttcggatgctcaacctgtaagtataatgcaagtattccaaaatcaaaagaaatctgaaatacttttggtcccaaatcattctggatagggcatactcagcctaaacttaccttccaggatattgaatattaaatgaattagtatataaagcaaagcactgaacacaagagttggcacatattaattgctaggcattatgggaaaaggaagaaaatgccttagtgagagagactgacgtgcttataaaatctgtgatgtgttatggagagaaataagggtatacatacaaaaagtatgaggagaaaaaaagcaaaggtaataagtttgagtggggcagagtaggaaaagaaatgattcttggagaaggtatgctttgatctgagccttggacagtggggaaggatcagggccttcagagcccagacagcaaccgctgcaaatgctgagtcatttactcagtcattgctcaaaaaacatctcttaatccacatgtttaaaatgggctactgctgagcacagtggctcacacctgtaatcccagcactttgggaggcctacgcgggtggatcacttgatgtcaggagttcaagatcagcctggtcaacatgacaaaaccgcgtctctactaaaaacacaaaaattagccgggcatggtggcacatgcacctgtaatcccagctacttgggaggctgaggcaggagaattgcttgaacctgagaggcagaggctgcagtgaaccgagatcatgccactgcactccagcctgggcaacagagtgagactttgtctcaaaaataagtaaaataaataaaaaaattaaaataaaataaaatatcatgggctacctatggaacctgttctgtttgctcagtaaagaattaggatgatgttaatgatggatgctcagtgttttttattttgcagattttgtttaaatgactttccttttgaccaggttatcagaatgaaataaaatgtaaaatacctgtggcttctgttttatatttgttttaaagtatatttgatttgtggcctgctgcttttcagatgtataatatgtcctgacgattgaagttttggtttcaataatttcactgactgacttaagccaccgattatagtttcagtttctgttaaaaagtggttactattccccagcatacaccactctcttacagatacgcagagatcaggggcatattttctaagtccaagtataggttgccaattttctgtgaaaagaaactaacctttgtcaaatatgtgatttggaatatcattataaagatcaaaatgatggaaatttccaagctagtcagtcaaatgcatttccagaacagtgagtttttccttccgcctgctgccctccttgcaacgttaggggttttccttgcttgtgctcagaagagagtatctctagccccctcctgtggccaatgaggagaaacacaagcctcctagaccactgggtaaaagctcttttaagatttacatattctcctagagctgtgtcttaagaaaccaggttctatcactaggagaatgtgaatttaaaataagatgatgtgatgtgaaagccttaaaaaacttatgtttggaaaccatcttaggaaatggactttttcccctatatgaagctgtctggtggattgagattgccttggctttgggggaagtgggcaaggacaagggcgacatctggtgggacacttacactatttctaacagttcagaggctcattcacacccacacgcttacccccaggctcctctctcctttgtcattacccatattgaagcaaatgcaggtgaatgtccattttcacatacaaacctcatgctgccttttgtgactccgaagtcccctctctaaatgtgccatgtcttcatttaacttggtttcataaatataggaatttggagatgaggggcttggggaggaattgggggactccttcttggcgggattccccagtgatgggtgatatagatgttttttttctttctttctttctttctttttgagacagagtctcgctctgtctcccaggctggagtgcagtggcacgatcttgctcactgcaacctccacctcctgggttcaagcaattcttctgccttagcctctcaagtagctgggactacaagcacaccccaccacgcccgactattttttgtatttttagtagagacagagtttcatcatattggccaggctggtcttgaactcctgacctcatgatctgcccgcctcggcctcccaaagtgctgggattacaggcgtgagccaccgcgcctggccaagatgttcataaaatacatatttttagcataccatagaactagtcttctcagtaattcaaagaaaaacagaatcctatactggattctgttaggaggactggtttctgtttctaagcctgcttgttttcccatctgtaaacaaggtccaatgcaaactgtcttagagatttgtgttctagttttatgtcagaaaggaaggtactagatgctgtccttgcatttcataagattttcagtcttatcttcccaagagctgcctctgtttcctctgccccattccatggatccaaggggaaaaaaaatcttgcattatgatagagctaagttgttttcttacctacccattagatgatacctcaagataactttcttgagtgtaaatggctaagggtaaatgtaagtgctaggcactgggcactactgtaacaagcacttcacacagactgttccacctgattctcatggcagcctcaggaaccagtacgcttgccctccccattttgtaggtgggacatctgaagcttagtaagatgaaatcatttgctcagagagttgcatttaccagctggctgtctctgctcgccacccattgtaggagctgctttgccctcagacactcatgccagtgtcacccacatctttgcattactaagtccatagacactctggcatttctcttcaatgctgtctctgcagaggtgttgctgtggaagactctgaccgcagtctgttctctgagggtcgcctgtccctggttctgtttgcttctcctctggcctttctgctccatcccattcctgagctcatctccttttctaattctcaaacattgctccccatccccgacgctgtccttcccagtggtctctctgaggggccgtcactcccatggctttaactgccactgaatagtcttctcttgtcatgaatatccagagtaaactcagtttgcccaagacagggaaccaggaatcattcttggttgtccttcttccttattccccaagtccagttagagaccaggccatgactctctccatctcttacgattctgtgccctctttcactctgccgcaacttagctcagaccaacataagttctaacttagattattcagtggtcttatgttctgcttgattctcttcattaatttgaaagtatactgaagcattatactaagcacaggtgctgtattcaacactactgtcttagtccgttttctgttacttgtaacagaatgcctgaaactagctaatttataaagaaaagaaatgcattctttcagttctggaaactgagaagtccaaagtcggagccccacttctggtgaggaccttcttgctggttgggagtctctgtggagtcccaaggcagtgcagggcatcacatggtaaggggggtgagcatactagctcaagtctctcttcctcttcttaaaaagccactagagccattcccttgataacccataaatctatgagtggattaatccatttatgagggcagagacctcatgacccaatcaccttttaaaggccctccctctcaatactgtcacattggggattaaatttcaaatgagttttggaggagacaagtaactcaaaccgtagcaactacctatgggccctgcttcagagagcctgtcacttgatggggaagatggacacttaatgataaaatagtaaccactgtaagtgtttgctattattattttcctggggctgtttcatgggctctttgtatatgaacttgcataattttcacaatagccctatgatgtaggtattttttaattctacccacttttcagaggaggaaactgaggcacaggggttaagcaacttcctcaaggctctacagcttctgagtacagagctgagattcagagccaggctgtcgggctccagagaccatgttctttcccattctacactgtctctgtgctccatgctgtgctgcctttgcagatgtaatgaaaggtcagtgtctgttgtgcagaggaaagtaaaggagctctgggtgtgtgtagtaaccaagaaccatgaaagtatataggagagggctaatagagatgagaatttaaggaattcttttctgagatgggagatttttcatttggaacttgaggctgaaaataaataagctgagccatgcatgtgggagaagtgctgttccaggcagacagatcagcatgtgcaaagtccctgaggtgagagcaggaaagaaggaagatcagtgtggctgtagggtgaagaaggtgggggtcaggcagaagagagctgggctgggattggagacactaccgtgaagtctgagagaaactaaggttagattcatctccttcccatacattcttcttgctgctgtgtgctccaaaccaaaaatctgattaccactcccctccttgcttctgttccaagaagtaattttctctacatacagagaaggcttataagattggcactatgtcctgggaaagtgcacagtgaggttgagaagcagaagtggggattctgagtggtggtgttttaatttgtttgttctcttattaatggtgaacttgatgtctctgcttttatgtgaaagaactcagagtaggtcagcagttttgcctttttttgaatggagcccaaatggatcactttctgttgaattctattctacagtaaatatttatatatgaatttgagtgaatttattagcagctcacatagtttttgcttttgtttttgttttttgttttttgttttgagacagaatctcgctctgttgcccaggctggagcacagtggcacgatctcggctcactgcaaactctgcctcccggcttcatgccattcttctgcctcagcctcccaagtagctgggactacaggcgcctgccaccacacctggctaatttttttgtatttttagtacagacggggtttcaccgtgttagccaggatggtcttgatctcctgacctcgtgatccgcccacctcagcctcccaaagtgctgggattacaggcgtgagccaccgtgcctggcccagctcacatgtttttaaatgtatagctttatatcagggaatgttttgccttacatatgtacttctgaatgaatgcggtgtgatttgtttctgatatttaccattttgttttaacaatagacaaaacatttattgtttgaacttcttttcacactgccattttgtttggaaattattctccggtaaggtgtgtttaacatttgaattctgttttattcctcagctcagaaaaatgctcagtatgtcctggtgtttgatgcatttgtcattgtgatttgcttggcatctcttattctgtgtacaagatccattgttcttgctctaaggttacggaaggtaagagtgtgttcgcattctcttcctgccctcttggcctgcgccctcagtttgcccaagcagtggaccaccgatattgtgcacctgccttttttggagacctttgactaaatcagattcctttgagtagttgcccgctatgaggcattcatcagcctgaggtgtaggaagtgagtaaaggctctgagtatgtcaagtgggatcagataattatcctgcttaaaactgagctgatatgtacagatgcacagtggtgaactctcaggcttttgaatgtttccagaataacaaatccctcttcaattcaggagtgatctgaagaacagagtaatagcatgtgtgggtttcatcttttgtcttcaaatcagagttcattttgacagggaggcatggtaaatggattataatgaagcataaaatactttattctgtttttaaaatagttttaaaattctcccctgagtttcattttgcctttttaccctcagggctcttatgaatatatacttccgctccccacatatcttattctggctgtggcgtgtgtacaaatgcacactggggtcaggggaaattggaagtccacagagtaccatttgtggagcagggacgtagtctgcatttgattttgcctaatcctgacctttgtcaatgtcctttgtaaatatccacctctcttacatgctccccaatccccttgatattctgaatgcaaagttaaggtcctttccctgccaaggtgagggggctcatatttggagcacgcactctggagccggcctgcctggacacggatcctggcttagcctctcggtgcctcagttcccttctctgggtgatagacctgctcgtacctgcttcattgggttgttatcggaatggatgtgttggtaatatgaaaagtatttggaatgtactgtgtgttagctatgacaagaacctgctggagttaccgcgtacgtatttcatatttgaggtaacttcacagacaattgaatgcttactcagattataggggaaagtgtgtgccgtaacctccactttcgaggtggatctggcaaattggaaaggcaatgccatgtccttttacaggtgagagcactgttttgcacttgccttcttcttccagagggcagtgtggtttgtaagaaacgcttctttaaatgtttgccatagagatttctaaatttcttcctggagaagtacaagcggcctgtgtgtgacaccgaccagtgggagttcatcaacggctggtatgtcctggtgattatcagcgacctaatgacaatcattggctccatattaaaaatggaaatcaaagcaaaggtgagggaagcccatttaaagtctctgttcttcatcttctcctggatggccacaggcatcttaagacgtaccatcctttggagaccactttgattctcgtgtcttcccttttctcacaccagcacaagtgaggcctcccctggcttggttcctcgtgaagggaaaggaagccgatgttccatggaacgaaacttggcaacagctccagaatagtgactaagcttgaaaagattggttatttgggcctcatttttctttttaagttgccaaaggagcagcttatccataaaccagtcccttccctgaacctgcatgtcaagagcttgtggggaggatctgtgaccattgggtgctccgacggatggggtgagggcaggaatgtcagactgcccgctaaagcctgaccctttgtataacttagttgatttgatctcctaactaagcctcaactcctccttcaccgcactattctcccgtccattctctgctgttggtcagaggtccctccagccacacctcctaaccctgacatgcctaattctctcccatcccggctccctctggctttcttcaggcttcttcctttctggccaactgtgacagcagcctcctcaccagctttcccgtcttctacttcatacccctgagatccattcacacagctgtcagagggacttttctggaagtgtctatccagctgttaccatcctttctacctcttggggcctactttgggatgaagtggcctccctcagcagcatggcccctggggtcatcatcatccagctctgcctcttgctcctgcccctgctctgaccctgcccctctaggacgtcttgtcagcattgtgcctttgttcagcttttgtccacttacctgtggtgcttcctcccagcctgtcctgcaggcctgtctttgctctggggtcgtgtctgtggtgtccctctgtgatgagctaggcattgtgtctttcactgcatttagcgtattatatgagaatcatgtttgtgtgtttgtcttttcaactagccctagaatttcctcagagctgcagctgtgttaggaaatcatgctggagttttctttcaaaagcagctgaattgtattgtttggtacttaacaaacaccattaatttgtatcctcgaatgcctaggtcagtgataaatgcaatttctatttgagagtattatttggaaaaaaatttagttcaacctaaatacaatttctatttcagagtattatttggaaaaaaatttagttcaaccaattgaaatactaaaagaaaatgagaaacacaaatatttggaattatatctgtttttcttcttttttttcttcaaaaaaaaactctatcacctatagggaggcagatagttctttttttattaattggtttaatgtaaggctaataagctaagtggagtcaaatattttactcatttctctctttcttttttttcattccttagaatctcacaaactatgatctctgcagcatttttcttggaacctctacgctcttggtttgggttggagtcatcagatacctgggttatttccaggcatataatgtaaggatgcggcaccgggtagtgccactgcagttgagactcatttattctttgggttctaatagctactttttcatttcacccattctgttctttttttcaggtgctgattttaacaatgcaggcctcactgccaaaagttcttcggttttgtgcttgtgctggtatgatttatctgggttacacattctgtggctggattgtcttaggaccataccatgacaaggtgtgtagctcacattcttccttctgcagatggggcacgtgggacccttgaacgtgggtttctagcacttacttgcttcctggtcttctctagcatgtacccttgacatcagtaatcacatatctttgtatcagttttctttttctttttttccttttcaggatatagaagtgactacaggatattgaaacaagaactgtacaatactagaaagcatgtattatagttgtctgggactggcttaaggggtcacatggttacccggtgatcatcaaatgggaaatgtttggacgtgagatcactatattaaaaatgaaaattaagtgaggaaaattattataaaaaatttccaatttaaagtattatgtttttcatccaagttaattgagaagaatgaagatgggcagagactgcctaaaacgaccatagtaggtttacgatagaaatggtgacacgtcttgtctctgcagacggttttgattacagcatcatctttctgccttattaaagatcagtatctgaattctaaactattaccaaacttcagttagcattataatctcagggacatcaaagttgtgctaagatgttcttgttataaaatgatacatttgattggtagatgcatcaggaaatgaaactaggtaagccttggttttaacccaaaaaagtaaaaggagttattttatcttatggcttttcctccatttgggcctgtggcagttggaacaacagaaacaacaaaaatagcagcagctaacacttactgcttgtgtgttagacactctgctgggcatttcggtgttctttcttatttactccccacaacaacccagggtactgttagcctcacttaggtgctctgcaaggagaaaagaggttaaaaatggtaagtattccttccaagtttgtataccagttcagccttaagttttgaccttgttagttgcattaaccaaatctgtgatcaaatctggtttacaaactgttatacatgaatcttaaacctccgtgctgtcctaccagaataatgtcgagtaacctggaacactcagactttcttctttttaggtgtcacatttaatatgtctagagagaattactgtttttcctatttgagatattatataattaacaaagtgacaacctctgggttggtagtaaatcttgataatattgctcttcatactccatgtcactgctttaaaggtgactcatgagaaaaaattattctttgatatgatctctctgatttggagaacttactgtcttagagcctggaaaaatgtatttttcttccttgcttgcctcatgctctgaaagcttttccacctctttgtcactagagggcagtgttgcactgtgtggaataaataccgttcctgaggattcggctttaattcactgactccaaggtctgtggacaagtggtcccatctcctttgcaccccatccccgtctcccctacctcatcattattctggaaggtgctcagataagattgctagaattttactagatggctaccattctcaagtgctgtctgttaggcatggtgcccaagattcttcatctcccttgctgtgttaacccttccctccccttctctgtgaagaaatctgattgtcctgttacagagaataggcaccttaatatattaaataatattcctgagattacccagctagaaagtggcagagatgggattcaaacccaggtcggcctgactccagtacctgtgctttgacccataccctgtagagcttttcttggtattatctaaaacagatcattgcaagagagcatttagcctgacaagaaacagtcttgtacttggagatcaactgtgagaggacagccatgtaatcggcttcattctttcaatggtgtcaaggtcacctcatggaaaatgaggttatttgttttgtgagcctgactgcatttccatatgttcaatttgtcctttcaaaggatccaggtgaaactgggatgctctgagccagcactgtccaagaaaaatacagtttgggctacaattgagagccttgcctatactgtaaaattttctagtagctacatgaagaaataaaaaaacagatgaaattatttttaattatatattttaagcctaatatacccaaaatattatttcagcatgtattcagtataaaatattgaaatattttacattcctccatactagtctttttgatctggtggatattttatccacatagcacgtctcaatttggactagctatctattggatgctggctattcacacattcctggtgactaccactatggacattgcagctctagacttatgtctttcacttaatgttagctttcctttatacccctggaggaggggagggataagggatgtctgtagggttgcctgcaggtctgtttatggcatctctcaccaggctgatatattggggaaatacacagctgagttaattcactgaatgtacaagtcagttgggggagagaacgtcagtctggttttggaactttgtgcttttcttcaccatattgctgcctctttgaatctgaagttagaatattttattgccccttgcatcctttcccccaaattaatccaagctgtcagcatgttcaggttctgccagtatctgaatcagaggactttcaggttacctgaagccttgaaaagctaggcattccaagcgggcatttttgtgggatttttagaatcacagcaaccttgattgtgaaagctaattctttctttaaaacaaaacaactaaaaaggagacattaggaaaaccgtttgactgatagctggggtcccataacacttcagcttcctatcttcctgttaggcatctgatttcaggggctcaatggaaagggagtcaagatgcaaaaggcttcctgctgatgtgtattcccagcactaatggactttggcacagtgccctttcaaaatgcctgggcacagagggtgagagactgttgatgttcttccagacctcatcttgaattattaaacattactctaatgcggcttttacatttccagaggactttttttcctgtgaggaataaatcatagccttgcattgtccccattttacaaatgagaagaccaagacttgaaaagttgttggacttcactgatgccatgggtcaaagttcagcagactctgcattacattttcctccttccaagccctctggttttagccaagtacccctcagctaaaacattttgcctaaagtttgcatgagattcttggcaccagctcttaaagcaaatatttatgttgttctctgacataagccattgcaggttatggtttcattgaaattaaaggtttttggcccaactgcaaacttatcatttgtgaaatgaatggttgagttctcatcgtgggcccagagaacctatggggactctttatggaaatacccatttaatacgtattaaatatctactgtgcacccaacattgctaggttcttgtagaccaagttcttggagggaaggaactgtagtttgttcctctttacattcccagtgtccagcacagcacatagaccatggtaggtgcccaaaaagtttgttttgaacaaacaagaagcagagagagagtagtacctgctttccaggggcttatgatcactcaagatccaaaggaatgccttacaaatgtggtccttctagactggaagcacattaggaccttgagtatttttaagctcacttctactatggaatttggccactgaaatagactctggttcacagccacttcttgtacaaaatggcagggtgttaccaaacacctaaaattgactgggtctctgttttaactctttggtgtgttaaaataattctcatgttcacaagaggagggggaggtaaaatggttatgaataatgttaatgttgagacagatattgtgtgtagcctggtaagtaactaaacagaaaattaaaaaatgaatgtgacatgtactgacaaactagctatttgcagttgaaacctgaagcacagacagttgtgcttggagttaggggttcttgaaactagagaaaggagttgactggattccaaaagaaactaagaaatgtgaattattaatggtgctgtcagagttgtagttgacatccatagaaaccaactttaatgtcaatgttttcagctttaacttcaatgttttaaggcttgtgtagggtatggaaaatatttactctggcaatcgcctgttttactgttaaataatctacatattgttaagtgatctgttcatttggatatttcctctaggtctttttggaggaggactttagttcatcagagtttttgctgatgcagcaaagccatgggtgggatccttgtttggggtgcgtttgtagaccttctcccttggccaccaactttaccttgcctggtccagccacgtggctggtagtgtaaggcacggtgtttgtatctagttggagtacagggaagtgtgtataaaaacaattagaagaccatagttcattctgtgattcttaccgatacggagtgcagagaaaggactagaactaccagggcacttggtcttgaagtacactctgaaatgacccttgaacattggcttaattggacacagagaagagaaagaagaatagagcaggtgaggagaataaattccatgagggaaaaatgtagggatgggcctggtgttggaggagaagataagcacagcatattaatactgtcaaggaggagatgtgatgaggctgcataaaggaggaacttatcacaaccttcttggtttagatttttattttgcatccaaactttgtataatctcacaagggagaaatgacctgaaagccttcttcttaaagtacaggttttactgcagctttgactggggagggtaaagagattggagtaaaagagacttccttggaagtttctttaataattcagaaatttgtgttgacatcacagtagagtagtaagggtggattggagaaacatgtgataggaacagacaggccttagaagactgaaagcggggaagagtaatcaattcaacacagagttttaaggacttaattatttcagagtaaatgtttctttggtaggagattggaatcactgacagaaatagggcaatttagaaaaaaaagttcatttttctggttagggtggtgaaaagttttgttttgttggcattttcaaggaatggtctgttatataacaaatgccagctgagcacagtggctcatgcctgtaatccaagcactttgggaggctgaggtgggcggatcacctgaggccaggagttcgagaccagcctggccaacatggtgaaaccccatctctacaaaaaaatacaaaaattagccgggcttggtggcaggcacctgtaatcccatctatttgggaggccgacacatgagaatcgcttgaacactggaggcagaggttgcagtgagctgggattgcactgcactccagcctgggtggcagagtaagactctgtctcaaacaaacaaacaaaacctacaaatgctctctaagtgtagaaaacataagaagatgcttatgttaattaggagaaaaaccaggatctaaacttgttagatcctggttttagatatataaaaagtacatagggaaaaactgtgggaattgttaagagattaactttgagagtatggaggggtgtgtgtgtgtgtgtgtgtgttttaaagagacagggtctcgctgtgtcccccaggctgcagtgcagtggcagaagcttggctcactgtaccctgaacctcctggatgcaagagattctcccaccccagcctcctgaatagctgggactacaggcatatcaccatgcccagataatttttgtactttttgtagagatggggtcttgtaatctttcccaggctggtctcaaactcctgggctcaagtgatcctccaaccttggcctcccaaagtgctgggattgtagggatgagccactgtgcctggcccagagggggtttttgaataatgttttcctacttcttatggtgttctagcatcttaaaataagtaagttaccactactacaatgacaaaaacaatgttaacaaaacaagctaactagatatcctctgctttttagaatactctatttcagaaactagtttttatttccccctacagtttgaaaatctgaacacagttgctgagtgtctgttttctctggtcaacggtgatgacatgtttgcaacctttgcccaaatccagcagaagagcatcttggtgtggctgttcagtcgtctgtatttatattccttcatcagcctttttatatatatgattctcagtctttttattgcacttattacagattcttatgacaccattaaggtaagtaattatcaaaatttgctgccaaaaaatcactgcaaattctatatagattataggaaaataccacattttaaaaacttaaaatattacagttcagattttgaggttttgtggacaaactttttagacgctggagatgaattttagggcattgtccctgttacccacagcagggtggattggtttggaggggtggtgggaaagaaaagggaaatggggtaagcatgggttgaatggggtaagtcaggtagtcaggctgctggtcttagccctgacagatatacctgccagtgtggctgcctggaacttaggattgagtcataagtttcagggatgagaggtgaccggcaccctgacaactctcagatattgctacaactcacactggataatacagctactggcatggtgcaggcttcctttaaattatgaaaactaaggcttttgtgactgtttagcttcctgctttcttaagctacctgatgggttctgtatcctttcagactaggccatttaactgatttgtggcttgaaggaatttcacttccttgggtgctggtaccttattcacagcagatggtcatgcttagaaaaccctgcttcagggtcagtgactgaaaaaccaggggtgccatgccagtgcctttgtcagggctgttttctgcttaaccactttctcagaataatgcagaagaaacccagtccgctaccttttgagtgtgtgggaagataagtaagtgttcaggtgggaatggtagttgcctctcgcatcagggtttgcatggagaaggaagaggtgcacactcctgccacagagattcatgtctttgatgtggcaatgtctctgcgtggtgggggccaagcctcagtgttgaagtaggttgtctcattaagcatgaggggagggagtctttgtgtctgcttggaaaaaaatctctcttctgttccactaagcgaccaacttccataaaagtagaggaaataatgattactttccaagcagagtctactttgccaatgtgtgtgtggagtgggaggtctcatctagtcttgctgttagcattaaaagtttagactttttttttttttaaaaaaagagagagggtcttgctctgtttcccaggctggaggacagtggtataatcctacctcattatagcctccaactccagggctcagtcgatcctcctgcctcagcctccagagtagctgggactacaggtgcacaccaccatggccagaaaatttttgtattttttgtagagatggggtctcaccatcttgcccaggccagtctcaaactcctgggctcaagcgatcctcccttcttggcctcccaaagtgctgggattacaggcatgagccatcatacccagactagacatttgacttttgattatttccttcattacctttttttttttttaaaaaaacctctccctggctcttctctgctttctttctgaagtttttctttggattgttctctgttcccacagtggccctgccttggtgttctgggactgacagattgattcatcattgtaaatatcagttcttggatctgagctagcaatgtgggagagttttattttagcaaaggtgggcttggtttgttgacaaaagagcaatttctcatgccttataaataaggtaacaacattgtgtactttctaaagaaattccaacagaatgggtttcctgaaacggatttgcaggaattcctgaaggaatgcagtagcaaagaagagtatcagaaagagtcctcagccttcctgtcctgcatctgctgtcggaggaggtcagtatcatgtttattctccatgctcctgagatgggctgttctgttgtcttaagaaagagcccctccaagattaccattacattcagagaccagcttatcatgggaaataattcacctttcttttctttcctcccactgaaattggctttagaaatgaattatttcttctaaaacagggttatgtagaaagctacacgatgtgattggaatctcttagaaatactataagactcttaagagaaggcataaattatgtccttaaagtcaagaggctgaactcttaagtggcccaagtaagaggtcaaagctcttatttttagaggtgaaactctgggagtgtcagaggtgttttcccttttcacagtatgtggtacaagcaatctttcttgatgagagcaggaaacttccttgcgaagaggctgtccaagtgcttgcttatccgtgcacaccagtagctcttccttgcctagctgtgctttgcctgttgttcgtcaggacatgtagagaaatggtctagacctcagtggacaaagcatattacatagtgatttgtggactagaatggggtcaggtgaagacaattttttttttaatgtgcctatgtttgctttcatctgaagtcaggggtgccagtttgtaactaaaagtataccctacatatgttttttctttttggaaggactctgtaacccaaattcctgaaggaagctatgagaacataattgctatttaaaaccacaggatgcatttttctgttaatcaattcatacagcatcttgggacttacaatgatatgactgagcagatccagagaatgtctggtaaatagaaaatgagatctgagaagagttgttttcagaatcacacctttttttctcagagcattaaattgttgctgtgaaagctgggataaaggaaattaattttcttaataggcagctgcctcctaagaggtaccttgtataaggaaagtctctcaaaatctcttttttactataagggggataaacttcattgaaaaatgtagtcatgaattctaaaaagtaaacgataggtctttggtgtttggaccttggtttgtgccacacaaagtcctgggaggttgttaaatgttttgtcatgcagccctatggaacaagtgaaagatttaaggcgtggaccccaagacgtttgggtaagattgggtctgagtggtgagacgcaaggagcaacagcagcagaccatttgccctaaagtgtgctgagggttgttgagaagatgcatggtgagacggagggtctgcccctcatgaagagtgaaagaatttgagggaacaagagagcccaccaaggagatcaactgaagaactaggatgatgaaagttttgaaaaagaggatatcaaaaaacaaagacaggtagctgtaactatgtttggccaaacgatggtcctgagtgaagtcagctatagcaatttcagtggaatcatcagaccaaagcctagatcccagggggcttgcatggaccctgcagagtgaatgaagggcctaggctgtgatggaaggaaatggattgtaatggggccttgagaacaagtgatggctttgactccatctaaaattaagtatagcttgatgtgtttaaaagctaggaatggggctggttatggtggctcgtgcctgtaatcccagcactttgggaggccagggcagaaggattgcttgagcccaggattttgagatcagcgtgggcaatgtagtgagaccccgcctcttaaaaaataaaataaaagctagggacagaagaatggactaaaattgaggaaggctgtgaatggaggctaaagatgaacataaagattcatctctgcaaagattggtttttgtgccccctgtctggtgaccatgacagatgacacctgctatcccagtgctgcttcctgcagagcacggctgtggtcactcttcaacaaagcagtccaacaaccagcacacatttgattctcctttgagtttttgacagagcctctagcctgagcatcagaacacctgggttttcattttggacactgccattaaccaagtgtgtcctgtgacctctcctaaacctcttagatggaccagatgacctctgaaacctcttccagttctaaagcgatgtggttctttggagagagatgcttggttgaacagatgcagagttaacctttaccttcctctattgcagtgaaggaggaaaattggctgttctagtaatttataaggccttgttagcgaagggacacagagattctttttttttttccagaaacaaaccaatgtatttattgagtaaaacctaaatgtaacatatatttttctttttttttttttaattttactttaaattctgggatacatgtgctgaacgtgcaggttacataggtacacatgcgccatggtggtttgctgcacctatcaacgcatcatctaggttcagctctgcatgcattaagtatttgtcctaatgctctccctcccctttccccctaccccccaacatttccccgtgtgcgatgttcccctccctgggggcatggaggttcttaagagacaggtgactcctcacagtgtttccaaaagcatctgctcaaacctcaaacagggtacattgcctttatttatttatttacttattttttctgaatgttggtaaataatcagaataccttgcctgtcttaatttttcttcctcttctatgtttcactcaacatgtctataatctacgggcctagaatatagagtattcctattgctcctcaaagatgttaaagtattgtatctttcctcttttcttctttccctttctgttacaggaaaagaagtgatgatcacttgatacctattagctaaagttctgctaaagatgattaaagttcaggcatccttatccagcggctgagcagaggaaccccaaatgacttggacaagcagttccaaaatgactctcttatttaattgtggagtgggaaagaggactcacagttagccagctgaccatgactgaagttccagctttactttttataaacttgaatgataaagaatagaccatgggctactactgggcattagtgcaatataacagcgataataaaattctctattagtctgttaatttatgacatgatctcggaatggaaaaagatcatttcagagtgtgcgaaataatagtctttaaccatgtaattaaatatgtgtgtttattgtcaaataaggatttgttttaaaggtgattcttgggtttgaagacatttgttaattcatggtctgtacagaaatgaagctggttgcaataccaatctagagagtccaagctggcgaactattaagctgtttaaagatcacccttggcctggcacagtggttcacacctgtaatcccagcactttgggaggcctaggcaggcagactgagctcaggagcttgagaccagcctgggcaacatggcaaaaacccacctctacaaaaagtacaaaaattagtcgggcgtgatggcaggcatctgtagtcccagctacttgggaagctgaagtgggaggatcacctgagctctggaggtggaggctgccatgagccatgatcgtgccactacactccagcctgggtgacagagtgagatcctgtctcaaaaaaaaaaaaaaatcacccttaaatcaacaaaaagacctcatgctcatgcagtggacatttcttggcctgttttcctgtgggttttcttcagcatgatatgaagcaactgttggcatagccagtgggataaataagaaatggaatcatttggctgcctcgtcacttgtgctaatggtcagttgtacacacatgacatgtggaagtgacctgtagcagcggtcactcattttaacaattgaactctgctgggttgggtatttacctttgtctagaaaagaaatatgatatattttctctaaataaatttattttcatcattccatatggcattcttactattttatgcattgtctctaaacaactacctaatgaaacattcagatcacatctctcttaaccacttggtctccaaaagggatttcccaatttcttaaaagcagtgaaggacatacaggggctaagatatagaagttattcaataaatatttatgatgatagcttgagagatgaagatcacttcatgcatagacttatttcatacctgagctatctcagtggccaactatttaaagttattggtgaagaggagaatttgaattaagcaggaccctccttccagggctcttcctctttctccttggcctcagtcgccctccccacaagcccctacccaattttccttctcatgtcaccttccccctccttgctctgaccccatcttcatatgcctgcaccaactataggcagggaaaatcatgcagttaataccattaaagtatataagagagtagatgactcatgtctacacacagagtactttgctaaaattattttaaactttcttttttacaagatatgtgaagagttatgtttgatttttaaactaagacaccattaaactggtggttctggggtcatttgcctgacccaagaatcagatacgtaattggaccacttgttaacttctgagtatattgtcatatacttagttttgtctctgaaaagaactgctattttttttctttctctcttttttttttttttaaacagagtcttgccctgttgccaggctagagtgcagtgtcatgatcttggctcactgcatcctttgccccccaggttcaagcgagtcccctgcctcagcctcctgagtagctgggactacagacatgcaccgccacacctggctaattttttgtatttttttagtagagatagggtttcaccatattggccaggatggtcttgatctcctgacctcgtgtacgcccgccttggcctgccaaagtgttgggattataggcgtgagccaccacgcccaacccaagaattgctattaacatggtgaaaccctgtatctactaaaaatacaaaaattagctgggtgtggtggcaggcgcctgtagtcccagatactcaggaggctgaggcaggagaatcgcttgaatccgggaggcggaggttgcagcgagccaagatccggccactgcactctagtctgggtgacaaagtgagactccatctcaaaaaaaaaaaaaaaaaaaagctttcatttgttctgcagctgtgactgccatttgaatagaagattaatgatgggttttcatgctcatattattcttctattggctttcatgttttcttttatttattttccctccagctggacaaaacagttttagaaagaaaaatgtttttcagggttagctcacatctatagaaacattgttttctccctttttaataatgttaaacaattgtcactttatcaactgtattgttatttggattttattgaacaatgttgtctcataattctgctaatagatgcatctgggataaatcattttctctcttatcataggcctccacttagagggttccctgtgaaagttaggagacacattctttctgcctgctggtttcattctgggatctccaacccttgaatttaactccttggcttgtggtgacacagtcaaaaccatatacaacatcttaaagctttttcacttgagctggtaggagagagtgtgggcataagagccatctagacagacttgagttaaaattccagcttaacctaactttaaggccctgaacaagttactttcttcctctaagtgatgataaacctcaaccaagactggcacttaagtcacataatttatgcagagcctggtattgaattcattcctgagctgttatttccctttgattctctaacatgtttgcaatagtttccatgggaccatggaataatgcagacacgactttgcttctgcaacctgtctgcctcagctgtcctcttcctactgctacctgagtctccttggacaggtcatgccatgcatagatttcctcatccataaaatggggggattatgaggattgaatgagtcaaacgtaaagtgcatagaatagggcgtgactcctaagtgctcaatgactattagctcttcaaaaaacatgtcttactaacatggtctacaaatgtacaaatctgttcatctgggccagccaggaagatttttattttataatgcactcaccacacacttctggtggactttgttctagttagaactttaagtgtgcaaaagtcccccatccagtcctgtcctggaggcaatgatcagttcagccctaagaagctcacacctagccatagaggagcagcaaggagaagcagcctaaatggctggggcacagctgtcagtcctgatggaagagaaaaggtccaggaggtgcacaagctgtcacaaagcctcagtccttcaccctgggtgagaccctcagtcctctactaggactacccccttaaccaaacttgtcagaatgtataaaattcaggcccacttccttctcaacccattgctgactcaaagtggtgaatgcaaaagagtgagagagggtagttaggaaaagctcttcgtgcgattcgaggcactgtcccccactcctgctgaggacctacactccaacaattgtaaaaagggtacactgatccagtggaagaccacgcttggaatcatgggtttatgaaaagcacaatagcccagccttttgatctaggggtagccagtcgccctcttgtccctgtggaccttcatgtaaaaatggcccagcactggccgggtgtggtggctcacgcctgtaatcccagcactttgggaggccgaggcgcatggatcacaaggtcaggagatcgagactatcctggctaacacagtgaaaccccgtctctactaaaaatacaaaaaaattagccgggcgtggtggtgggcacctgtagtcccagctactcgggaggctgaagcaggagaatggtgtgaacccaggaggcggagcttgcagtgagccgagatcgtgccactacactccagcctgggtgacagagcaagactccatctcaaaaaaaaaaaaaaaaaaaaaaaaaaaaaatatatatatatatatatatatatacacacacacacatatgtatatatagcccagcactgtattgatgttcaggggcctttctaaagtcattggaaacgtatattcaataaactgccaccatggtcttggccacagagttgtttcttgacaatatcaagagctgtgatgcttacaggtacgattccagatacctgaacaattcacttgtgacagccacatattgcagtaacattagacgaatagacctcattttactgctaatcagctccatttttattttcttgtaacttgggcaaattttatttttgctttgcttcacttgaagtttgaacattttaaccatgtagtccctccttgttcacagagaatatgtttcaggacccccagtacaggcctgaaaccctaaacagtactgaatcccatacaggttgagcaaccctaattcgaaaatccaaaagctgaaatgctccaaaatctgaaacttttgctgacatgactccacaagtggaaagcttcacagctgacctcatgtgatgggtcacagtcaaaactttgtttcatacacaaaattatttaaaatattgtatgaaattacctttaagctatgtatataaggtatatatgaaacataaatgaatttcatgtttagactgggatcccacccccaagatatctcattatgtatatgttaatattccaaaagctgaaaaaatccaaaagctgaaacacttctgttcccaagcattttggataagggatactcaacctttatatattatgttttttcctatacatacatacctatgataaagtgtaatttataaattaggcacagtaagagattaacaacaataacaaaaaatagaacaattacaataacatactgtattaacaatgataataaaatagaacaattataataacaatatactatattaataaaatagaacaattataacactatactgtaataaaagttataaggatgtggtctcacaaaatatcttactatactgtattcacccttcttatgatgtgaaatgataaaatgtgtatgtgatgaagtgaggtgagtgacacaggcattgtgacgtaacgataggccactactgaccttccaatgatacatcagaagggggtcccagatcattgagccatggtgatgtcaatggttagatgtcaggagcagacgatgttgatgactaatggatgaggagcatctcagcatggacacattgggcaaagggaggatgcacgtgccaggatggatgggatgggacagcaggagatttcatcacaccactccgaatggcaagcaatttaaagcttatcaagtatttatttctggaattttccattcaatattttcagaccacggttgatctctagtaactgaaaccacagaaagtgcataagggtagcctactatattgcaatgaggttgagtctttctctaccaaatatctagaatttcacacagtttgtaaagcatgcatgaagtagctcttgcatgaagagtaatgaggaccttacaggctaaaccctaaacacagcattctggtatcaggcacttgaggaaggacaataggcacaggaacaagaaactgctggtcctgtgtcttgatgcaggtgctgactgagcacctctgcttttccttcctacagttgagatgttccaggctctgaatactgctgacatgcagggccagctttgtggctgcgtaatccgtgcattctcaaagaaccttgtgcttggcttaatggtcctccatcagtcttgaaattcttaatatttcttgaacaagggaccccacattttcatttttcagtgggccctacaagttatgcagtgaatcttgatgataggattatataactcagtgattaaagcatggtttttaaagaaaagcctaggaacccaggaatgtacttttaaatttaataaatttaataaaagaaaagcatgaatctgagttggcattgcttttttaaaaaacagactttttttagagcaatttttgatttacagcaaaattgagaggcaggtacagagagttctcatatccctcctgcccacacatgtgcacagcctctgccattatcaacatcccacaccagagtggtatattagctacaatccaaccaatgaatgctgcactggcacatcattaccacccaaagtccatagtttacattgtggtcattcttggtgttgcacactctggatttggacaaatgtataacatgtatccaccattatcgtgtcatagagagtagcttcactgccctaaaaatcctctcctctgcctagccattcctccctcaccaccaccccatacctgaactcctggcaaccactggtctttttactgtccccatagtttttccttttccagaatgtcataaggttgaaatcctatagtatgtcgcctctccagagtggcttctttcacttagtgatatacatttaagtttctgccacgtcttttcatggatttgctttttaacaggcatttgggtacaccattttcctctgtcctcacaaataagtggctgtggcgccactttttgccttacaaagatggagatcagacttctgtgtttggtgatattgatcaaggttcccacattgtgcctgcaggctgggtgccgagctgctttcctttgtcccatgccccaccctccatcagtgaaaagcctcattttctgtctttccatttaatgttttacccttaactgagacttggtttagagtgattcacattctgaactcaagcatgtttgcccagttgccatatgacctccagccttgttaggaaaaacaatacaactcatgattgttttactatgggctcatttacagcaagtgctactgcaaaccagtgcatgaaaaagatggcaaatgcttctcttgccatctgtctctgccagagaaccagggagtgaatatgaagctaaacgagttacagacaagcatttccacaccaccttacacaacaaggacagcaaaactttgacttcttaaagacatctggagctactggctatggtgaatgggggagacaatttattagggtgatgtatgtttcttagtttctaatgatacataaattatcccatgagccatgatacatatggcttaaagagaattttaaatgaaagtaattttttttctagcaccactaattgcctagcagcagtaaattactcatctcccacggcctatgggctgtggtcattactctgtcctcgaggttgagtggatgtcccccaagaggaacatttgctctgaaaaagtgaatttacatcctcacttgtgagcccactatgctaggtctacagagggagcaggtattaatcacgcctttcggacatagcactgtgtttgtgccctcctacatgtgttatttatgatagcaggacagtgggttgagtcttagctcttggtttgcctttgggggaaaatcagagtgctgctatcaataattaatttcgtctggctggttggggggcagggaggcatggtttgaaagatagacttagctaataagcatggaagtttcctaggtgacaagttaaacaagggaagtgataagcatcattagttttgggaaacactagataactacatgatatgtagaaggagaatgatgatgctatcaaagaccattaactcagcatatttttgttgatttccactactgtgataagtactaaggatgcaaggaatgagtgagaagattcctgccctcaccaagtttggtgtccagtgggagagagaatcacagaaaaaaacaaagataatacaaggtcagcccaaggtactacatgagagcagaatggagatagcttctgcctgcctgttgaggagactagacaatgctggagcttagatttgaagaatatgttgtatttgaccagatggccatggcgtgggatggccatggcgtgggatggccatggcatgggatggccatggcgtgggatggatgagggtaacaatggcaaaggcctggacatcagagagagaacctggtcagttaggaaaacgatgctttggcgtggtcagcgtataggctgtatacagggaaaatgacagaagacaggactagagaagggacaaggcaaggccacaggagtatgtatgccatgagagggagggctttagacctgagaactgcatgaccagagagggcagaactgtggaggatgggttgaggtggagggaggcaagcagggaaatcagtcacaaagctgctgcagccatccagattaaagagagagagagaaatgccattaccctgtaattaaacacaatcacaaacataacgagaaatttgccttaaaattatctctcagaaatacactagattggcgtgtgtgcatgtatatatatatataaaatatgtattatataacatatgtgtatgtattgtatatgtgtgtgtatatatacgtgtgtgtgtgtgtatatacatatatgttttatctatctgtatatactgttatcccctgatatccatggaggattgattccaggacccctgtggaaaccaaaatccatgaatatttaagtccctaatgtaaaatatttgcacctaacctacacatattttctcatatactttaaaccatctctagatgacttataatacctaatataatgtaaatgctaagtaaatagttgttatactgtattcagggaataatgacaaggaaaaaaagtctgtacatgtttggtagagatgcaaccatacatttcttctgttgggtgaatccacagataaggaacccatggatctggaggatcaactgtatatttttgtttctcaactgtatatttttgtttctcacaagacttttctgctaattaccctgtcattttcttaagggctaatgcttttgaactatgcatttggaggggagggtctcctttcatagcttctattattgagaaatatacatttgttaggatgaatgggttgaatgcatatttccatcacatgcatattgcctcttctcacaattttaagaaaagaagcatatccaagactttccgtttctgcatcatcccttccccattacccctatacccacacactctgagatgctctgaccttggccagcagcagttttgtgtctattaaggtgtcaagacttggtgtaaccactaataaaatctgtattctgtattctgatgcttacaaactgcatagggactttataaggactccatcctaccctcagcctcccacctgtgaccacaatcaagatttgggagtgggatcacaaaggtttagagcctaatgaggctgcctgggaaaggagggtcttgcaagtaaatgccaggaggtgctttgcctctgcttcccttaggctagggcggtgtgtgggggtgggcgtgagaagactgaaggggaggggaagggagagtgaactgatgggagggacgctgagacaggattgctttgtgcccactcctacgactgccttcatttggaaggtggtagtaaatacagtcatgttggaggaatgtttctggaccaaggtagcctgagactgggggaacagagcaaggagagtggcatggcccccatctcacaagaagaaaaaatgaagttgtaaaaatgcctgagtgcatgtggtactgatctgcctttttccatccagaccctgcagagatggtcagcagtttgtgttgagaccagtcccagtgatgctccttccgactctcccagccccagcgactgcaccccatgaggattacaggtggtaagctcctaacatttccttaattaaaacccatgtatgccggaggttgcaactttttgaatttttgcatgagtgaaaaatcagaccttggcaatgaccttgaacagtaggatataaataactcccacatacttagtgttccaataatggaacactaggcataagtaggtttaatgtacggaacatatggggtgcaaggacagaaaaaacccaacaggaatttcctcatttctccaagccaggtcaggggagccaggctggacgttggtgttgagggagaactctcgccaccctgcaggcttactatgaagcaggacacccatctccagccctgaggggcacaaaaggcagactggcatagaccccgtaaggttcagctcttgacagtgtgctcagagggctaagccacagccttaaggtgatccactccagcacagtgaccctgcacgaccagtgaggcactatgaggggatatcaacattgtccaaagtcatttctgaacaatgagccacaaagtcctggtttgatctctggggaaaatgcatttcaacctcaagccagaataacataaagactgcttcctgtatcttatcccttgacagccaagtttcttgaacagcttttaaggaaccatagtaacagttggaggaaggggtgagtggatcagtgatgatccttctactagacttttatctcccttgcataaatggccccatggtccacctggaaaaggtaagtgtaaggagaagagatggcagaggcagatagggttttaacctaggtgatgggcagataagtttggaggtggggagttaacaggcaacgacatgactccaccctcctcccacttttctccaggatgagggaggttctgacctttagcctttacgcaaaatactcttgtcaaagtttccacatttatgtgattgagacaagagccaacatttattatcctacattaaaactgaagcaactaaatgggataaaactcacagatatatatttcttccccattggccttttcaaaaatggcaatcaattttcacagcaggcagcttagaaggtcaagttattgggacaaaaatgggtaaaagccaactgaaaca

SEQ ID NO: 37 - DNA, 2793 bp, Homo sapiens
ggaggctggtccgctgaagcgtggaataagtcccctaggaccccaactggggaagctccggtccccgaaatgcaatggcacatcgtgattctgagatgaaagaagaatgtctaagggaagacctgaagttttacttcatgagcccttgtgaaaaataccgagccagacgccagattccgtggaaactgggtttgcagattttgaagatagtcatggtcaccacacagcttgttcgttttggtttaagtaaccagctggtggttgctttcaaagaagataacactgttgcttttaagcacttgtttttgaaaggatattctggtacagatgaagatgactacagctgcagtgtatatactcaagaggatgcctatgagagcatcttttttgctattaatcagtatcatcagctaaaggacattaccctggggacccttggttatggagaaaatgaagacaatagaattggcttaaaagtctgtaagcagcattacaagaaagggaccatgtttccttctaatgagacactgaatattgacaacgacgttgagctcgattgtgttcaattagaccttcaggacctctccaagaagcctccggactggaagaactcatcattcttcagactggaattttatcggctcttacaggttgaaatctcctttcatcttaaaggcattgacctacagacaattcattcccgtgagttaccagactgttatgtctttcagaatacgattatctttgacaataaagctcacagtggcaaaatcaaaatctattttgacagtgatgccaaaattgaagaatgtaaagacttgaacatatttggatctactcagaaaaatgctcagtatgtcctggtgtttgatgcatttgtcattgtgatttgcttggcatctcttattctgtgtacaagatccattgttcttgctctaaggttacggaagagatttctaaatttcttcctggagaagtacaagcggcctgtgtgtgacaccgaccagtgggagttcatcaacggctggtatgtcctggtgattatcagcgacctaatgacaatcattggctccatattaaaaatggaaatcaaagcaaagaatctcacaaactatgatctctgcagcatttttcttggaacctctacgctcttggtttgggttggagtcatcagatacctgggttatttccaggcatataatgtgctgattttaacaatgcaggcctcactgccaaaagttcttcggttttgtgcttgtgctggtatgatttatctgggttacacattctgtggctggattgtcttaggaccataccatgacaagtttgaaaatctgaacacagttgctgagtgtctgttttctctggtcaacggtgatgacatgtttgcaacctttgcccaaatccagcagaagagcatcttggtgtggctgttcagtcgtctgtatttatattccttcatcagcctttttatatatatgattctcagtctttttattgcacttattacagattcttatgacaccattaagaaattccaacagaatgggtttcctgaaacggatttgcaggaattcctgaaggaatgcagtagcaaagaagagtatcagaaagagtcctcagccttcctgtcctgcatctgctgtcggaggaggaaaagaagtgatgatcacttgatacctattagctaaagttctgctaaagatgattaaagttcaggcatccttatccagcggctgagcagaggaaccccaaatgacttggacaagcagttccaaaatgactctcttatttaattgtggagtgggaaagaggactcacagttagccagctgaccatgactgaagttccagctttactttttataaacttgaatgataaagaatagaccatgggctactactgggcattagtgcaatataacagcgataataaaattctctattagtctgttaatttatgacatgatctcggaatggaaaaagatcatttcagagtgtgcgaaataatagtctttaaccatgtaattaaatatgtgtgtttattgtcaaataaggatttgttttaaaggtgattcttgggtttgaagacatttgttaattcatggtctgtacagaaatgaagctggttgcaataccaatctagagagtccaagctggcgaactattaagctgtttaaagatcacccttggcctggcacagtggttcacacctgtaatcccagcactttgggaggcctaggcaggcagactgagctcaggagcttgagaccagcctgggcaacatggcaaaaacccacctctacaaaaagtacaaaaattagtcgggcgtgatggcaggcatctgtagtcccagctacttgggaagctgaagtgggaggatcacctgagctctggaggtggaggctgccatgagccatgatcgtgccactacactccagcctgggtgacagagtgagatcctgtctcaaaaaaaaaaaaaaatcacccttaaatcaacaaaaagacctcatgctcatgcagtggacatttcttggcctgttttcctgtgggttttcttcagcatgatatgaagcaactgttggcatagccagtgggataaataagaaatggaatcatttggctgcctcgtcacttgtgctaatggtcagttgtacacacatgacatgtggaagtgacctgtagcagcggtcactcattttaacaattgaactctgctgggttgggtatttacctttgtctagaaaagaaatatgatatattttctctaaataaatttattttcatcattcca

SEQ ID NO: 38 - protein, 536 aa, Homo sapiens
MAHRDSEMKEECLREDLKFYFMSPCEKYRARRQIPWKLGLQILKIVMVTTQLVRFGLSNQLVVAFKEDNTVAFKHLFLKGYSGTDEDDYSCSVYTQEDAYESIFFAINQYHQLKDITLGTLGYGENEDNRIGLKVCKQHYKKGTMFPSNETLNIDNDVELDCVQLDLQDLSKKPPDWKNSSFFRLEFYRLLQVEISFHLKGIDLQTIHSRELPDCYVFQNTIIFDNKAHSGKIKIYFDSDAKIEECKDLNIFGSTQKNAQYVLVFDAFVIVICLASLILCTRSIVLALRLRKRFLNFFLEKYKRPVCDTDQWEFINGWYVLVIISDLMTIIGSILKMEIKAKNLTNYDLCSIFLGTSTLLVWVGVIRYLGYFQAYNVLILTMQASLPKVLRFCACAGMIYLGYTFCGWIVLGPYHDKFENLNTVAECLFSLVNGDDMFATFAQIQQKSILVWLFSRLYKFISLFIYMILSLFIALITDSYDTIKKFQQNGFPETDLQEFLKECSSKEEYQKESSAFLSCICCRRRKRSDDHLIPIS

SEQ ID NO: 39 - DNA, 2448 bp, Homo sapiens
atggcacatcgtgattctgagatgaaagaagaatgtctaagggaagacctgaagttttacttcatgagcccttgtgaaaaataccgagccagacgccagattccgtggaaactgggtttgcagattttgaagatagtcatggtcaccacacagtatcatcagctaaaggacattaccctggggacccttggttatggagaaaatgaagacaatagaattggcttaaaagtctgtaagcagcattacaagaaagggaccatgtttccttctaatgagacactgaatattgacaacgacgttgagctcgattgtgttcaattagaccttcaggacctctccaagaagcctccggactggaagaactcatcattcttcagactggaattttatcgattatctttgacaataaagctcacagtggcaaaatcaaaatctattttgacagtgatgccaaaattgaagaatgtaaagacttgaacatatttggatctactcagaaaaatgctcagtatgtcctggtgtttgatgcatttgtcattgtgatttgcttggcatctcttattctgtgtacaagatccattgttcttgctctaaggttacggaagagatttctaaatttcttcctggagaagtacaagcggcctgtgtgtgacaccgaccagtgggagttcatcaacggctggtatgtcctggtgattatcagcgacctaatgacaatcattggctccatattaaaaatggaaatcaaagcaaagaatctcacaaactatgatctctgcagcatttttcttggaacctctacgctcttggtttgggttggagtcatcagatacctgggttatttccaggcatataatgtgctgattttaacaatgcaggcctcactgccaaaagttcttcggttttgtgcttgtgctggtatgatttatctgggttacacattctgtggctggattgtcttaggaccataccatgacaagtttgaaaatctgaacacagttgctgagtgtctgttttctctggtcaacggtgatgacatgtttgcaacctttgcccaaatccagcagaagagcatcttggtgtggctgttcagtcgtctgtatttatattccttcatcagcctttttatatatatgattctcagtctttttattgcacttattacagattcttatgacaccattaagaaattccaacagaatgggtttcctgaaacggatttgcaggaattcctgaaggaatgcagtagcaaagaagagtatcagaaagagtcctcagccttcctgtcctgcatctgctgtcggaggaggaaaagaagtgatgatcacttgatacctattagctaaagttctgctaaagatgattaaagttcaggcatccttatccagcggctgagcagaggaaccccaaatgacttggacaagcagttccaaaatgactctcttatttaattgtggagtgggaaagaggactcacagttagccagctgaccatgactgaagttccagctttactttttataaacttgaatgataaagaatagaccatgggctactactgggcattagtgcaatataacagcgataataaaattctctattagtctgttaatttatgacatgatctcggaatggaaaaagatcatttcagagtgtgcgaaataatagtctttaaccatgtaattaaatatgtgtgtttattgtcaaataaggatttgttttaaaggtgattcttgggtttgaagacatttgttaattcatggtctgtacagaaatgaagctggttgcaataccaatctagagagtccaagctggcgaactattaagctgtttaaagatcacccttggcctggcacagtggttcacacctgtaatcccagcactttgggaggcctaggcaggcagactgagctcaggagcttgagaccagcctgggcaacatggcaaaaacccacctctacaaaaagtacaaaaattagtcgggcgtgatggcaggcatctgtagtcccagctacttgggaagctgaagtgggaggatcacctgagctctggaggtggaggctgccatgagccatgatcgtgccactacactccagcctgggtgacagagtgagatcctgtctcaaaaaaaaaaaaaaatcacccttaaatcaacaaaaagacctcatgctcatgcagtggacatttcttggcctgttttcctgtgggttttcttcagcatgatatgaagcaactgttggcatagccagtgggataaataagaaatggaatcatttggctgcctcgtcacttgtgctaatggtcagttgtacacacatgacatgtggaagtgacctgtagcagcggtcactcattttaacaattgaactctgctgggttgggtatttacctttgtctagaaaagaaatatgatatattttctctaaataaatttattttcatcattcca

SEQ ID NO: 40 - protein, 209 aa, Homo sapiens
MTIIGSILKMEIKAKNLTNYDLCSIFLGTSTLLVWVGVIRYLGYFQAYNVLILTMQASLPKVLRFCACAGMIYLGYTFCGWIVLGPYHDKFENLNTVAECLFSLVNGDDMFATFAQIQQKSILVWLFSRLYKFISLFIYMILSLFIALITDSYDTIKKFQQNGFPETDLQEFLKECSSKEEYQKESSAFLSCICCRRRKRSDDHLIPIS

SEQ ID NO: 41 - DNA, 33551 bp, Mus musculus
  misc_feature (1)...(33551): n = A,T,C or G
taaataataaatcttaaaaaaaaaaaaaaagcaagctagagaggggagggcagggaaaggaagagggaaggaaagaaatgagagacagcaaagcctggagtagtggcccatgccacatcccatgactcagatgctgaagcaagagggttgtgctcgacaccagcctgacctacatagtgaaaccctacctatcaacaagtatatttataaagccagcatttaagctgggcctagtggcacacttatgtaatcctagcatctaggaggctgaagcaggagactcataagctcaagactagcctgggcttgcaagaccctgtttcggaaaaacttttaaacatttaagtaagactctagctatttgcctagttggcagattaaaactggagactggggtttctgattcatggcctttctaaaattctgcattgcttctatggtgaacacaaaacacagctcaacaagtcagctaatggagtctgtttcatgtaaagaattgcccttgattatgtatttactacactgcagcttcagccttgctgaccctctaactccaaagggagagccagttttcatctttaggacctaaagcccacagggatgtgagtggagttgctggagcatgaacagcccttggaagggggaaaaaaaaaaacctttgtatgatgagtagcatttgtcttgggtaacctaagtagcttccttggaggccattctgtacatgtgtgactgattgtcaccatacaaccacaggaaaaacaaggtggaaaaggcttttgttgttttagatgaaatctcatgtatgcccggctggccttaaacttactgtataattacatacacaagccaatgcacccaacttttactattgtttttaaagacagtgtttctatgtagcccttcctggattttgggactcattgtagaccaggctagccttggactcacagatatctgcctggctctgcctccccagtgctggattaaaggtataggccgtgatgcctggctcaaactcagcttaggaaaaaaggtcttactatgtagcccaggttggcctgaaacttactgtttgaaacaaattagctttgaatttgagaactcagcaggtagctgaagatgattttgaaaactgatcctcctgtctgacttccatgtgctgcggttacaggggtaagaccagtttgggaaacagcatggtactgcctcaaaaccaaccgaccaaccaaccatccaacaatttaaccaaccaaccatccaacaatttaaccaaccaaccaaccaaacaaacaaacaaccatccaatcaatcaaccatccatccaaccaaccaaccatccaaccatccaaccatccaaccaaccatccaaccaaccatccaaccatccaaccaaccatccaaccatccaaccatccaaccatccaaccatccaaccatccaaccatccaaccatccaaccatccaaccaaccatccaaccatccaaccatccaaccatccaaccatccaaccatacaaccaaccatccaaccatccaaccaaccatccaaccatccaaccaaacaaccatccaaccatccaaccatcaaaataaccatccaaccatccaaccaaccatccaaccatccaacaaacatccaaacatccaaccatctaaccaaacaacccaagcaaccaaggccagctcattaggtaaatgtgcttgctgctgagctgtaactttaactttttaaaggtctacttgtaatgatgatttgtaaatgctttgacctctcctttagcccactacccatcacaggtagtggaaaagaaaggatatttgggaagtggacctgtttagaaatggttttttgaagcaactcttgtctgtgttatctggaaatcagcagttcagttcacaggttaacaatggcagcttgatccagtcttaaacactttatggatactccagcagtctagtttggtagagttgggttagcaacactggtggcatgtcctagtaggaacacccaggcctcaacctcaggaaaaatcagaaggaggacaagggaggaaggtcaggaaaagttctcaactgtatctctgagcaaagtgaagatcagcaaagacttgagactaacaagcaatgttcagctagctctataagtaagccaagctcagcctctatcactgtctgttgaatcttttttatactctctctaaacatcatgagtcctctttgggtcttgtctcagcatgtgtcttgccttagcacctgagtctgtcttagctgacatcagatcatcccgagtccgaggaagcagcaagaagccaaggcacactaccataagttttttggtgtttctctttatggagtcctgacaaatgtagctcaactatgcaatgtaaggcaggccaatatgttgtgtcattaaataatccttagtcatatgtccattcattggcttgctttagtaaaacatccttgcacctgtgtccacttcagaaaacactcctttatgtgtttgccccaacaaaacaccatccaacacaactgactctccaaagaacccttaagtttccactacagtgggcctgacaatcaagactgatgataacctgagttcaattcctgggcctaacatagtggaaggagagaaccaactcttgaaagttgttctctgacctctacagactcatactgtggtacatacacttgatcaatgattaaaatgtaacaacaaaagatgtttcttgaaatttttcataaataactcatttttaaatttaaatttctgagatagaatctcactatgtagaccagaccagcctggaactcattagaaacatctgcctctgtgtccagagtgctgggagtaaaggtgtgtaccaccatagacagctttattagtgtgtatagatatgtatgagtgcctttgcctatagagccatcttgctggcccaacaactcacaaattttaaattgcctttctgagcaacaagatgaaatttgattcatctcctttcctgccaccctgcacatgagtcattcctttgtgctgtggatgtaacccatcctgggagaggagagaggagaagtgggggtgggggaagggtacctttgccctgggatcagctgccaccagccctaatgcagcttccctttctttctttttttttctaacattttaaaaaagatttatttgtttattatatgtaagtatactgtagatgtcttcagacactccagaagagggcatcagagctcattacacgtggttgtgagccaccatgtggttgctgggatttgaactcaggacctttggaagagcagtcagtgttcttaaccactgagccatctctccagtgtgtgtgtgtgtgtgtgtgtgtgtgtgtgtgtgtgtgtgtgtgtgtgagagagagagagagagagagagagagagagagagagagactgagctaccagcctcctcctgagatccttgaatccaaggatagagacatacacacaggtggttactttacaacttgccttctaggcacaatttctgggcacagatatctcctgcatggaaaagcatgcccttaccagtttattatctccatctctccaacttccctaaacttagtgctagtcccatctagcctctgccaaatatccttagccatccccctgtagcagaggccacaggccctacccaccccccccaggccttacatgattattgcattcttcttcctccaaggcatggcagaaaggctttctctccttccctgggacccagaagcccaacctataccttctgcccaacaattggtcccagccttctttattaaccaagaaccaattggggaacaagacctttgcatcagaacctccccttccaggggaggggagagagggaggagagagagattctatcttattacttattgctcatttcttacaatgcaaaatttatgaattaaagttattatatatatataataactcagatatttggggatacatatatatatatatgtatatgtcagtaggagaccatatgccggccatgtacaagaccctagcttcactctccagaacagagagatagagagatgagtagagagacagagataggtggagatggatggatggatgagagatagatagatagacagacagacaggacatagtacagaacccagagctatctgtggcatctcctggtggtcttggaatatatctctatcacacatgctattattgtggaaacttattatttgttgaaccatcagctttttctgttgagaccattaattatatgatgtgaagaaagcatgaaaacaatcgatttcatcttaattgttctttgcttttgtttttgttatgtattttgaacttattccttctgtatctgtaggctttttaaaatgtgactcctctagcacaggactaagcactgctccctttattccagttagcacctggcctctccctttctgctttagcataagccatagagccaacattatattttgtggtgttctatttcttctccaactgtaaattgagtatttctttttccctgcttgttctttttgattgtagacctacctaagagtaactactagtaaccaaatgatagagtcaatattgggctgtctgaaatattttctgccaataaaattagttcaagactcttgagtttggattgacctgtgggcaaatctatggggggattttcctttcctttccttccttccttcttccctccctcctttccttccccttccttccttccttccttccttccttccttccttccttccttccttccttccttcctccctccctcccttcctcccttccttccttcctccctttcttcctccctccctcccttccttccttgctttcttttcttatttattagatttttcaaaatagggatctctctgtgtaaccttcactgtcctggaattcacattctagaccaggctggcatggagctcagaggtccatctgtctctacctcctgagtgttggagttaaaggcacatgccaccaccatctggtggggagttttcttgatccatgattgatgtgggagggcccagctcactgggtggtgtcaaccctgagctgctgcttctgggtgctatgagaaggaggctaagttatctatggtgagcacactagtaagcagcacccctctgtggcctctgtatcagcttctgacttgagaagtttgtggtcttagggtggtgagatgccttacagaggcacagagctgaatcttccacagcagagcttaccagagggttcagatattctagacagagagggaggaggaaatcagagacccagcagcacaaagaaggggattggaaaagggagactcagacagagtggagctagaacacatggtgttcatacaagagggagaagaaatgctggtggaaggggggtgggggaggctgtcttccccctagctgggtcttcagttcactttgtatgaacagcagacctggaggagaccttggcttcatcttggtagaaggtaacagcaaatgtgcttcaagccattcccattacaatcagcattgccacaagcctagacaatgggtggtcagccacatcagcctgtggtttgcagctcagggaatcagactgggcaatgtctgggaagtcagtgatgcatacctgagattccttctagctctcctgctggcccagcccagctctcccttcagtgcacagcaggactcccttaacaataggctaagcatgtctaagttatgaattgtcccatttccatgtgtgactctattctgactgttccacttactgattcatttatctcacccagaacctttctcagcttctcaaaacttcagccaggtgtggtcacacatacctttgattccagcactgggaagatcgaggcaggcagatctctatgtgttcaaggccagcctgcactgaacaaggcagccatggaaacacagtgagacctagcataacatacatttaaaaaacaaaacaaaacaaaaagtaagtatatggcttggtagagtgtcagaatatagatgcgtaatattcctagaataataaaaaaaattcccagcttccaaaagattacttatagccccctttttctaattattccacagaaacaaataccatctttcccctatccccttcccctttccccccctttttccactgtgtagctttggcaggaattcaaactccttaagtagaccagactggctttgaactcagaaatccatcttcctctgtctcccaagtgttgggattaaaggcatgccccatcacgcttgtctttgtccttactcttttacatttttatttacttagggtttttttgttttgttttgatttttaaatttcagtggtgctggtggtagctggtgtgaatgaagagcttttacagatcagaaaaccactgtgggcatcatttctttctcctgtcaccaagagggttctgggaaatctaactccaatcatcaggcttgatagcaagcccttctagcttccgaacacagactcccatctctttaaagagtatcttgctgtgtagtccaggttgcctggaactcactaggagtcctgaactcctggcagtcctctttctcaggttccctagtgctgtgatgccaggtgtgtgccatctctcccagtgctctctacccttcctttgtatgtgtgtgtgcttgtgtgtgtgctaagcatgcttaggaatgtgcaggtcacgtacacacaggtggaggagatagggtgttcttcaatgtcatttcccctcttggtcctttgagacagatctctcactgaacctgaagctaggctggaatccagcaaaccccggttattctcctgccttctccttctctcaatgctggccaaccacatttggcttttttatgtgggtgctgtgatgtaaactcaggccctcaggctggcacagaaagcactatcacccactgagccatcttgccatccccttattcttaccatgtaaaggcagagtttagagaggcgtggtgatatgtgactgtaatcctaatcacatgcctgcaatcccagcatttaagaagtaaagaggaggatcagggccaacctaaactacacaatgaatatgagggttgcctaggctacacagtgattccctgactttaaaataagaaagaaagaagaaagaaaataaagaaacatcagacagacaaaagactaatagaaggaatagccaaatgactttatctagaccaggaagcagtgttatctccatttcacaggtgagaaagccaaggcaaaaacaagttaagcaaccagctcaggccatcatcgccttgggatctaatcttggtcaagttgctgcttggtctttagactatggcagatcaggtgacttccccgaggcggtttctttataaaaaggtcgtagtaattccacgccagcaaggctccatgctgctgtaatgtccgactaatcccctcagatcccgtctcagtagatctggactaggaaggcagaactctctgatcaggtgactctgctgtcctagaacacaccatgagagctcattttataaaaatagctttttctgggcatagctcacgccagtattcataatactcaagaagctgcggcaggaggatcactgcaagtttgaagtcagcctgggctccatgatgcgtttaaagccagcctgggctacagagtgagagtttgtctcaagagaaaaaaagaaagacaacttgaaggcctccgactctcaggagtcatcctaatttttcttagtaagtcttcttctcaagttctcacactggtgaaagtgaaatagaaacagattaatttgatgtggtccaacctttgcaggttagaatactctgatcccagatgatcccccaggggcctccttcttccctggcagacaaaaacagaagaaaaattgcacatctttaacaagaggaagtgactcactggcttgaaatgtaaaaaagaggccttttgtaggtgaaagggcaaagaaagaggtcatgttggagagccgtcattagaatgtgggggaggggagtaacaagcggtggacagatcaaatatttgcttagagcagtggttctcaaccttcctattgctgtcaccctttaaaacagctgtggtgacctccaactgtatcattattttgttgctacttcttagctgtaattttgctactgttatgaaccgaaatgtaaatatctgctatgcagatagtcttaggcggcccctgtgaaagggttgttagactcctgagccatgacccacaggttgagaacctctgacttagaataataccaaaaaataaaattaaatttaaaaaaaggatgtagttgattgttctcatttttacatcatcatcactatcagaaggagaattgtggggtggtttggtttggtttggtttggtggggtcagtgtcttgctgtgtagcctgcctggtttggtattcactatgtagctcaacctagtctcaaacctgtaatcctcctgtctcagtctcctgagtgctttggctcacaatcagctaaacttcagctcctagcaatccaatgtccttttctaaaaggtctcagatgacatctgcacagatgtggcatacatacatacatacatacatacatacatgcatacgcatgtaaaacacaatctttaataaaaacatccagagcatctttggacttccagacatttcttctttttctttttcctttataattatacggtggtgtcttccagtgcctgcaatggattgattcaggcacacatattaatgaagccagtttggctctttggacctttgaaaaagtaagcagcgcttgtgtgtatgcaactttggggaagtgattgacgtggaggtgagtgctgcccagagttcaaattccatagctccaaaggcaccttccacaagccccggttagtagggcccagcactgttgctgttgctcttattacatattctggtgacaggggatctatgtagctagggcacaagagcttccttcctatcttcaactgttccttctagtttcccttgcaaggaactagaaggcctgcacctgtatctttttccaggaaagaaattccctgaacccttatgactccagatggctgtacaactttcaagatcaaataacccagttcacgtccctgccctctcgacaaggattaaaaaatgattcagaccacttaaaaatattgcataagtcacgataaagttggccatcttccttagttgttggctgatatcactaaggagcaatttggaattgttttactaaagaaaacacagaagagaggctcaagctttgcttgtggaaattcagatcaaccttttaattagaagcttttgataagttgtctctctttgagaacggtattttttctggcctagaactcacaacaatcctcctgccgcaatttccctagtgctggctggggattacagaccagagccgccacatcccatggatgaattgtttacatccatagagcagtaaaccagaagtccctacaggtcattaacgtgttggaattccacacatctttgtaactttcttgacttaaagtaaaaggttagaacccgaacttccagttttgaagtggtcttttctgaagactctggttaatttgtctgcattttccaaaaccccaagacgccctgcatctttgcaatgcagctttcaggacccctgacctaagtcagacagcagaaggcctcgccccggctggctcctgctcttcttgtactgatctgggatctcagggcactgggctcaggaaaccaaggaggcccccgatattgtggcaccaggttggggttcccacgccctcatccccaatgagtggccccagagtcccagtccagcccagcacagggttcagcggccccaggcagctgggctatcacgtggctcggaggcttgggcggggcagtcaagcgatattttaacagtcgttctggccgctttgctgtgtggtgatctggaccgtgcggacttgctcgtccctcagctctcctgttaggtaggtcctgcaccagatctggccctcaggccgctgctgctctgcctgcactgggctcggaactgcagcaatgggtcggtgggggaggaggggggagggagcagccccgggctggttgggaaagctctcgcttttgttctagagttttcctttctgtttgcacgtccttctgtggtagagcaacttgcatttgtccggtcgaggttttatttaaatggaaacacctcacagaagaacttataaggtgcatagtgagaattgtctgggtttcctttagtgtcccactaggcagcagtggctgcccgcaggctctctatggtccaagctgggctgaaactcttgctcctcctctgcctcagccccacctcacccttggaaaacggaaggagatattttatgggctgctccttggtatagatactgctcgaagcttctgctttctggacagttcttcctaaggaactgggactttggattggaggcagagcagtctagacaggttctgttgctgggcagaaggcagtttcatgtgggtgtgggtcactggggataggagattttacagttccctggagtgactttcttgagctcagtcagcattaaggcagccactgctggtttcaatcttgttcactagagtggtaaacaccctcaagtatcagtttgatagtcctgatgctgagagcccggcatggtggcctgtacctaataccaacactagtgaagtagagtagagagagtcagcctgggctttagacaggcagagactaagtatagcaagggccatctttaattctagcacttgggaggcaaaggcaggtaggtctggtgagttccaggccaacctggctagccaggactgttacaaagagaaatactgtctcagaaagcctacagaaataaatccattaactaattaagggcaggtgtttgggggaatctaagatgtcttctgtttaaatggaattttctgccttttgggttagcatttttgagaacaggcatttcagaggcatttctagtgtcccatttaagagacaggacaatgactactctttcctattgaaagtgtgtaaacagccctggagcctccagtcaggttgttggccttgaaaagggctctgaactagaggggtggggttggggaactgaaactgtctatgctggaattgtgggcctgcctaggttgggacaggaattggtcctcaatgttctgaaaccagtttcttttctctccaggcgtctcttttctccaggaggaaaaaatggcagcagcagtagtggatccgcaacaggtatgattttttttaagtattcgtttcttggtcctttttcctttcttgtgatttgagtcattactatccactcctccgtgtttgcagagcgtggtgatgagagtggccaacctgcccttggtgagctctacctacgaccttgtgtcctccgcttatgtcagtacaaaggatcagtacccgtatttgagatccgtgtgtgagatggccgagaagggcgtgaagaccgtgacctctgcggccatgacaagtgccctgcccatcatccagaagctggagccacaaagtgagtctagattctgcggtcaacactgagcccaagggactgggtagggtgagtgctaagtcacaccagggatcccccaggccttcctgaagcacaatccctcctctacccagaaactgtctgctgaccttccttcacacggatgggctcttcacagccataccggtgctcactcttattactctaatagaaacttcccagccaggcgtggtgctcacaccccagcactttgaagggaggtgaagaggtgtcagttgaaggcagaccatggctacatagtgaactgcaggctgcctgggctgtatgagacagtgtctcaaaaaggaaaaacaaacaaacaaacaaacaaacaacaacaacaaccctatactcgagggtgtgtgccgttagtccaattaggcaggcagatctttgtgttcaagcccactttagtctacctaacaaaatccaggctagtcagagctatatagtgagaacgtgtctcaagacaagacaacaaaccaaaaagaaaagaaaaagtaaatttccaaaacacttttgtgttaataactgaaattacaaaggcatcatccaagggggtttcctgagttagctttctcatacagcgtgtgcagattgaaaaaacaaaatttgattacatttgtgtttacattttgtgtctgcatgtgtgtatgcatttgtgtgtagatgcatgccgtgccaatgctcagagaataccagatctaattcaggtcctcaggctgggtattgagctcccttaccactgaattagctccccgcccaaacttttcttttttttctttttttttttttagatttaattatttattataggagtgtactggctagttttgtgtcaacttgacacagctggggttatcacagagaaaggagcttcagttgaggaaatgcctccatgagatccaactctaaggcattttctcaattagtgatcaagggtgaaaggccccttgtgggtgggaccatctctgggctgatagtcttgggttctataagagagcaggctgagcaagccaggggaagcaagccagtaaggaacatccctccatggcctctgcatcagctcctgcttcctgacccgcttgagttccagtcctggcttccttggtgatgaacagcagtatggatgtgtaagccgaataaaccctttcctccccaacttgtttcttggtcatgatttttgtgcaggaatagaaaccctgactaagacaaggagcatactgtagctgtcttcagacactcaagaagtgggagtcagatctcattacagatggttgtgagccaccatgtggttgctgggaattgaactcaggcccttcggaagagcagtcagtgctcttaaccactgagccatctctccagcccccaaacttttctttttgagacaaggttgcgcattgtagctcatgctggcctgacccgcaaactcactatgtaactttgtcctcagggatatccccctggcttagcctctcaaatggctaggattacagacctaagccaacgtgcctggcttatacagtactggggatagaactttgctgatctacatcatcagcctaaaacttttaatttaattttatttttcttttgttccccctctcaaccccctcaaaacttttaatttttaatattaacattattgagataagaaaacgcattgtacagttaatctacttatgttaaaaatggctataccgggctggtgagatggctcagtgggtaagagcacccgactgctcttccgaaggtcaggagttcaaatcccagcaaccacatggtggctcacaaccatccgtaacgagatctgactccctcttctggagtgtctgaggacagctacagtgtacttacaataaataaataaataaataaataaataaataaataaatcttaaaaaaaaaaaaaaaaaaaaaaagagagtctttaaaaaaaaaaaaaaaatggctatacctcactggaagggtgctttcctggcatgtatgagaccctggattcaatccccagaactgcaaacagtgagaacaagctcgttttcaggagtagtcaggcccacttccttccatcccctcaggttgctctttaacctatttttatataagataatttctggcctttggtacaatcagagtcataaaataagatcttctgcaacaggcttcttttacttagcatagaggttttcaggatttctccgtgacacagcattgtatgtacttcatagccacacagatgctcatgttatatctgtatttaattcctttttatggaggaataatatcacatagtgtgggtagaacatatttgtcttagggctactattgctgtgatgagacatcataaatccaaaagcaattggaggagcaaaagctttatttggcttacatattctgaatcatacatagtccattaagggaagccaagacaggaactcaaactggtaggaacctggaggcagaagctgactctgaggccatgggagagtgctgcttaactggcttgattctcatggcttgctcggcttgcttatagaacccaggaccaccacgtcaggggtggccctacccatattgggctggacactccctcatcaatcactaattaagaaaatgcctcctggtttgtgctatcttttggagacagtttctctgttgagattcccgcctgtctgatgtctctagctgtgttaagttgacataaaaactagctagacagtgcgcctcccactgtgtgtgtgtatgtgtgtgtctgtgagtttctctgtgtgtaggcatgtggaggtgttggattgatgccaggaacctccctgaatcaccctttgaggcagaatctcgcaatcaaacaccagagctcactgccatggctcctcaggctagccaggctgctcctcagatgttcaattaaagcagaggccatggtaacagaggacttgtagtccacattatgtggattctggggctctgaatgctggttctcactggttctcaagcttttgtgcttgagacacttttaaccaccaagctgtctctccagccccaacaattgatcggttcatcaactgatggacatttaggtagtgtctaccttaggaagatgaatggtgcttctgtggacatatgtatgttcaccccaagttttgggcgtagtattttcagtctccttcgtatgtacttaggagtagaactgctgggtctttaataactgcatttaaatttcagagggacttgggattggagagaggtgacggagggttaagagcactggctgctcttccaaataacctgggtgagattgccaccacccacatggtccttacaactatctgtaactccaactccaggggacccaatggcttctttggtctcccacagacaccaggcttgtacacttggtacacagacatacatgcaagcaaaacacccaaccgtacacattcaaatgtttttcttcaattttagaggaactactagactctccaaatctctccaaaaacataaatgaactgctttaaacaaacatttgcatcattccccccacccccaaagggtaaattatggtctaggattataaggaccacttaagaaacagctatcccaacacttcgaactccctaatgaatttggtgtggattcttgacccgttatctttaagggggaagcttggactgaaacaaacctaggccttgttaggaagatccagggtgctcctgtcactggtgagaccccagcatgtatctctatgtactgagataaataggaattaacccagcgtgggtagctttatttcctgagtgacgcttcagaagacgcttgcctcaccctgcctgtcactagcaccgaggccttctcccttagctgcttttcccacacaacctctcatttacctctcactgaaagaaagttgccacgaacctgccagatttcttcctgggagagtgagagaaacctggaagtggattttgtggttttaagaacaacaaggctgcattctggctattttcattataagattaaataaacagcagaggtattatccgtgtgttcattctatccttacagtgagtgatcattttcctgtctgtgtttcctgcagttgcggttgccaatacctatgcctgcaaggggctagacaggatggaggaaagactgcctattctgaaccagccaacgtccgaggtgagcttgggacagtgttgaggtttgctgtttggggtgttttcatgttttctttagcccaggctctgtgtgccataaacacatgaatacctttctctcaaactggaactggagctggttatatttttgaaggagtggtgactactccgtgtcttccttagctgctgttggggtgagatgaactaactgctttaggttagaatgcaggctgctctctatcagcttgcaactctgctcctgcggtgacactgctttgaaataactgactccatatggcgctggatgtgtatacaaactgggagagatagttctgggcactgatgataggaaccacatgcatacatgacagataatcagtgctggcaaaaacaattgctttctctatcttagtgaccgtgaagttcagataatgccctaaattttctcttctggttaagaatacaacatttcacagaaggatatcagttagggggacattgggctgtgcctttcaccatttaaataggcaagtttactgtatgtcctttagaacgttttctgggtctctaaaattttcattgttgttgcttgaggaattattttccatttggggtatttaaaagttcatgcatgatgagaatcccagggttctaggcagagacaagctgttctctgtgagttcaagaccagcctggtctacccagtaagaccctttttaaaaaaaaaattttttttggtgatatatttataatacccagcatagcttatatacaatgaacttgtatctcattccttgcctagtgtttataagaccgagtttgatctgcaacaccacaacagaaatagtcaagttaggtgtatcaaactagctaaaaattaggttggggtattaaactaaaaacctcatgaattgagattgcattaagaagtgatattgaagccgggtgtgagggtgcacacctttaatcccagtacttgggaggcagaggcaggtggatttctgagttcgaggccagcctggtctacagagtgagttccaggacagccaggactacacagagaaaccctgactcggggggggggggggagggagtaattttgaggtgtttgttgctagagttccttgtggctgtgtgccaccctcccctggatctcttgctgtcttctctccttccctatgattcttctcattactctagacaaacctatgtgccaggccctagagggccaagttcaacttggtctgcagtttcctttctggaatgaagtgacttctgcatgaggaatctaaagttacataacctcacctctaggtagtaagtttctgctttttgttgttgtttttttttccctttgttttttgtttgttttgttttagttttttgtttttgagtgacagggtttcttagtctaggctgcacttgaattccatttgcagttaaaggtgaccttgagcttctggtcctctagcctccacctcccaatcctagtgttataggcttgtaggctcccatgcccactttctatggtgccatcctcaaaccctgtgtttcgtgttaaatgctctactaactgagctccgttcccagcctctccccctcttctgtggctctttctccctctccttttgcctacaggcagatgtaccattgtaaaggctcactagatcagtcttgggcaggaagctgttggttgaacccagggcttttgttttactttggtttgagtcgtggtttccttgttagcagaactggaactgcagcctgacttagcctcttgagtgatgggattagagacatgaaccacccacccagtagttttgaaaaatactatatgtgataggcaatggtgacacacacctctaatcctagcatgcggaggcagagcaggtggatctctgtgagttccaggtcagcaagggcagtatgtcctgagatcctgtctcaaataagaacaacaaagtcaaaacaacttgtctcaacaaattgataaatctcatgcttgtttatttcatttatacgtctaacagtccatagggagtggctggtaggacagagcaacctgatggagacactcagcctcattaagtcttaatgctatgtatgcccaagactgagagtgaaagagcatgctcagtccatgttgaatatttaggtatgcagtctttgtaaaaccatgagtgtgcattcgcccatagttctcataagccggcttgtctgtttctttgcttacagattgttgccagtgccagaggtgccgtaactggggcgaaggatgtggtgacgactaccatggctggagccaaggattctgtagccagcacagtctcaggggtggtggataagaccaaaggagcagtgactggcagcgtggaaaggaccaagtctgtggtcaatggcagcatcaatacagttttggggatggtgcagttcatgaacagtggagtagataatgccatcaccaagtcggagatgctggtagaccagtacttccctctcactcaggaggagctgggtaatggtgcctttgtgtttatgtttgagtccttttaaaaaagattattcatttatttagagacaggtctcactatgtatctctggctggcctgttacttgaaaagcagactaggttagtctgaaacttacagagatccatctgtttcttcctcttgagtacaaggataagtgtgtatcaccatgcccaaccaaaagataccattaacctttaattaattaattaatgaaattacttttgtgtgtttgtgtgtggtgtgcccctgagggacactctcactcagacaattacagtgtgggggctgggatcatcaggtgcctctgcccacttagctgtattgctggccttctaactttttttaaaggatcttaacataactcagggtagtcttcaactcactatgttgctgaggataactttgcttcttgtgtccctacctcccgagtaccacactctttctcctttatttatttatcttttactgagacagggccttatatagcctaagttgacctcagactcactaggtacaagatgctagctttgaactcctgatcttcttgtctctatctcctaagtgttggtattataggtgtgtacatagtaagttctggaccatccagggttgcatagtgaacacatcttttaaaaaaaaaacaaaaacatgtaatcccaaaactagaggatcagaccaggtggagaatcaaaaattttttttttttttaaaagatttatttatttattatatgtaagtacactgtagctgtcttcagacactccagaagagggagtcagatcttgttacggatnnnnnnnnnnnnnnnnnnnnnnnnnnnnnnnnnnnnnnnnnnnnnnnnnnnnnnnnnnnnnnnnnnnnnnnnnnnnnnnnnnnnnnnnnnnnnnnnnnnnnnnnnnnnnnnnnnnnnnnnnnnnnnnnnnnnnnnnnnnnnnnnnnnnnnnnnnnnnnnnnnnnnnnnnnnnnnnnnnnnnnnnnnnnnnnnnnnnnnnnnnnnnnnnnnnnnnnnnnnnnnnnnnnnnnnnnnnnnnnnnnnnnnnnnnnnnnnnnnnnnnnnnnnnnnnnnnnnnnnnnnnnnnnnnnnnnnnnnnnnnnnnnnnnnnnnnnnnnnnnnnnnnnnnnnnnnnnnnnnnnnnnnnnnnnnnnnnnnnnnnnnnnnnnnnnnnnnnnnnnnnnnnnnnnnnnnnnnnnnnnnnnnnnnnnnnnnnnnnnnnnnnnnnnnnnnnnnnnnnnnnnnnnnnnnnnnnnnnnnnnnnnnnnnnnnnnnnnnnnnnnnnnnnnnnnnnnnnnnnnnnnnnnnnnnnnnnnnnnnnnnnnnnnnnnnnnnnnnnnnnnnnnnnnnnnnnnnnnnnnnnnnnnnnnnnnnnnnnnnnnnnnnnnnnnnnnnnnnnnnnnnnnnnnnnnnnnnnnnnnnnnnnnnnnnnnnnnnnnnnnnnnnnnnnnnnnnnnnnnnnnnnnnnnnnnnnnnnnnnnnnnnnnnnnnnnnnnnnnnnnnnnnnnnnnnnnnnnnnnnnnnnnnnnnnnnnnnnnnnnnnnnnnnnnnnnnnnnnnnnnnnnnnnnnnnnnnnnnnnnnnnnnnnnnnnnnnnnnnnnnnnnnnnnnnnnnnnnnnnnnnnnnnnnnnnnnnnnnnnnnnnnnnnnnnnnnnnnnnnnnnnnnnatggaagcaaaaaggtggaaggatttgatatggttcagaagccgagcaactatgaacggctggagtccctgtctaccaagctctgctctcgggcttatcaccaggctctcagcagggttaaagaggccaaacaaaagagccaggagaccatttctcagctccactccactgtccacctggtgagcacccgttcattttaagaacaagtgtagatataattatgacacttaagactttcagtactgtgtgaatggccccttggaaccacagcaagtgtgcagatgactttagacaagaaaataaaagtagacctcctgggcattgtgttcagccacctccctgtcctgtggcatgaacagagtgtggtgctgttttcaatgatccagagatggagttcctgttgtgaacttctgcgggactccaaccctgagaagagcaacttctgtgggttggagagagggctgggtagccaagagcacttgttgcatctgcagaggacccagatgggttgccagcacacatatagcagctcaatccacctgtaactctagtgccaggggatccaacaccctctgctggcttctgagggcaccaggcatgcacattgtgcatatacatacatgtagacatacactcatacagataacataaaaataaataagtctttaaaagaaaaataaaaaataaaaaaagaatattctttaatcccagcactcggggaaggagaggttaatgtgattgggatatctgtgagtttgaggccagcctgatctactagcaagttctatggcagccaggacaaagactttattcccaaaaaactaaataaacaaaaaaaaatcagatatttgccctataaatacttctttctcttatagttgcaagagatagaaacagtgcacatcaagtagggcaggtttgtgcattatgtcacaatagattattgtgctgccattaaagaatgccaaggtgaagaatggcatgtaccgtactccagggcagtttcttctaggaagaacaggttgctggtaatggggaagaggaaggctgaattcttttcctccttttttgtttggttgtttttgagacaaggtcttgctgtgtagttcaggctgacccagaacttgaaacatagacaaagctagcttcaaacttgtagcaattctcctgcctctgcccatccccaatcctgggattacaggcatgtaccaccatgcctggctgccttcctccttcatttccccctatgcccctttcttcttttaattctcatttacccttcatgcaaatataaagtctattacctctcacctgtgctcaggggacacatttgacatttgacatgagcactggagacatgtttgatgtcagcaatgtaataattgcccagaaacagcaaagagctgctgctacttggttgaccgctaagccgataaatatatgcagctcttgttgaactccgtggtctctgtgttgcctgcgtacaccatggagctgcaagctgagggagcacgaagaacggccatgttcacctggttcgtttcattacagattgaattcgccaggaagaatatgcacagtgccaaccagaaaattcagggtgctcaggataagctctatgtctcgtgggtggagtggaagagaagcatcggctacgacgacaccgatgagtcccactgtgttgaggtaagatgacaggcagagccattcactaaggtgtctggagaagttcttaccacactgttggcttcagttcccttatgaatcctctcagagtatattcatatcagcccaagctggtggcacagacatgaagaaccagttacttgggatgataaggcagggcgatagcaggttcaaggcgagcctggacttaccttcaaataaaaattagagaggggctggtgaaatggctacccagttaaaggcacctgggacccacagctagaaggagagaaccaactccctcagggtctcctttgacctctgcctaagtgcacacagtaaaggtagtttaaatattatttttaagaatgaggagagggggctggagaggtggctcagtggttaagagcactgacggctcttccacacgtcctgagttcaattcccagcaaccgcatggtggctctcaaccttctgtaatggggtctggtgcactcttctggtatgtctgatgacagctacagtgtattcatatacataaaataaataaatcttaaaaaaaaatgaggagagggctggggatatagctcggtggtgcatagtacctgccttcaaatgggtgagtctggtggcttctggtggaagatatcaggacacagttgaggacgcacggttagtaaactagggcaagagccaacaggggctagtgttctagaactagctcagtgtaatcatacagaatggtcctctctgcgtccacaggggcagtgagcctctgaaatcagcgcgagctgctcatactgtagcttcctgtttgaccgagagtgtaggttctgactgtctgctctgccctgcttgctattcagtttaagaggatgacctttacagtcaggagttcaaatctcctactcagctactttgcagctggtaattgggcagattaaactctgagcgtatgttcctagctgtgaaatacgattagtgctgcttcatacagcattgttaataaaaagtcaaagcattggttgcagggttagctcaatgccagagcattcctccctgggaaaaacaagcaagcactcaggagtcagaagatatctgtatggatacatagccaacatactgactgtaactgggctcaatcatacacagcgccttcggatccacctctaattcttgagtttgttttatttttagcacatcgagtcacgtactctggctatcgcccgcaacctgacccagcagctccagactacatgccagactgtcctggtcaacgcccaagggttaccacagaacattcaagatcaggccaaacacttgggggtgatggcaggcgacatctactccgtattccgcaatgctgcctcctttaaggaagtgtccgatggcgtcctcacatctagcaaggggcagctgcagaaaatgaaggaatccttagatgaagttatggattactttgttaacaacacgcctctcaactggctggtaggtcccttttatcctcagtctaccgaggtgaacaaggccagcctgaaggtccagcagtctgaggtcaaagctcagtaaacccctccttgtcaccagagcatgatgttgctggccagatgaccccttttgctgtattgaaattaacttggtagatggctttagcttagaaaagcagcttcttagaaccaagggcctcattatggtcactcacagctcagttatggtcttgccccagctggccctggcacaggagttctcttacctggctggtgagtggcctgtgttagtcttgtgaggacctggaggaacctaaaagctcagatgcacttacagtcttgtctgtggcctttgtattgttattggctgtaaacgtctgtctggaccgaataaagattcattcacgtggcctctgctcctgtgtggtctgagcaggcttcatctctgtttctctcaaggcgtgtgcttgggcagcttgaggtgaggtttttccttccctgtgaagaaataccaacctttggacccaataacattcataactggtagagcacgtttatgttgttacatgtgctttgtgtgttgcttttattgacctgcgtgatctgcatgacattattaagcacatacatgagctccagttgacttgctggggagttcagcccagttgaaaagtaagtcacaagtgagactgctcagtgcgctttgcctggataaccggctgtgcgctttctgagtgagaaaactgcagtcattggtgaggtgggtgcccataggaaaacagaaataagtctaaggaacctgccaatggtcgccaagcttctagtccctttaaggagggcctgtccttatcacaaagctactaaagccttataaaagttccaaaaatgcaaacgagctctagggctgtagttcagtaggtagagtgctttcctggcatgcattaaaccctgggttcaatccctaacacctcagaagctctgcgtgaacactcctgggatctagcattttggaggtgctggcgggaagatcagaaggtcaaggttacctgtggctatatagtgagtccagagacagccagaattacatggaactctacctcaaaaacaaaacaaaacaaaacaaaacaaaacaaaacaaaacaaaacaaaacaaaacaaaacacaagacacccaatttcaggggctccagaagtctcactggttaaggacactgattgttcttgcagaggaccttctgggttcctttcttaatacctgcatgaaggctcacaggtgcttgtagcccagtcccagggaatgctatgccctcttctagcgactgtggtcattgcatgcacatggtacacatatgcacaatcaagcaatatactcctatgcataaagtaaaaaaagatcttttaaaaaaagaatgttttaaaaaagaaagtaaattctagagccacaagctctgcctattatgctaagtgagcagggctgcccttcagtaaactctaagaaggttatctcagccctagctggtgactttccatgaaaacaagaaagagtagccagatgatggcgggacacttctttaatcccagcacttgggaggcagaggcaggcagatctctgggttcaaggctagtctagtcaacagagtatgttcccagaacagtcagggctgaacagagaaatcctgtcttgaaacaaacagacatataaatacaaaaacctaaacaaaaacacaccacacacaaacaaacaaccccaaattgccaaaaccaaacacacatagacacacccaaaacaagggtgaacatttaacttcacctgtgtcctgcggaggctgggacagtaacagatttcctggtttcaggaaaggtacagtattcatgggtctctgcttcttcattttttttttttcttagttcaattctgtaattatccttccattctgcgcctcaaatgtatgtggggagtttatttgaattgatggaaatatttgtatttgagggtataaaaatgttaatagtaggcatatgaggaccattatgggtgtggagcagagaacaatttgtgggaatccattttctcctaaacatgtgggaatccattttctcctaaacatgtggtttcccccctcaaactcagttcgtcagggttggcagcaagtgcctggactctctgagccatctcactggccctttgttttttgcctttgagatggggacttactgtgtcacccaagctggcctaacttttggactcaagcaatcctcctgacgagccttcagagtagagggactcttggtactacacctggcttggagcattcacatgcaataagtacatacatgctttttcttgtggagactggtcttgctacacagctctggatgccttcagtctcctgaggactgagattataggcatgcgtcacaatgctgcctactcaattctgaaagtctcctcttgtgtttctccattacaagagtttcagtgctaattaaatagattatgaagaggagacaggtttgacatttcttccttagcaacagaatacagactagaggtgtgtatggcggcttcttcttctgcctttagttcctgcacttgagaagcagaggcagacagatctctgagttcgaggtcagcctggtatacaaaacaactggcagccaaggacacacaaaacaacaataaagccagacaacaatgcacttcagttttagatgaagcccctgctgcctgtcacgacctgtgaacactgatctcagttttgcctgtctgtgtctttgtttagagaacttatacaagcatgcttctcattgtcttttagatgtttggtgtcttcaaatattgcagcttctttgtggcataatctgacagaaaattagttttaatggatttcctaacatggtttcttacttaccatggtaggttagtaaataataactgtgtaagctctggtgtggtgagcctgccagcaggtcagtcagtcagtcagtcagtcagtcagtcagtcagtcagtcatccatccatccgtctgtctgtccgtccatccatccatccttccatccatccatccatccatccatctggcccagctcactggatggtgtcatccctgagctggtgtttctgggtgctatgaaagaggaggctaaattatctcatccatccagtcagtcagccagccagcaggcaaacaaagaaacaaactcaagaggttgtgaagtgctgtccattagtcttagttttctcattttttagagatcaaactatcctggaactcactttgtagaccagactggccttaaatgcagagatctgattgcctcctaaatgctgggattaaagacatgtgctaccactgcctgtcaaggatactaattctttctttctttttttttttttttaagatttattttatttgtatatgaatacactgtagctgtcttcagaccaaaagagggcatcagatctcattacagatggctttgagccaccatgtagttgctgggaattgaactcaggacctttggaagagcagtcagtgcccttaaccactgagccatctttccagcccccaggatactaattgttaaattgtctttattacaaaactaacttgctatgtataacactttagcctaggaaggtataggaaccccagagcaacaaattgatcaaagtgaaagaaaatactgacttaggtggtatttcctgtaagtggggaagaaaatgtctaacagctcctagaagttaaaggtgagaaaagtgatggactgtgttaattgacatttgacagaaggatgacaagcttacatggcctatgtgtaaatatcaatgatgtcaattttgataaaagttgatcagaaaatggttaccatttaaattatgtttttgtttttgatgctttttaaaatatttatttattttatgtatgtgagtgcactgtagctgtcttcagacgcaccagaagagggcattagaccccattacagatggttgtgagctaccatgtagttgctaggaattgaactcaggacctatggaagagccgccagtgctcttaaccactgagccatctctccagccctttagaaagccgaaggaattaggaagcaaataggaagattaatctgaaacaaaacatagagtgagtttatagtatgtatataggtaacagacttatctataatcctttactaaaaacaagacccttagtgtaggctttataaaatattttatttttagaagttccttgacacaggacctaatggtgcatatcttagtcccagcagatcagagcaggcctggtctagaagatgagttgaaggccagattatttgacattatgagacttagtttcaaaaaataaaataaaataaaaattttttaaaaaaaatcaaagatgggctgttgacacagagcagtatggggaatcaagagggatctttggagctggagaggcagctttagtgataatgtgtttgtctgatatgtgcaagatcatggcttcggtgcctagcatagggaagaacagagcaaaacaaaatgctcaaatgaatcagatacagaggagtggacattggttaggtgaatcagatgcagaggtgtggacattgattaggtggctgacaatagataataacaatcgttataacctgcacctattctgagaatgctaacttcctcggactcgttaagtcaagagcaaaccactgcattgctccccagagcatcccactgagggcaagtgagtgcgggcagcttggtgtagcccattcggaacagcccattcggctgtttctaactgttcagtataggaaagcaaaggaaactgacctagatgctccaggccctctgggatgcaagcacattctcaggctcacagtcggcactgcgagtgcacatttaccagcagtttaaatccctacggatagcctttctattcctgtagttgcctcttacattatccgggacccagggccaatcaaaaaagacctcaaagtgtttagtggcatcttgtggaaatttgccatactgtgtgaattcatgatatgtagcgtgtgaatggtgccccctaggggttgcgtgatgaatagcctgaaaacaaaaaacaaacaaacaaacaacaacaacaacaaaaaaaccgtggtatctctggctcaggatattctagttttcatgacagaaagaacagctggctttctgtccttgggggggggtctatggctacctcattggtgccgcactgtgcaggccatactgactccaccctccatcctcacctgatagtcatcttttcagcaaaacacttcttacaggcctgctttagcagtatgtaactgcttgttcatgccaacaaaacaagtatttattttctaattctgggaaatgagtgtgaagcattgcccaaagccctgaaaaggtggtgggcaagatcaccaacttagaacttaaactcaccaaacatggtagaccatggctacttttagctgccccttccctctcccatttccttcatagcacacaggttgactatggagacagcctaatagtgtaaaggaacttgcacactgaattaatggggttatatggaaggtgagttgttcatatggccctcctaaaccatcctaaggccttaagtaagtgaatgtgggtggatggggggcgtggtgcatgtgtgtgggttagtagagggggtggtgttggtgaaggtggatgggttgttggttttaaggattagagctctgcaagtggaacctccaacattctccaaaggattggtatgtaggtcactagtgttcattgatgccctttcacaagtgagtgcacaccatctttattcttcacctggtaagttggatacttcaatgaagaaagaggttgaaaagaactaaggagtatagtggggacttggtccaatnnnnnnnnnnnnnnnnnnnnnnnnnnnnnnnnnnnnnnnnnnnnnnnnnnnnnnnnnnnnnnnnnnnnnnnnnnnnnnnnnnnnnnnnnnnnnnnnnnnnnnnnnnnnnnnnnnnnnnnnnnnnnnagatacagatacagatacagatacagatacagatacagatacagatacagatacagatacagatacagatacagataatatatagagttcccattctaacacttaactctctggcaggagaaaaccacagctggctttcttgtttggcaactagaaaactcctgtttctctcttttgtgttacagtttcatgctctatcttataatttagtaaaagcaaatatagtgcaccaggcatggtgactcatgcctgcaatccaaagatttttaaggctgaggcaggagaacctgccacaagtttgaggctattctaatcttggctatggagtcacaaaaaaaccgcatgtacacaaatattatgttatgacatagatttagtaaaagggaaaaatataaaggaatgggtattaatgcaaatggtttggtagatgttaaaatatacgttcactaacaatagctcagggaagaagctaagcaagtgtatctttgagcctacaaaaggctaccatgagggttggcttttctgctgatgctctgaatcaatttctgtaacactgctgagctctgtggttctcaggttgataaaacctttgcaaagtgaactctgctgaagagctacaatgcaaaatactgtatcaagggaaacgtaagggatacattagtgagaactgtacctcagatgcacagatctctcagctcctgggttcttagggaaaagtccagtgaaggacacaaatagaagagggcctggtgattaagtgaagactttcctggtttccacgcccctcatttcccccacattgttagggaataaaatagagcaagcaccacatttactgtgctggggatggggagatggctgagttggtaaagtgcttgcttcccaagtggtcaagtgctgctgaatttggaccactccatatttaaacctggagctggggtgtggtctgaaacccagcagaataagcagaacccggggacacatggccagccagcctagtggagtcaaggccatctaagctcagtgggagattctgcctcaaaaaataggtgaagagtgtttgaggaagacacattaaatcaacctttggtggctggagagatggctcagtggttaagagcactgactgctcttccagaagtcctgagttcaaatgccagcaaccacatggtggctcacaaccatctgtaatgggatctgatgccctcttctggtgtgtctgaagacagctacactgtgcttatataaaataaataaataaatctttaaaaaaaatcaacctttgggctcaagtgtgggcacatgtatacccacaccctcatgccacacaaacatttatattttgatcattctgagacaggagtttgctaagtatctctctctgttatgattcaatgtaactctggccggcttgctttttagtttttcagatcttgactggctttgaacttgctgtgtaactgaggctgatcttcaactcctgatcttctagctccacttcctacatgctgagattacagatgagagccacatacatgcctcattcaagccatgattttgatatgtaactcagcaacactaaatatgttcacaatgtagtccaactctcaccatcattcactacagagacttttctcagtcacgtaaaatatcttgtctgtttatgccacagggtaaaacagtagctccttgatccatttcttcatttctgcccttttatttgggggtagtttttgttgttgttgctgttagttgatttggctgttaggacatttgctttcccctaatattttctttttggctggagccatccagtctacactactgtatttcacagctccctttttacctccctgtgtgttgaaggtggaacccagggcctttgagctcactaaacacaagcttaccaatgagctacacccctggccccttgagatgactattttaaagttttatttgaggcaggttctctctatgtagcccaatctggctttaagcttaccattgtcttggcctctgcctcctgagtgttgtatatcaaaattagaaaagaaattgctatttcagttcctagacaagtcctacaaaattaaaacattattatttaaaaagaataataactcaaaatgctctctctctttctctctctctctctctctctctctctctctctctctctctctagtttttgagagtgtcccactatgtagtagcaaggctggactgaacttacagagatctgtctgcttctgcgtccagagtgctgggatgagagttgagcccctggcacacaagaaagtattttacagagtctgctctagcggtgaactgggaaagggaggtttccgtgtggtggcggcactgtctatgttctcagcactcaagggtggaggcgtgaggagctgctttggatctgacgttcacgtcctaactgcctgttcttttgaccgcagtcatcgccaagaagagggcgtatgtggtaacatctgagcttcttctcttacagatgcttgacttccctgctgctgactcgacatctgacactgacgaagttcctgatattattccgttggaagcggatgattgaacccaatgaccacacactcacagccctgtcctcttaaggcaaaagaccacccaactaacacaaggaaagacactattttattgaaaatgtaatatatatcttttttttttaaatggttgcctctgttttattcctgtgtctttggtgaacattcatctactatttggctgcttgatcttagttgtaaatgatgtgaactttcgtaagagatcttgttatgcatcctgtgtcattttatagaattctttaatgtttaattgctgaaatgcctttataataatattgggctgtagacctgtgagttggcttaatgggtaaaagtgcttcctgcccagcctgatggtctgagtttgactctttcaaactgtgagaccccgacttagagcatttctccctgaaaggtaaagcccctaaaacattcccccaagcttgttttccccatctctggggatacagccagaaagaagctctttgttctttatagctagcaaaaagccttttttgtttctgtgcctttcaaccatagatgtgataattgtaggaagacctagccaggcacttgcttggctccctgtgccaaggacagggagatagacgctggagaggagctacagctcacccccccccccaccgctcgccagagaggagctgcagccaactctcctcccaactcctcccaactcttctcccaactcctcccaattcctcacttttccttaaaaagccccctactgctaccactcagggtcgaactcccctgccctgcacagcgaaaggagttcatcctcagctagctgataataaagcctcttgcagttagcatcaggtgtggttttctctggagtcattggggtgccggccagctcatcctgggacttgagcagaggcccagcttcgggggtcttacagaacccacatgatggaattactttctcaaactgatctctaaacacacacacacacacacacacacacacacacacacacaaatatgtaataaaaatatagaagttgggtagtataaaattggaccagagagtctttttttttttaactgaacatggctattttctgttttttaggacattcttttgttttttgaaacaggatttccttgtgtggccctgggtgtcctggaactcactacttagaacaggctgtacttgaactcagaaatctcatgtatctcaggctggcctcaaacttactgtataattacatatatgagccaatgcacccaacctttacttttgttttaaaagacagtgtttactacgtagcccttactagattttcagactcatttgtagatcaggctagccttggactcacagatatctgcctggctctgcctccccagtgctagattaaaggtataggccatgatgtctggctcaaactcagctttggagaaaaggtcttactatgtagtccaggttggcctaaaactcactgtgtgaaacagattagttttgaatttgagaactcagcagttagctgaagatgatctttaatatctgatcctcttgtgagcttccatgtgctgcagtttcaggggtcaagccagtttgggaaacagaaaggtaccacctcaaaaccaccccccctaaacaaccaaccaaccaaccaaccaaataaccaatcaaccatccaatcaaacaaccaaacaaccaaacaactaaacaaccaactgtctgttcattcaaccatccaaccaaacatccatccaactaaccaaccgaccaaccaaccaaccaaccaaccaaccacccttcca

SEQ ID NO: 42 - DNA, 1677 bp, Mus musculus
  misc_feature (1)...(1677): n = A,T,C or G
tgtggtgatctggaccgtgcggacttgctcgtccctcagctctcctgttaggcgtctcttttctccaggaggaaaaaatggcagcagcagtagtggatccgcaacagagcgtggtgatgagagtggccaacctgcccttggtgagctctacctacgaccttgtgtcctccgcttatgtcagtacaaaggatcagtacccgtatttgagatccgtgtgtgagatggccgagaagggcgtgaagaccgtgacctctgcggccatgacaagtgccctgcccatcatccagaagctggagccacaaattgcggttgccaatacctatgcctgcaaggggctagacaggatggaggaaagactgcctattctgaaccagccaacgtccgagattgttgccagtgccagaggtgccgtaactggggcgaaggatgtggtgacgactaccatggctggagccaaggattctgtagccagcacagtctcaggggtggtggataagaccaaaggagcagtgactggcagcgtggaaaggaccaagtctgtggtcaatggcagcatcaatacagttttggggatggtgcagttcatgaacagtggagtagataatgccatcaccaagtcggagatgctggtagaccagtacttccctctcactcaggaggagctggnnatggaagcaaaaaggtggaaggatttgatatggttcagaagccgagcaactatgaacggctggagtccctgtctaccaagctctgctctcgggcttatcaccaggctctcagcagggttaaagaggccaaacaaaagagccaggagaccatttctcagctccactccactgtccacctgattgaattcgccaggaagaatatgcacagtgccaaccagaaaattcagggtgctcaggataagctctatgtctcgtgggtggagtggaagagaagcatcggctacgacgacaccgatgagtcccactgtgttgagcacatcgagtcacgtactctggctatcgcccgcaacctgacccagcagctccagactacatgccagactgtcctggtcaacgcccaagggttaccacagaacattcaagatcaggccaaacacttgggggtgatggcaggcgacatctactccgtattccgcaatgctgcctcctttaaggaagtgtccgatggcgtcctcacatctagcaaggggcagctgcagaaaatgaaggaatccttagatgaagttatggattactttgttaacaacacgcctctcaactggctggtaggtcccttttatcctcagtctaccgaggtgaacaaggccagcctgaaggtccagcagtctgaggtcaaagctcagtaaacccctccttgtcaccagagcatgatgttgctggccagatgaccccttttgctgtattgaaattaacttggtagatggctttagcttagaaaagcagcttcttagaaccaagggcctcattatggtcactcacagctcagttatggtcttgccccagctggccctggcacaggagttctcttacctggctggtgagtggcctgtgttagtcttgtgaggacctggaggaacctaaaagctcagatgcacttacagtcttgtctgtggcctttgtattgttattggctgtaaacgtctgtctggaccgaataaagattcattca

SEQ ID NO: 43 - protein, 277 aa, Mus musculus
  VARIANT (1)...(277): Xaa = Any Amino Acid
SGPCGLARPSALLLGVSFLQEEKMAAAVVDPQQSVVMRVANLPLVSSTYDLVSSAYVSTKDQYPYLRSVCEMAEKGVKTVTSAAMTSALPIIQKLEPQIAVANTYACKGLDRMEERLPILNQPTSEIVASRAVTGAKDVVTTTMAGAKDSVASTVSGVVDKTKGAVTGSVERTKSVVNGSINTVLGMVQFMNSGVDNAITKSEMLVDQYFPLTQEELXMEAKRWKDLIWFRSRATMNGWSPCLPSSALGLITRLSAGLKRPNKRARRPFLSSTPLST

SEQ ID NO: 44 - DNA, 53623 bp, Homo sapiens
ctaggcaaaaggatcccttgagggcaggagttcaagaccagcctaaactacatagtgagactccatctctacaaaaaatgaaaaattggccaggcgtggtggcttgcctctgtagtcccagatgctcaggcggctgaggcaggagaatcacttgagcccagtaggtcaaggctccagtgagccatggtggcaccactgcacttcagcctggatgacaaggttagactgtctttcaaataaataaaagaaaaaagccaggcgaggtggctcacactgtaatcccagcactttgggaggccgaggcgggcggatcacgaggtcaggagatcgagaccacggtgaaaccccgtctctactaaaaatacaaaaaacaattagccgggcgcggtggtgggagcctgtagtcccagctactcgggaggctgaggcaggagaatggcgtgaacccgggaggtgaagcttgcagtgagccgagattgcgccactgcactccagcctgggcgacagagcgagactccatctcaaaaaaaaaaaaaaagaaaaaaactgttcttgggagcacttgagggtaacattgatcataacatcgtcttggagaataactgttaatgatttacctttagaatattccacacttggtaaatgacttaggcttacagtagagaaagaagaaaaagaaaaaaagaagccatcagtaaaacaaccatgttagaaaactgcacctgggtgcagtgtctcacgcctgtaatcccagcactttgggaggccaaggtgggaagatcacttgaggtcaggagtttgagaccagcctggccaacatgttgaaaccccgtctctactaaaaatacaaaaattagccaggtatggtggtgggtgcctgtaatcccagctactcaggaggctgaggcaggagaatcacttgaaccccggaggcagaggttgcagtgagctgagatcgcaacactgcactctagcctgggtcacaagaacgagactccatctcaaagaaagaaaaaaagaaaaaaggaaaattgctttgaggcaaacctcagtaatcacaatgttgtatcttaaaagtaataattaacaattgtgaaagcatatttctgtaggccttttgcaagatacacagagtaaaaatcgggcacataaaggttgggattataaaaggatgttcattcatttttcaagtttgtgtagtaacttgcctgacatttatgtcaactaaaaaaaaaagtaagatgactggctacagtggctcacgcctgtaatcccagcattttgggatgccaacaagagtggatcacctgaggtcaggaattcaaaaccagcctggccaacatggcaaaaccccatctctactaaaaatacaagagctagccgggcacggtggcacttgcctgtaatactcaggaggctgaggcaggagaatcgcttgaacccaggaggcggaggttgcagtaagccaagatcacaccactgcactccacactgggcaacaaagccagactccatctcaaaaaaaaagtcccagcacttttggaggccaaggcaggtggatcacctgaggttgggagttcaagagcagcctgaccaacatggaaaacccccctctctactaaatacacaaaattagctgggcgtggtggcgcatgcctgtaatcccagctactcgggaggctgaggcaggagaatcgcttgaacacagggcgctgaggttgcagagagctgagatcacaccattgcattccagcctgggcaacaagagagcaaaactccatctcaaaaaaacaaacaaattagtcaagtgtggtggtgtgcgcctgtggtcccagctacttgagaggctgaggtgggaggatgaacccaggaagtcaagtctgcaatgagccgcgatcgtgccattgcactttggcctggacaacagagagagatcctgctcaaaaaagaagaggaggaagagagaagaagaagaggaagaggaaggagaaggagaaagaaaaggctttcaatgtgtcataattttcttttcttttttttttgagacagagtcttgctctgttgcccaggctggagtgcagtggagcgatctcggctcactgcaagctcctcctccagggttcacgccattctcctgtctcagcctctggagtagctgggactataggcgccaccaccacgcccagctaattttttatattatttgtagagatggggtttcaccatgttagccaggatcgtctccatctcctgactttgtcatccgcccgccttggcctcccagagtgctgggattacaggcgtgagccactgcacccggcccaatgtgtcataattttctggcatcaatgagaattggtacttttcccagtgatttctcctatgattccctcagcctgttctctaaatctagccattactgaaggttttctcagaacctcctttcttttctctctggaccctctctcttgatcataagccatctcacacaactcctaactcctacttccaaggcaatgactcctttttttttttcgggggggtgggggggtggacagagtttcactctttttgtccaggctggagagcaatggtgtgatctcggctcaccgcaacctctgcctcccgggttcaagtgattcttctgcctcagcctcccgagtagctgggattacaggcatgtgccaccatgcccaggtaatttagtatttttagtagagacggggtttctccatgttggattttggtcaggctggtctcgaactcctgactgcaggtgatccgcccacctcggcctcccaaagtgctgggattacaggcatgagccaccgcgcctggctgtcaatgactcctaaatcaaccttcaccaccctgagctatctgtgcacagagggacaatgtgtgctggtgtctaaggatgacacttagaccacagaccaagaacataggtaacacctgtgcattgtaataaagccctagatggtaggttggcaaaccttgtctttaaagggccagatagcaaatactttcaattctgtggaccatggggtttccctgtcctgattattcagcttggtcattgtaacatgaaagcaggcagagacaatatgaaatcaaagaggcatagctgtatccccataggtttttatttgcaaaagcaggtggcaggcaggagctggttgtggtttgctaagccctttgatcattgattttcaaacaagaagccccttcagaatccacttggagagaaagaaagaaatgagaggaaggaaagaactcagttcttccctcccacttattccaaccagagtaatttagctttaatctatttgtttacaatggctgactaacatttcatttgtacaaagggtttcagggccaaaaagtttgaaagctgcttgtctacctgttctctgagtttcattctaggtatgaatctgtcaccttgctcaatctagtcactgtctgctctgagccacattctctgccaaagtagtaaccgaactgcccacttctgatcacattacttatcaaccttcagtgactccctatgaggcattcccaagcttcccccttaatctaacataccttctccatcagccaccctgggctctgtgcaggagactccccaaaggtgcttttccttccttctgtttctgcacattctccccttgcctgagaggctctctgcctcccatcccatgctctttgtaatcatctatttcaccacccagaagcagcttctcttctatgttcctgctgtactttgttcatggggcttttatgtgtgcatgttctagctcccctgctggattaattatccttattaagggcaggaattacattttatagatctctgtacccagcataggcattagcaagataccatatgcacaacagctatttgagctctttatttaggttgaaatggggcatgccctggcagagtgcatcctacctcgccaaatatttcttcacctgtctgtcatcttctcactcccacctcctctcaccatctgtaggaggctatcattacaatgcacaggtgttacctaagttcttagattatagaacacctggttgatgcctgggagctaaaagaacaagatccaggtcaactagtagtgaacaagacatgagaaagaggcttgagagagagacaagtccacaagcctttgatgacaggcagacataagctctctggccctagtgggaaacgtctaggctgagacaattgccagagtttggaaatacattgttttacagtagaaagagagcagtaggtcttggaaaagaacatacttaatatttacagctgtttaatattaggtggatttctaatcctctgagcctcatctgtaaattaggaataaaacatcttctgtaaacctctgagggttagcaataatgttcctcatacgtagcatacacagcaggctcaataagtggaattacaggttgtgaagaaagggagtaaagaggcaaatgagatgtaaaaacaagaagaaggaaaggttgttttaaagataaatgtctttatttttctttatagtcttgctatgttgcccaggctggacttgaactcctggcctcaagtgatcatcccactttggcatcccaaagtgttaggattacagacatgagttaccatggctgatcaagaaaaatgtcatgaactactcttttttttttttccacgtatgaccagtaaatcacattgggctccttttaaccatggctgaagtgagactgtaatgatgtggcatgtgcataggaatcacttggacatcttgtgaaatggcagattctcattctataggtctgggtgggcctgatactgtgcatttatgatgtaattcggctggtctgtgaaccacacactgtgagtagaaaagtggttgtccatgtaggctgttgagataaaaacagatgagtcagctgggatgcctggtctgcttccctcacatgcctaaaagctaccatgctttcaagaagaaggaggtcagctgagggaggttaaactgttagggagaacagcaccacgtggaatgataagggccaaaggatggcgcaattacaagtgaaaaagagaacttgtgttctttgggccttatctacagaccatattcggacacaagaaactggattgaaattcttctcagggaacgttaatctctttggaccttggttgaaatgctggaataattaaaaaaaaaaaaaagattaagcaagataccattagaagcttttgcaacaagacacagtttcatcagcggtaaaatgagaataataatagcaatacctaaagtaaatgtagcaaattagtcattgcagaatctaggtggtgggagtgtgggtgttcactgaacaattctttctttcttttcttttctttctttcttttttttttttgagatggagtcttgctctgtctaacaggctggagtgcagtggtgtgatctcagctcactgcagcctccacctctggggctcaagtgattctccttcctcagcctcccgagtagctgggattacaggtgcctgccaccacacccagctaatttttgtagttttggtcgagacggggtttctccatgttggccaggctggtttcaaactcctgacctcaagtaatccgcccaccttggcctcccaaagtgctgggattagaggcgtaaaccactgcacctggccccactgaacaattctttcaactttcctgtatgtttgaaaaatcttcagagtgaaatgttgaaaaaatatgcctccaaataaggttgaaattagatacattagagtaaaatagaggaatgtaaataacattagcccagtctgaacactagttactctctaagggacattcttttagcaattttagaaattattttggaggcagaaatacacataaaatgtttctgagggctgggcgcggtggctcacgcctgtaatcccagcactttgggaggccgaggcgggcagatcacctgaggtcaggagttcaagaccagcctggccaacatggtgaaaccctgtctgtactaaaaatacaaaaattagccaggtgtggtggcaggcgcctgtaatcccagctactgaggaggctgaggcaggagaatcacttgaacccgggaggcagaagttgcagtgagccgagatcgcaccactgcactccagcctgggcaacagagagagacaacataccaaaaaaaaaaaataattatatatatatatatatatatatatatttctgaaaggatacataagaaaaagttagcattggctgtgtgcggtggctcgcgcctgtaatcccagcaatttgggaggccgaggcaggtggattgcctgagctcaggagtttgcaaccagcctaggcaacacagtgaaaccccgtctctactaaaatacaaaaaaaaatagccaggtgtggtggcatgcgcctgtagtcccagctactcaggaggctgaggcaggagaattgcttgaacccggggggcagaggttgcagtgagccgagatatcgccactgcactccagcctgggcaacagacagagactctgtctcaaaaaaaaaaacaaaaagagaaaagaaaagaaaagaaaagaaaggatagcattgattgcctccagcaagggggaactttgtgagtagaagacagaatggaagggaggcttttcactgtattatcttttgtaggttttgcatatcagatcatgtgtaagtattacctattcaaaaataaataaaattatggccaggtatggtggctcacacctgtaatcccagcactttgggaggccaaggcaggcagatcacttgaggtcatgagttcgagaccagcctggccaacatggtgaaacctcatctctactaaaaatagaaaaattagccaggtgtggtggcaagcacctgtaatcccagctactcagaaggctgaggcaggagaattgcttgaacctgggaggcagaggttgcagtgagccaagattacaccactgcactccagcctgggagacagagcaagagtccatctcaaaataaataaataaataaaatcaaaataaaaacgtagagctctcaaagtctaatagtttgcctctcttccaagcagtttaatcattaagttgcagaatttgctgtgcatggcccttggttatcaaagaggtcaatgtccagcttcattgaagtggtacataatgaggttgaattgacctatgcacagccagctggctggatctatttgaggacatttttagctatgacccaaaggactgtattttccattcctgcgttccagacagggctgagctcaggaagtatctaggttgggtagccagaggcagactggaggtctcataggtgtgtgttaaaggatgtagacagagatagggagtgaagagctacacatcacgactgggtcatagtcctgtgtaaggaatattttacctgttccatacttaaagtttacaaagtgtttacagacattaccttctctgagtcatccaatttctctggatggcaagtgggcaaggattttgtcctgtcttactaaaggggaaaactgagtgtggtgaccatgagatacaccgctcagatatccttctaactgcggggagcaattgactgagggcccctgctgccttctgaattccatcaccacatgtgagctgaggccacacacccatgggctactctcagccagtgacagagtgtggcagggatattaaggcagggtgatactttggagatatgggactcctctgatgactggggtgctcccacagcctcactgaaatttctttagagtacactataatgtaacgtgcttctacccacccttctctcctttcctctcttcttcacttgggttgaggcctgcatcgcagtctgatgggcctgccagcctctcctggctccttcccattttctcttagaggcatttcctacaagttgaatactattttgtcatcaaacatagatctgggtgattgtaggtatgcttgtaatcactgcaatatattgtctttgttttcagaaattcatttcaacttgagtcattagataggcaaatctttttttcctactagcttatcattttgaatactttattaaaaatattttcatatacatgtgattctgtgtggcatattacataggcatagaaataacaattggctaggcacactggctcacacctgtaattccagcactttgggaggccgaggcaggtggatcatttgaggccaggagttcaagaccagcctggtcaacatggtgaaactctgtctgtactaaaaatacaaaacattagctgggtatgatggtgcatgcctgtactcccagatactcgggagtctgaggcagaagaatcgcttgaacctgggaggtagatgttgtagtgagctgagatcgtaccactgcactccagcctgggtgacagagtgagatcctgtctgccccgcaaaaaaaaggaaaaagagagaaagacagcttctcactgtgttgcctaggctgaagtgagtggctatttacaggtgtgatcatagtgcatgacagcactgtgatctcctatgatcactcttaaactcctgggctcaagtgatctgcctgcctcagcctcatgagtagctgggacaacaggcacatgccaccatgcctggctatttattattattattgagacggagtctcactctgttgcccatgccagagtgcagtggggcaatctcagcttattgcaatctctgcctcccaggttcgtgcaattttcctgcctcagcctcccaagccctgggattacaggtgtgcaccactacgcccagctggtttttgttgttgtttttttgagacggagtctcactgtcgcccaggctggagagcagtcctggctcactgcaaactctgtctccccgtctcaagcaattctcctgcctcagcctccccagtagctgggattataggcgtgcgccaccacgcccagctaattttgtatatttagtagagacggggtttcaccatgttagctaggctgatctcaaactcctgacctcaggtaatctaactgcctcagtctcccaaagtgctgggattacaggtgtgagccatcatgccgggccctagtttttgtatttttagtagagacagggttttaccgtgttggccaggcaggtctcacactcctgacctcaagtgacccattcacctcagactcccaaagtgctgggattacaggtgtgagccaccatgcctggcccatgcctggctatttagtgtttatgaagatttcaaggtatttttgttgttgttgttctttgtaaaataatttgtcctcctccattgtccactccacttttcttctttctttttttgtcttgagacagtcttgctctgtcacctaggccacagtgcagttgcctgatcccggctcactgcaacccggctcaagcgatcttcccacctcagcctctttagtagctgggactacaggctacaggcacacaccaccgtacctggctaattattgtatttttttatacagatgaggtttcactatgttgcccaggctggtctggaacttctgggctcaagaatcctcatgcctcagcctcccaaagtgctgagattatgggcatgagccagccacttcacttttccttgtctttattaatgctctggagtttgtaattatatggccaacctaggggttctgggaacttactcaggccaggagaattaccatttgcagattaccctgtggcttggcaaggaacgtcataaacccacacatgctggtcaaaggaggagatggtttaagtcttttgaaatggtgtcatcaggagaatggagacattgtcagctgtcagcacgacaccatttgacatagggtgggaggaggcagagcaatcagcaggctcttacttctagactgttcttggagttggctggcagcaacctgattggcaatagttgtttgcctgagttcccagaattccattttgagttcattctggttgaacagaacgttttgtcagaacaattatggctttcttcctgaagtgtgcttggccggaaaagaaagcaggagacctcaagggctaataatctagcagtggctgacactgaaatgatgcatggaagaaaggctaccaagcaagggaggtggagagcagtttgaagcaactggggtaagctgaggtgtgtgaaagcagcccttctgcttgtgcgtccccacagcgacagcaagtgtggctagtgacgaggaggagtgtgccaaagccagagggccacaggaaagggaaggcttggccatcagtacatgacttggtgaagacatgaagaatgtcttcaaggaacttgtctatgtagcagactggtgatgaggtggtcttgttgagtccatgtagtaaggaatcagtaccttacacacatgcacacacacaccatgagagagagagagagagaaagagagagaacagtattgccttgcctgtttacaacagagatctcagttactaactatatattctgggctcttcaagagcaggggtcatgaattttttttttttttttttgagacagtgtcttgctctgtcacccaggctagagtgcagtggtgtgatctcggttcactgcgacctccacctcctgggttcaagagattctcctgcctcagcctccctagtagctgggattacaggtgtgcgccaccacgcccagctaatttttgtatttgtttagtagagatggggtttcaccatgttggccaggctggtcttgaactcctgacctcatgatccacctgccttggcctcccaaggtgctgggattaccggcatgagccactgcacccagccgagggatcattaattttacctctgttgattccctaatgttactcaatacagggctgcacacttgccagggcctccttgaatacagtatattattcttttgggcgtcatggaaaacagtttcttgacatcctgccaatgtgcactatgctaaatggtttccatgcccaaaagcacgaaagttccccacctcatcttcaacattctttctccacacatttttagggctctacctaacagttcagttctaagcacatctttcactaagcatgaggtttgttagtgttgacagtcaataccagattaaacctctgtgtcccttagccatttgcagagaggcctgggaaatcaaccataaacaaaaggcacatgggggtgagaagataggtaaggacccacagggaaactgctcattctgatggtgaagacagtcctgacagacccgagggaaaaggttacaaggaaaggaagcccaagggcttctactttgtcccagattggtatctgcatgtgtgatttttttggttttgttttgttttgtttgtttttttgagacggagtcctgctctgttacccaggctggagtgcaatggcgagatctcagctcactgcaaccccctgccttccgggttcaagcgattctcctgcctcagcctcccaagtagctgggattacaggcacaaaccaccacacttggctaatttttgtatttttagtagagatggggtttcaccatgttggccaggctggtctcaaactcctgacctcgtgatctgcccgcttcggccacccaaagtgctgggattacaggcgtgagccacggcgcccagcccctcctttttttttttttttttttttgagtcagagtcttgctctgtcacccaggctggagtgcagtggtgcggtctcgtctcactgcaacctctgcctcctgggtttgagcgattctcctgcctcagcctcccgagtagctaggattaaaggcatgtgccaccacacacggctaatttttgtatttttagtagagacagtgtttcactatgttggccaggctggtctggaactcctgactttgtggtcctcccaccttggcctcccaaagtgctgggattacaggcgtgagccactgtgcctgcatgattttctacccattcagaggactggtaaggagctgccaaatcttttcagggaccctcacagctgcttggagattgtgaatcagggattctcatgaacaggcagaactatcacaaggagtccggcatgaagtgaatgatggtagtatgtggtccactgctaagagaggtggcatgctgcttttgtttttaaactttctctgtgttatactttctgcttacaaaaggagaaatataggctcactaaacatgttcaaacattataagaaatatataatatgaaaagtgtggaagtttttttatgatccctgcccatctatcccagatcaccattgccaattatttggtatatctctcgagatggcatgctttctgattttgaagcagattgtgtctttttttttttttttttgagacaggatacagctctgacactcaggagggagtgcagtggtgcagtcttggttcattgcagcctccacctctcaggctcaagccattctgtcacctcaacctcctgggtagctgggataacgggtgcatgccaccacacccagttaatttttgtatattttgtagagccagagttttgacacgttgcccaggctggtctccaaatcctgagctcaagtcatccgcctgcctcggcttcccaaagtgctgggattatgagccactgtgcccagccaggttgtgacttaaaatgtgcaatatcttcgacttccaaaaattgcaccacaaacagattccttggcagtttggagtgtatgtctcaatctgtgtgtatgggtgggtacgagagaaagagagagagaaagaataaatgtaacaaattcaccactattctttttctgggaaatagtcttcagttcttgatttttatctttcacaggaaattgtgttattaattaggtagccaaatcatttatttaacatgaatatattaaaatttagttcagtccgagactaccccaatcagaatctcccccaccctccattaaataaataagaactggttatgagcctcatatgctcacctggtggagagctggcaagaacatggtgataggccaggcacaggggctcacgcatgtaatcccaacactttgggaggatggggtgggaagatcgcctgagcccaggagtttgagactagcctgggcaacataccaaggccccgtctctattaaaaaaaaaaaaaagaggaagaagaacatggtggtctaggtgtggtttctgcccaagcatccctgaagttcttatgagcatgtgaagggaaggggccatattttttatgcctagcaaggatattctgtagtggtggcttgaggagaaacccttttgtaaacaattactgggaaacctgcaagttaaacttcgactccctcatgcaagtaaaaccatgtgcgttttgggcatacccactcagtgcaccagccactaagcagttccagagagtagtccttgtgtttcagggatacatgttgcttggagaaaggagatagagacctagattctttgtgtgtgtgtgtgtgtgtgtgtgtgtgtgtgtttgtgtttttttttttttcttttgtgacacagtctcactctctcacccagactggagtgcagtggcctgatctcagttcactgcaacctccgcctctcaggctcaagggattctcccacctcagcctcccgagtagctgggattacaagtgcatgccactactgcccaggtaattttttgtattttagtagagacggggtttcaccatgttggtcaggccggtctcgaactcctgacctcaaatgatccacctgcctcggcctcccaaagtgctgggattataggtgtgagccaccgcatccagccccctagattcttactcattctgtaacagtgtggctgctttgctgagtttatgctcccacatccacacttttacagaacatttgagagaatatgttttggctcatgaattaacttgcagtttgagactccctaactgacaatctccaagctgctgtgggagtccttgattcacatacatgtgtaaaattttgcttggattttctaggacagtgagctgcatccaattacaggctttctgtaaccaagttctaggtagaatttagcactcatcagtgacttctcttgttagttgtttagttctatgagcattaagtagaatctgatacaaatatccatctaaaaaccacactttgggctaggcacggtggctcatgcatagcactttgggaggccaaggcgggtggattacctgaggtcaggagttcaagaccaggctggccaacatggtgaaatcccgtctctactaaaaatacaaaaattggccaggcatggtggtacacacctgtaataccagctacttgggagagtgaggcaggagaaccgcttgaatctgggaggcagaggttgcagtgaacccacatctcaccactgcactccagcctgagccacagaccaagactccatctcaaaaaaaaaaaaaaaaaaaaaattggtcaagcacagtggctcacgcctataatcccagcactttgggaggccgaggcaggcagatcacctgaggtcaggaattcgagaccagcctggccaacatggcaaaaccccgaatctaccaaaattacaaaaattagccgggcaccgtggcaggtgcctgtagtcccagctactcgggaggcaggagaatcgcttgaacccaagaggtggaggttgcagtgagccgagatcacaccactgcactccagcctgggtgatggagtgaaacttgtctcaaaacaaaaacaaaaacaaaaacaaaaacaaaaacaaaaacaaaattagccagtcatggtggtaggcgcctgtgatcccagctactcaggaggctgaggcaggagaatcacttgaacccaggaggtggagattgcggtgagccgacatcatgccaccgcactccagcctgggtgacagagcaagactctgtcttaaaaaaaaaaaaaaaaaatcaagatgcattatatgtatgacattaatttaattcagctcttggttaactagagacgtttggatttagccattctacatttccagggttacatctgtagacctataaagccagcctgaggtgcgttaatatagggagtggaggggtggcagagtgtttctgagttcatattccatttctgttagttatatctaatcagaatctgagtgatgaatgtcaacaagggcagattcatggctgatctgtattttagtttcagagcaatggactgtttcttcttctccgacagtagactagagtgatttcatttgctaaagcctaagcctgaacatttctggaagcttacgaaagtgatgtttcaggctgagaacggtggctcacacctgtaatcccagcactttaggaggccgaggcaggcggatcatgaggtcaggagatcgagaccatcctggctaacacagagaaacaccgtctctactaaaaatacaaaaaattagccggtgtggtggcacacgcctgtagtcccagctactggtgaggctgaggcaggagaatcgtttgaatttggtaggtggaggttgcagtgagcagagatcgcaccattgcactctagcctgggcaacagagcaagactctgtctcaaaaaaaggaaaagaaaagaaaagaaaaaagtgatgtttcagctgggcacgatggctcatgcctgtaatcccagcactttgggaggagtgggggggcggaacacctgaggtaggagttcgagaccagcctggtcaacatggtgaaaccccgtctctattaaaaacacaaaaaattagccagggcctggtggcaggcacctgtaatcccagctacttgggatgctgaggcagaagaattgcttgaactcaggaggcagagcctgcagtgagccgagatcatgccactgcactccagcctgggcagcaaagtgaaactccatctcaaaaaaaaaaaaaaaagaaaagaaaagaaaaaaagaaaagtgttgttgctatggtagatgccattcttacagcataactttggatcacaaaccttttttattttttcattgcagtgctctaacttcaaagacagattgatttggttttgtttttgttttttgagatggagtcttgctctgtcacccaggctggagtgcagtggtgtgatctcggctcactgcaacctctgcttcccagcttcaagcgattctcctgcctcagcctcccgagtagctgggactacaggcatgagaccccatacctggctaatttttgtatttttagtagagacggggtttcaccacactggccatgctggtctcaaactcctgaccacaagtgatctgcctgtctcagcctcccaaagtgctgtgattacaggcctgagccaccagacccggccattgatttgttttttgtttcttcttttatttttctctgcctctttgcatgcctcaatcagatgattttttgtgtgttttagagatctgttaaaattacatcaggctgacttgacatcaatatagccttacattttagaagataaattctgaattcttgatggatttcataacatttgtaagtagtgtggtaatcacatgtttgctaaactttggaaatcatgatgtaaccctctgtcttcacatagtgaagccttttggatttttctttaatgaaatattaagttgaatgtggaactttgagtaattggcccagataaaagaaatgacttgtccagggatgacaaaaattaatcctgaccttgagggattcactctaccaactcagagaatgagatacactggcactgattggtaaagtcatagtacccctaactccctcagttgtttttgagtcattaagaactactaatattagccctgtcagaagccaacctaagaaaagaatatttgccaaatgcaattccatagctggaatgttgaggtatagacagtgaatataatggttaagttattcctgaaactttagctcagttctctttccaaaattaacgtactaatatatataaaaaatcactccttttctcctactcctctttcctactggctctcaaaaaacaggactcagaaatgaaaggatcaggcatcttcacaaaaatgaaggaagcctagcttgaactggacatggcttctcaaacctgcacttgtagtcctaactacatgggaggctgaggcaggaggacggcttgagcccaagagtttgaggccagcctggacaacacagtgaaactttgcctcttaaaaaaaaaaaaatactgagccaaaataaaaggtttcagggtttttgttttttgttttttgtttttttcccaaacgtggctagcaacagcacttgcctccaacaaaactgcagaggcagctattccagagtgcaatggtgcgatctggctcactgcaacctccgcttcctgggttcaagcaaacctcctgcctcagcctcctgaatagctgggattacaggcatatgccaccacacctggctaatttttgtatttttagtagagacggggtttctccatgttggtcaggctgatcttgaactcctgacctcaggtggtctgcctgcctcagcctctcaaagtgctgggattacaggtgtgagctaccgtgcctggcccaccaggtatcagcgttttcaagcacaatttggtgggtagggggaagccagtgatctggaggtgctgattggtcaggtcagagatgaaatcatagggtcaaagctgtattcttgcactaagtcagttcctgggtgggagggctataagatcagatgagctagtttattgatctaggttgtgccagctgatccatcaagtgaaggatccgcaaaataccttaagcactggttttaggttttacaataaacctaaaatttaggtgatgttattcccaggagcaatttggagagggtcagagtcgtgtagcctccagtttcatgactactaaactataatttttttttttttttttttttgagacagagtctcgctctgttgcccaggctggagttcagtggcacaatctcggctcaatgcaacctccgcctctcgggttcaaccaattctctgccttagtctcctgagtagctgggatcacaggtacccactaccatgcccagctgatttttgtatttttagtacagatggggtttcaccatcttggccaggctggtcttgaactcctgacctcatgatccacctacctcggcctcccaaagtgctgggattacaagcatgagccactgcacccggccctaaaccataatttctaatcttgcagctaatttgacagtcctacaaaggcagtctagtccctaggcaagaagggggtttgttttgggaaaggggtgttatcatctttgctttaaactctaaactatagccgggcacagtagctcacgcctgtaatcccagcactttggcatgccaaggtgggtggatgacctgaggtcaggagtttgcgaccagcctgaccaacatggagaaaccccgtctctactaaaaatacaaaattagcagggcgtggtggcacatgtctgtaatcccagctactccagaggctgaggcaggagaatcgcttgaactgaggaggtggaggctgcagtgagccaagattgcaccactgcactccagcctgggcaacaagagcaaaacaacgtatcaaaaaacaaaaaaacgaaaacaaaaaaaacaaaacctctaaactataaactaagttcctcctaaagttagttcagcctacatccaggagtgaacaaggacagcttggaggcgagaagcaagatgatgttggttaggtcagatctctttcactgtctcagttacaattttgcaatggctgcttcaatagtgtgtgggggaagaagtgtgtgtgtgtgtctgtctgtgttgagggagttgttcttttttattttctgagaggaaatctcgttctgttgcccaggctggagtgcaatgtcacaatcttggcccactgcaacctctgccttccaggctcaagcgattctcctgtcttagcctcccgagtagttgggattacaggcgtgtgccaccatgcccggctaattttttgtatttttagtagtgacaaggtttcaccatattggccaggctggtcctgaactcctgctaggattataggtgtgagccactgcgctcggcctgagggggatgttaactttacatagccttctctatctaccaagaacaaacaattcctttctggcccccttaagggaataatgctcagtgtttttttttttttttttttttttttttttttttttttgtctttctttctcattacctcattccctcttgctctttctttcaacattcattcaacaaacattcactggggaccttcagacatttatccctcagagacagcataatataactgaaaaaactttggcttcaaaggttgtagagaggatctttgatctaactctatacttacaaactggggaaacttgaacaggtaacttaatctctttcaggcagaggacagaataggaaaaacatgtccttcccacttcacatgagaaggtattttgtaaattgtaaaaaacaaaaaacaaaaaacaaaaaaaatgtataaaacagacatgtgccaccatgcctggctaatttttgtatttttagtagagatggggtttcaccatgttggccaggctggtcttgaactcctggcctcaagtgatccacccatgttggcctcccaaaatactgggattacaggtgtgagccaccgtgcccagccataaagggcaatttatgcaaaaatgatgaggtgaaatagacttattgtttagttgtatttttatatgcattgtggaagcaatgcagcatggaggaaaggccgtggagtcatgcaccccaggtcctggtttcaatctgccagctgtggtaccttaggcaaataactcgattgctgtaaccctctgtaaatgaagagtctgacttgaacgcagtgtttcttaatctgtggttcttggatcacctgcatcagaatgacctgggtggctcacacttgcaattccaacacttcgggaggccaaggtgggaggatcgcttgagcccacgagttcaagaccagccctgagcaaaagagtgagatactgtctctataaactaaactaattaatcatttaaaaataaaataaaagtttctggattgtgtcctagatcaggtgaataacaatctctggagatgaggccctagaatctgcatttttagcaagtgctcaggccattgtcatgcacacagaagcacacagagacccactgataagaccatcaacagattctcttcctgctcaaaaattctataattctcatgacccaaattgtagttagctctatttttctgtgatcaaagcaaaattaaaaggagacaggaaataacaaagatttagaaactactatttgcaggccaggcatggtggctcacaccggtaatcccagcactttgggaggctgaggtgggcagatcactgggtcaggaaatcgagaccatcctggccaacatggtgaaacctcgtctctactaaaaaaatacaaaaaattagccgagggtggtggcacgtgcctgtagtcccagctacttaggaggctgaggcacgagactcgcttgaacccgggaggtggaggtttgcagtaagccacgatcgcaccactgcactccagcctgggtgacagagcaagactccatctcaaaaaaaaaaaaaaaaagaaaagaaactactacttgccttgtactatgtttaggtttttatatacactgtcgtatttttctccacaatgatcttttgaggtaggtattattatcaccatagtatgcatggattcaaagttgggaatctgatttcaaagtcagtggtttttcaggagtctctctgaacctattctgattcagtggctgcctgaaaaaaaaagtcaatggtttttccattatacaatgctccactaagaaaccacaaaagagcttactgtaattgataagctccagtgcacaccttatttgtatacagtagattaggagttgtttcttcatttttgttgaatcatgagtttttcctattgtgaaccttaattgcttgatgtggtgatgacaatataaaaactataagtgttatgtcactccactttagcctgggtgacagagtaagaccctgtctcaaaaagacgaaacaaaacaaaacaaaaacccagaaaactaaaatcttcttcttaatttctctttgctttattcttcttgcctacttaaaatttattcctcctataatctgtgcgtttttgtaaggcagtttaaatcttttgtgtggtggagaatgaattggatataaacaaataataaaaagcaagctacaattatgaattcactaaacaaccacattcatgtaaagagaataaaaatacttgaaattgtgacagcccaggataatttcagtttatgagatctcaaacatacagctagctgcaaaatagagaagacaagtagtctagatgagaaatagatttgaaattgacaaggtctatcttttgaatccttttgcttgaattacctgtttcagaaagagaaggggccagggcaggctcaaagacttggtttagatggggagaaggaggttggtctctttggaaacaaagtcaaaacaaggtccatgtgaaaaaggcattgccttttcctcttcatggtatttggagaagaaacacaaaaagaaaagcagaggatcaagttcaggggtgattaagaatgctgagtaattgagtcatccaagaaattgttcttgctgctgaccagtttgcatggaagttgaactggtcaaaacagaaatcatctggccttctgattggtaacttgtaaccccattatcttggtctctgattcataagaaaagtagtttgatctaatttcaagctcaggtgaaaggaagaaatgaggccggccatggtggcttatgtctataatcccaccactttgggatgccaaggtgggtggatcatctgaggtcaggagtttgagaccagcctggccaacatggcgaaaccccaattctactaaaaatacaaaaattagccaggtgtggtggcatgcgcctgtaatcccagctactcgggaggctgagggagaatcacttgaacccgagaggtgaaggttgcagtgagccgagatcgcaccactgcactccagctgggtgacacagagagactctgtctcaaaaaaaaaaaaaaaaaaaaaaaagctgggtgcggtggctcacacctatagtcccagcactttgggaagctgaggtgggcagatcacaaggtcaggcgttcaagaccagcctggccaacatggtgaaaccccatctctactaaaaatacaaaaaatagccgggtatggtggcaagcgcctgtaatcccagctgctctggaggctgaggcaggagaattgcttgagcccgggtggtggaggttagagtgagccgagattgtgccattgcactccagccagggcaacggaacgagactccgtctcaaaataataaaaagaacgaaagaaaagaaaagaagaaatgaatataggaactttcctctgtgattggatagagctatcttgtgacaagagaatagcaaaagtcacctgtctgagataatgttttggaaaggacattataaagccatatacaatgtaagcaattgtttttgttgttgtttttgattaagacaacacaactgaagggaaccctagatatcatcaagtctaattccttcatcttatgatgtctatgtggacactgaagcctgtcaggttaagtgtatttgttgcccaagagcacacacttagcagaagtagcaatgtagactttagaattagacaaaccctatgcagggcccggctctgccatttactagtttatgatttagggctggggagcgcctcagagaggtgaaaagctgagctacacagagaaagtggagttttccagagggtcaggcaatacagacagagggagcagtatatctgaagaggagctatgacagggaggatgagcttaatgaagaaagggatgcaggtggctgtagctggagcacatggagctcttgggggagggacgagaaattatgggaagaaagggaggctgttgtcttgtctctggaagaggaaactccactgccagatttttttttcttgctatatcaatattactttgcatcagcaacatacccaaagaagcctgagttgctataatacaaactctagaaaaggtggcttttccagcagagtctcctatacttcttagtctaggaaggcagactggaaagggcctgggatattactggtcccttgaagtcccttccaataatcctgtgagctgagctctcttcagctcaatgcccaggaaggctttcttaggcaacagttctcggggtgtgttcaaacaaacaaacaaacaaacaaacaaaaaaccatgaataatagctaccatttctatgtgcctggcattattctgttgagtgaattgattcatttaatccccacaagtcttatgaagtaatcaccgttatttttctactcctcaacttttcaaaacttttttctttttttttctttttttttttttttttgagatggagtcttgcacctgttgcgcagggtggagtgcaatggtgcgatctcggctcaccacaacctctgcctcccgggttcaagcgattctcctgcctcagactccccagtagctgggacaataggcatgcgccatcacgcctggctaattttgtatttttattagagacggggtttctccacgttggtcaggctggtctcgaactcctgacctcaggtgatccgcctgccttggcctcccaaagtgctgggattacaggcgtgagtcaccggacccagccaactttttttttttcattaaaaaaatttttttaccagcctggccaatatggtgaaaccctgtctctactaaaagtacaaaaattagctgggcatggtggtgcgcacatatagtcccagctactcgggaggctgaggcagaagaatcacttgaacccaggaggcagaggttgcagtgagcagagatcaccccactgcactccagcctgggcgacagagtgagacccaatcttaaaaaaaaaaaaattgttttagccaggcacagtgactcacgcctgtaatccaacactttgggaggccgaggcaggtggatcacctgaggtcaggagttcgagaccagcctggccaacatggtgaaacgccgtctctactcaaaatgcaaaaattagccgggcgtggtggtgggcacctgtaatcccagctactcgggaggctgaggcaggagaatcgcttgaacccaggaggtggaggttgcagtgagctgagatcatgccactgcactccagcctgggcaacagagtgcgactccatctcaaaaaaaaaaaaattagccaggcatgatggcacatgactgtaatcccagctactcgggaggctgaggcaggagaattgcttgaacccgggaggcagaggttgcagtgagtcgagattgcgccattgcactccagcctgggcaacagagcaaaactgtccccccccaaaaaatttttttttttaataaagatagggtctcgttgtgttatgcaggctggtcttgaactcctagtctcaagcaatcctcctgcctcggcctcccaaaatgcggggattataggcatcggccaccattctcagctcacaactttttattggaagtgtaagatccatacaaaaacatatatgtcataagtgtacagcttgatgaattttcacaaaagagcatacacatgtatgtaactagcttccagaataagacataaaaagttaccagcaccaaaaggcccctagcagtcactagtcttcccacccccaactccctgcagaacaactaccatccttactttttacagcagagcttactttgtttttgtatggtatgaacctgtaggtaactgctttcatttcatttacattacattgcatatatgtggttagttatgggtctcttcattctctcttatcactgtataacaacctaaacttttcattttgaaacagttttctaaacccacagaaaagctgaaagaccagtacaatgaacactcatataactgttttttgttttgttttgtttttgaggccttcttattctgctgcccatgctggagtgcagtggcgccatcatggctcattgcagcctctacctcctgggatcaagtgatcctcctgcgtaagcctccttagtagctgggactataggcacacgccaacattcctggctaacttttgtattttttttgtagaaatggggtctccctatgttgcctgggttggtcttgaactcctgggctcaagcaaccctcctgcttcagcttcctaaagagctgggatatagttgtgagcaaccgcactcagccttataaaacctttacgtaaaacatgaagagctattattatctccactttacatatgaggaaactaagacaaaaagaaattaggtaactagcccaggtcatgcccctgggatctaattttgcctagcttgctgcttagtcataaaactatagccagatcatataacttatctgagactgtttctttactgttaagatgggagtaataaccccactccatcaagtttccaggctgttgtgaggctcaaatatgagcgacatgggaaagtgctttgtgaagagtaaagtggtggcacctatcgtcacaaatgcaggcttctgggccccacccctcatagatcttgactcagtaggtctgggggaggaggcataacgtttgacaaacatcttcggtgattctgatagtttccagaccaccatgagaaaacacatttgtaaaacagtagctttcaaactttagaaattataagaatcacttgaaggaattatcaaaacacagattgcagggcccacacacagaatttctgatttactaggtttggggtgaggcctgagaatttgcatttctaagttcccacgtgatgctaatgctattgacccaggacccccactttgagaaccactgctgcaaagcatttatataggtcagttatgagtactggttaacctgataatccacgataattttattaagagtgacttctaagaaataataagttggggccaggcaccgtggctcatgcctataatcccagccctttgggaggctgaggcaggattgcttgaggccaggagttcaagaccagcctgggcaacatagtgagaccacatctctaacacaaaataaataaaaaagaaagaaagaaagaaaagaacaaataaaaaataggaaatatttataaaaaaattattgggcactcacaagctgaaacagtttcaactatttattcaacaccttagtgaacacctgctcagtgcgggcattattatatgttaactagaggttacaaaaagaaaaaaagttttttgacctcaaggaaaaagaatgtatgaacacataaataatattgtgtgataaaggcaagcataggccgggtgcggtgggtcacacctgtaattccagcactttgggaggctgaggcaggcggatcacgaggtcaggaggttgaaaccatcctggctaacacggtgaaaccccgtctctactaaaaaatacaaaaaaattagccgggcatggtggtgggcacctgtagtcccagctactcgggacgctgaggcaggagaatggcgtgaacccgggaggcggagcttgcagtgagcccagatcgtgccactgcactccagagtgaagactccgtctcaaaaaaaaaaaaaaaaaaaaaaaaaaaaggcaagcataaatgtacaaagtacagaggtgcaaagatgtctgagtgatagattccatctaaggtagtcgggaggtcttcctgggggtggtggcatctgtccaccaccctcaggtgggaatttgaaggataaattcccagtgaacaaggtggagacagcatgagcaatgacatacaggaatcctataataggatgtgttcaaaggactgtaagtaaatctgtgtgactagagcttaaagtttaagataggtgcaacacaaagtatctgagacaggactcaatcaatttagaagtttattttgccaagggtaaggacacacacatgggagacaggtctgtgcctttctccaaagatgattttgagggtttcaatatctaaaggggaaaggagtggatattggggagaggagaaattgttaaggggtgtgggccagtaagaggcaaatggttgcattcctttgagtctttgattagccattgacatgtgagatgggggggtagaggaatagtcacgcattcatctagctcagtgaatctgcatttttaaataagataaaataaacataggccagagggagcaatcaaatattaatttgtctcaggtgagcagagggatgctattgtgttctgtcctatgtcccacatctgtgaatataagctatcaatttacattgtgaggatgaaattcaacagaactttttagggtaaagatcttggggcccacaaggaatttcctagtgggcaaattatgagggaggtatgtagcttttttgttttgttttcttttgagacagagtctcactctgttatccaggctggagtgcagtgtctccattatagcggtccccaactgcagccttgaccacccaggctcaaatgatccttccacctcagcccagcaagtaggactacaggcgcatgccaccacacccggctaacttttgtattttctgtagagacgggatttcaccatgttgcccaggctggtctcaaactcctgggttcaagtgatcgcctgcctcagcctcccaaagggctgagattacaggcatgaaccactgcgcctggcttatgtagcttatctttgaataggaggtttgtgtgacacagtccccagcttgacttttccctttggttcagtgattttggggtcccaagatttattttcctttcacacaggtaaagtccggagaagaagctggtgagaaagagacaggagccagatgctgaatgacggtaaatcgaatcctggagggaaccaaacaaaaccctgaaaacctccaggaatctcaggttggccaaatccttggtaatgtcctgccactccccaggactgccacactgtacacaccctatctaatggcaacctactgcaggggccaaggaaaaacgtctcctttgtcctctggaggttcactgaaaaatcaactggcggaaagcaaattaacaggtcaaaagatatacatgtattattataaaaagacgtaaatgtattattgggcatgtgggggaaccacagagtaattactccacctctcagtgggctcagaagcttatatacccctcctgaggttacagaaagtttgggggctcagagaatggtggtaaatcaggatttagtggcaagacagaaatggaaacttggctagcaaaagtcatttcattatgtagattggggtccccaaactttgggccatttacactgtggccatttacattcctgttaggaatagggccgcacagcaagaggtgagtggcgggtgagtgagcaataccgcctgagctctgcctcttgtcaggtcagcagctggtattaggttctcttaggagcaagaacgccgctgtgaactgcacatgcaagggatctaggttgcggctccttatgagaatctaatgccgatgatttaaggtggaacagtttcatcctgaaaaccatccccctgccctggtccatggaaaaattgtcttccatgaaacctatccctggtgccaaaaaggttggggaccgctgatgtagatgaaacctcacaggtagtagccattggaaagaatagatggttgatgtttctttcagacctttaaaggtgtcagactgtccattaacctttcctatatctggacgagggaaaacctcagagagcacctggctgcatcaatgcagattttctctgtatattgcaagcctctctcacacacacacacacacacacacacacacacacacacacacaaacagcttcgtaggactacttccgcctgcaggtcctctgaacagccatatctcaaaatatgtgaaagaagtatattttggggtaaaattttttggtttccttcactacacatctcaccttgggtgttattcttgccactggtttcatgttctcagactcacgaagctgaaaaacagttggggatgcagaatttgatgtgcttcatcctttgtgggcttgaagagtctcttgttcccaaaattattccctggggccctctgcttcacaggcaaataaaagcaaaaagaagcttgctcagccttaagtgaggaaatgactcacaggtttaaaacaaaaaaggaaaagatggaggcattttgtaggtgaaagggcgagagtcttctgatgcaaagtaagaggtcattagagcagggatggattatcaataagcagagcaaacatttgcttagggaacaaacagcgccggaacacgaaaaagaaaagaaaaacataataatttaattacttaaaacactgaagatggcaacataggaaaaaacccaaaccagaacatttttggacttcataacattttatggttcagtatttatggcttagtattttattttgaattacatgtggggaggaggggtaaaaatactttaatttttcttgctaagtaagtactattatatattcaggtataatgggataagggataccattttaatgggtccgtttggagctttaaatatgatcaacagtatctgtgtgcatgcaagattggttaagaaactgggttagaccgagtgcggtggctcacgcctgtaatcccagcactttgggaggccaaggcgggcggatcacgaggtcaagcgatcgagaccatcctggccaacatggtgaaaccccgtctctactaaaaatacaaaaattagctgggcgtggtggcccgcgcttgtagtcccagctactcgggaggctgaggcaagagaatcacttgaacccgggaggctggggttgcagtgagccaagatcgcgccactgcactccagcctggcgacagagcgagactccgtctcaaaaaacaacaacaacaacaacaacaacagaaaatgaaaacaaattggggtaaaagtctctgagagcttcctacagttacaactccaaagcttcacaaagccagtccctcctggctggagccagggactccaacgctgtgggcctctcagggggcggacccgcggcgccagcgcctgctcccttcccacctcccaaccctcctctctgctgtatcctccctgcgagctgtgtcgggggccgggggggggagtgggggccgaggccggacagcttcatctggaaatcccccgccactcacgggggaagaagtcccacgagccctatctggcctcgggcgctggcgcaacttgtctgctcaaataatctcgttccaaatctgtgcgttttacacaagaaacaaacaaacaaaacaacaacaacaaaaaaacacaactgggactcagatgacgttttaagttgtctttgaaaaacaatgcataaccctgcacgtataaagttgcctatgtcacataaccctaggcagctgtcattctggagtgatctggagttaagttttttgttttctttttcttttttcttttctttttttttttttagacagggtctcagtcactcaggctggggtgcagtggtacagtggcgcgatctcgactcattgcagcctcgaccacctgggctcaaaagattctttcacctcagccacccacccgcctgcccccaaccccgctaaacagccgggactagctgggactacaggcgcgcgccaccacgctgggctgctttctttgtattttgagagagacggggtttcgccatgttggccaggctggtgattcgctcgcctcggcctcccaaagtgctaggattacaggcgtgagccaccgcgcccagccgccacaaaacttttaaaagttattacttcgctaaaaataacagcgtagaagccattgtgcagcgccacgcgatctcggctcactgcagcctcgacctcccaggctcaagcgatcctcccatcttagcctcgcaggtagctggggccacaggcgcacgacaccacgctgggctattttttaaaataaaataaaaatcttcgccaggctggtctcgaactcctaggctcgacagatcctctcgcctcagcatcccaaagtgttgtgattacaggcgtgagccaccgcttccatttttagagttctattctgaggactaacgccgttcaacaagttggtgtgaatttgtttgcatttttcaaaaccccaaagccggcctgggcgccatccccatttgccccgggcctctcaggaccccgaccacaggcaggaccccgaccacaggcagcgccccgactccaggcagcgccccgactccaggcagggctacctccaactcccagcctccccaggccgggcccccgcccggctcccgacaggctcctctccccgtggcggggcccctcgcccaggcagcacaccctctcaacccgaccgggcccccaccactctaggagggccggcgttgggggagggcgccgggacgtgcccgagggtgacactcgggcttgggacagggcgtgctgccgcgggtcacgtgctgcggaggcttggggaggggcggcgaggcggggtttatagcccgggcgcccgcgggccccacgctttgaccgggtcgtggcagccggagtcgtcttcgggacgcgcctgctcttcgcctttcgctgcagtccgtcggtgagtgcgcgcccagtgggtgccccagcgaaccggtcccgggcccccagcggcgcccagttggggtggggggctccccggggccttgggaccgctgctctgctccccgcggggctcaaaggtggacgggacgcgggggtgatggtccgagaccccccgctcgcctcgcggcttccaggtcctggctgggtaggggcggtctgctgaacccgcgctttcgacccttgcctttgtgcgttgaggcttctttcctgccaacagatttagggcgattgctatcgaatgtcccttggcctgcttgggtggttgtgggaaaacaatatttgtcgaagggacattatcgaaagggaaacgcgttagaaaaccgcattttttttttgacggagtctcgctctgtcgcccaggctggagtgcagtgacgccatctaggctcactgcaacctccgcctcccgggttcaagcgattctcctgcctcagcctccagagcagctgggataacaggcgcccgccaccacgcccggctaatttttgtatttttagaagagacggggtttcaccacgttggtcaggctggtcttgaactcctgacatcaagcagtccacccccctcggcctcccaaagtgctgggattacaggcgtgagccaccgcgtccggcttggctagcatttttgttaacagatactcggagaaacaagagaagtatgtcaacaactttacttctccctcctgagtattgcaagtttacacataagctctgaaactttgcctcaaaagagggagtggggttgtgtgggtgtgggtctttcaggagggggacctggagagctggagagaggaaagaagtgcagaagactacagggagctcaccctgcatttttctctacttgtaatcagcatttgcttgggttggggaatgaatttgggagagtcttatcccagtgttctgaaataagtctcttttctgcagatttctttctccaggaagaaaaatggcatccgttgcagttgatccacaaccggtatgaattttgagtagcctttgtctactttctctccttttgtgttttgagagattaataagcataccctccctactttgattgcagagtgtggtgactcgggtggtcaacctgcccttggtgagctccacgtatgacctcatgtcctcagcctatctcagtacaaaggaccagtatccctacctgaagtctgtgtgtgagatggcagagaacggtgtgaagaccatcacctccgtggccatgaccagtgctctgcccatcatccagaagctagagccgcaaagtgagttctgatttttcaagatgcaagtcaagggactggtcagtggcgagcccctgagctcacagcagtaacatctggaactcctcagcccttcctggggcatacactgcctttacctagaaactttcaggtgaccctcattaccgtaagaggactgtttcttttcttttctttcctttttttttttttttgagatggagtctcactctatcactcaggctggagttcagtggcgcagtcttggctcactgcaacctctgcctgctgggttcaagtgattctcctgcctcagcctcccgagtagctgggactacaggctcccaccaccatgcccagctaatttttgtatttttagtagagacgcggtttcacaatattggccaggcttaactcctgactttgtgatccacccacctctgcctcccaaagtgctgggattacaggcgtgagccaccgcgcctgtccacagaaggcctgtttcatagctttggcagatgtttatgatcctttaattaaaaatcccccagaggatgggcacggtggcctgcacctgtaatcctagcactttgggaggtctagatgggaggatcgcttgaggcctggaatttgagactgctcactgcagtctctgcctctcgggctcaggtgattgtcctgcctcagctccctgagtagttgggattacaggcatacaccaccatgcccagctaattttgtatttttagtagagacagggttttgccatgttggccaggctggtcaggaactcctgaccccaggtgatccgcccgcctcggcctcccaaagtgctaggactacaggtgtgagccaccatgcctggccatgaatgagttttagaaatggatagtggtgatggttgtataatgttgtaaatggacttaatgccactgaattgcacagttaaaaatggttgaaatggtgaaatttgttatgtatattttaccgaaataaagaatagaaatgtcatactccatgagaaatctcatactctcatacttagtagtcactccccatttcctaacaaccaccctgaggcagctactcatctactttgtctttatagatttgcctatgctggatatttcttataaatgaaatcataaaatgtgtgggtttttttgtgattggcttctttcgttaagcataatgttttcaaagttaatctgtcttgtcacatcatatcagtacttcatctctttttattgttgaatagtaatttactgtctagacagacaatatttattcattcttcaactgatggatgtttgggttcgttctacttttggagattatgtataatgcttctgtgaacatttgtatacaagtttttgtgtggacatgttttcaggtttttttggtatatacccaggagtggaattgctgggttatataataactgtttaagcttttgaggagctgccagactgttttccaaatcagctgtaccattttacattcccaccaacactgtatggaggctccaatttctccacaacatgaactgcttttgaataaagatttaaatcattctttcaaatggttaagccagggacttttaggattataaggagcctttagagaccagccattccaactctgctacttcctaaatgaatttggtactagtacttggtttggtattcttagtgggaagctcacactaaaatctcccttgttagggagatccagggtggtcttggcatactctttcctcctgaggaccccaaatacactgacctgtgctgaagtaagcgtaggtagggattaaactagcatgggaatgccgattttgagagagtttccagataccttattctctgaatgacagttcagggaaagcccggctactcttggcattaacattaggggccagttgataaggaagaagcttcagagccagcttcctgtttggcctgtcactgcctctgcctgctcctccctcacacccccatatttccttacctttagaagagagttgccagcaacttgccaggcctcttcctgtcagaactagataaaccaggcaatgccttctgttgtataagatcaacattcttgcctttttttttttttttttgagatggagtcttgctctgtcacccaggctggagtgcaatgatgcatcttggctcactggaacccctgcttcctgagttcaagcgattctcctgcctcagcctcctgagtagctgggactacaggcgcacaccatcacgcccagctaatttttgtatttttagtagagacggggtttcaccatgttggccaggatggtctcgatctcttgacctcgtgatccgcctgcctcagcctcccaaagtgctgggattacaggcgtgagccaccgcgcccagcccattattgccattttttataaggcctatggtaatgtgtgttcattctatacctatagtactacattaacattttcccatttgtgattctagttgcagttgccaatacctatgcctgtaaggggctagacaggattgaggagagactgcctattctgaatcagccatcaactcaggtgagcttgggacaaaagtgctgagacttgacacttcacatgttttcatcttctatctgttaaaacaagctgtacatatcacaaacaggcaaatacttgttttcccaacctggatctggatgtatgtttgaaaaataatggccacttccttacttcctgaactgttgtcaagttgtatctacgaagcagagaagaactagcctcctttggattagaaaacttttagtgtgttgtctatcagtttgtgtctttgctcctataaatgaaattgctgtctcaagtaactgattgtcttgtggtattaaataaatgcagacgtgatatatataaccttttctcacctggcttgtacaatgctgccaggaactaccatccatatgggatagctagccagtgttgacaaaaatgataggcttgtctgtcctggtgatcctttggttcagataatgtcctaaaattttgtttcaaattaagaatacagaatggcacaaaaggataccagttagggaaaaatatagctctgtgtcttttcataatctaaatacagtcatctgtcacttagtgatgggaatatattttgagaaatgcacattaggtgattttgccattgtgtgaacatcacagagtatactcacaccaacctagatggtagagcccagtggtccccaagctttatggcaccaggaactggttccatggaagacagtttttccatggaccagcagggggtgggtggtgtttttgggatgattcaagtgcactatatttatcattagattctcataaggagcatgcacgtgcacagttcacaagagggttagggttaggtctcctatgagaatctaatgccgcctctgactggtaatggactggtaatggactggtaatggtccatggcccgggggttagggacttgtggtgtagcctgctatatacctaggctatatggtgtatagcctgctatatacctaggctatatggtgtatagcctgctatatacctaggctatatggtatatagcctgttgcttgcttctaggctacaaacctgcacagcatgactacactgactactgtaacacaatgataagtatttgtgtatctaaactagaaaaggtacagtgaaaaaaaaaagtatacctgttatagggcagttcattataatcttatgggactatcattgaatagtggtccatcgctgaccaaaatattatgtggtacacaactataggtaggtttagtgtatagcctttagaatgcttgtgcaaatcttttaaatttttcacttacattgcttgagactgtgctaatggtgagagttattttccatttcggatattttctttaaatgttggtaacttgtgttcttttttttttttttttttttttttttgagacagagtcttgctctgtcacccaggctggagtgcagtggcacaatctcggctcactgctgtctcttcctcctgggttcaagcaattgtcctgcttcagcctccccagtagctgggttcacaggcacgccccgccacacccagctaattttttttgtcattgtttgtttgtttttgagacagagttttgctcttgttgcccaggctgtagtgtaatggtgcaattttggctcactgcaacctccacctctggggttcaagtgattcttctgcctcagtctcccaagtagctggggttacaggcatgtgccaccacgcccaactaattttttgtatttagtagagacggggtttcaccatgttggtgaggctggtctcgaactcctaacctcaggtgatccaaccaactcagctttgcaaagtgctggcattacaggcatgagccaccatgccctgccatgtataataactgcatactaataacaccccgagggccaggtatagtttgatcttcagtttcctctctggatttgtgtgactttggaataagctatataacttaccttcttttcttttctttttttttcttttctcttctctttttttttttttttttttgagacagggtcttgctctgtcacccaggctgagtgcagtggcacaatcacagctcactgcagccttggcaaacagacaaatttcatatctgtttacttcatttgctcctcctgcaattcccaaggattggcaggtagggcagatatacttgatagggaaattcaggctcatcaactcttagtgacttgcccaagacctaaagctagagtgagaggactagattccttctttaactcttcagctgtgctgccttagttaagaccttaggtatgtccttgtgctcatttttctcaccagccaggggatctgcttttctacttacagattgttgccaatgccaaaggcgctgtgactggggcaaaagatgctgtgacgactactgtgactggggccaaggattctgtggccagcacgatcacaggggtgatggacaagaccaaaggggcagtgactggcagtgtggagaagaccaagtctgtggtcagtggcagcattaacacagtcttggggagtcggatgatgcagctcgtgagcagtggcgtagaaaatgcactcaccaaatcagagctgttggtagaacagtacctccctctcactgaggaagaactaggtaactggaattttatcttgaaatactgttttatattaaatctttcttaaacagcttcattgacatatactctcatcttgagtctaaatttacacagttgtgcaagcatcactgcaatccagtttcagaacacttctgctaccccaaaagatcctcatgcctgtttgcagtcagtcctttttaatttaatttaattttatagagatgggatctcactatgttgcccaggctgatctcgaactcctgggctcaaacgatccacctgccttgacctcccaaagttctgggattacagatgtgagcaaccactaatctttttgcctctatagattttccttcctaaagcaatcataaagttcacattgaatcgtacgtagtaagttttgaaactttagcaaaaattggccttgaaaaatattttctgtaaatggatagtctttaatggattgctttataaaatcctccttacaaagaatcatcattaggtaatgtgtgccaggtaccatgccgctcaagttcactctaggctgggagcaatggtgcatgcatgcctacaatcccagcactttgggaggctaagacaggcagatcgcttgagttcaggagtttgagattagcctgggcaacatggcgaaaccctaaaaaacacaaaaattagctgggcatggtggcttgttcctagagtcctagctactcgggaggctgaggtgagaggatcagttgagctcgggaggttgaggctgcagtgagccaaaattgtgccactgtactccagcctgggcaacaaagcaagacctgtttccaaaaaaaaaaaagcagtttactctagtgggagaaacgtgtagatgcatgcagtgtgtatcagatacagtaatatgttcagggtagtcaagtccagcagcagacgtgagcagtcttggaaaaatgactgcatgattgctaagtgattgggtagaagtaagaaagtcaagacccaggttagagtccaggccttatcacttgtcactgtgatcccttaagtttttttgtctcttatttctaacttcagaaaaagaagcaaaaaaagttgaaggatttgatctggttcagaagccaagttattatgttagactgggatccctgtctaccaagcttcactcccgtgcctaccagcaggctctcagcagggttaaagaagctaagcaaaaaagccaacagaccatttctcagctccattctactgttcacctggtgagtaaaactttattttaaggtgtctgaagtgggttcatttatctctaggcccaagaattaaatgtaatcacaaaatccaagaatttcattcttagttgacaaacaacccaatagaaaactggacaaagaatatggagacagctcacagaaaaaggaagtataactagttgaaatataggaagcaatgctaatctcgctctgaggggtcaaatactgacatctctcttgtcctgccacacgggaaatgtggctgttggcaacggtgtagagaaagaaccacacttgtgcagctcttgctctaagggactgattcaagagacagttttagtaaagttacaagcatacctacacttggagctgttttactttttatcttacagatgtgtatatttgtttaaagttgcaagagactataacaatgcacatccactaacaggactaattaaattgatatatcacaatagactactgtgtagccattaaaggtttccaagttaaagaacagtatgtaccattctgtactgccatgagaaaaccatttcttcttagaaggggaaatagtggttggcaacagggaagaggaaggtcaaattcctttctgttttgtaattctaacttatcctttactcatgtacacattaaattttagttgctggctgggcgtggtggctcatgcctataatcccagcactttaggagggcaaggtggttggatcacctgaggtcaggagttcgagaccagtctggccaacaaggtgaaatcctgtctctactaaaaatacaaaaattagctgggcatggtggcgtatgcctgtaatcccagctactcggtaggctaaggcacgagaaggaggttcagtgagctgtgatcgcgccactgtacttcagcctgggtgacagagtgacactcaaaaaaaattttttgtagttttttagttgctttacctgtgctaaactggaagtaaatgtggagtcagtgatttaatagttaaatagaggcagtaaagagctactactgcttggttaatttacacatattgataataaataataatgatagcaggaatagatcttattcaactccaggaaattcttagtttttatgttgcctgatttacatcatacatctgcaaacaggctaacgtgaatatctgacttgtgtgttcctttgtcttgtttcaatgtgtctagattgaatttgccaggaagaatgtgtatagtgccaatcagaaaattcaggatgctcaggataagctctacctctcatgggtagagtggaaaaggagcattggatatgatgatactgatgagtcccactgtgctgaggtaagatgactgggacggtcatttgttggttgctgaagaagttcttatcagacttttcatttcaatttttccatactatgtcttagaatactcttctctatcaaaaggttgaacaataccatgtacataggtggctagttatgtggcagaaaagcaaaactaggcagcgaataattttatctaacaacctatgagtatacatatgccccaagtgagatacaactaaatgagaaacacaggccttgccctcataatgggtacagactaacaggggatacagccagccatgctgtcctattttgtgcctttttaatgctccttgcagaagagggctatctcataggcagtacactcagagtagccaagtccggttgttgtttaacggcataaatacaggtactattggctgggcgcgatggctcacgcctgtaatcccaacactttgggaggccgaggcgggtagatcacgaggtcaggagatcgagaccatcctggccaacatggtgaaaccctgtctctactaaaaatacaaaaaatgagccaggcatggtggcacgtgcctgtagtcccagctactcgggcagctgaggcaggagaatagcttgaacctgggaggcagaggttgccatgagccgagatcatgctactgcactccagcctgggcaacagagtaagactctgtctcaaaaaaaaaaaaaagaaaacatatgggaagactatctcaggcagccttggagtgggggtagttgagtcacattgctttctggaagagatgaatggtaagctgagaactaatgggtgaataaactaggtgaaagggcaataaggtgaccaaggttccagagggaaggcatagcatcttggctgggtgcaatggctcacacctgtaatctcagcattttgggaggccaaggcaggcagatcacttgagcccaggaattcaggaccagcctgggcaactgtgaaaccccatctctacaaaaaatacaaaaattagcagggtgtggtggtgtgcacctgtagtcctagttgctcgagaggctgaggtgggaggatcacctaagcccgagaggtcgggtccgcagtgagccatgattgtgccagtgccctccagcctgggcaacagactgagaccctgtctcagaaagaaagaaagaaaagaaaagaaagaaagaagaaagaaagaaaaaggaagggaagcagggaggaaggaagggaaaagaaatatcctcttatagtcctagaaagtggttctttgtgtcccaaaagctctgaagtcaatatgaactgtttgttcatgtcttgtcattttatttgaggagggaatatatacattacactactaacatgaaggatatttccattcttttgggtctcccctacctaatatgtttcttcagtttaagatgatgaactttggagactcaggcactagttcgaatccctacccagctgttttccagttgttaactgaagccatctacttaaactctaagcttatattcatatctatgaaatgtgaataatactgctgcactcggcattgtaatgaggatttttaaaagccaaagaatccacatatgtggtggacacataaccagcctactgtcatcgaactaatttatacatagcactgttggatccactgctaattttaagttttatttttagcacattgagtcacgtactcttgcaattgcccgcaacctgactcagcagctccagaccacgtgccacaccctcctgtccaacatccaaggtgtaccacagaacatccaagatcaagccaagcacatgggggtgatggcaggcgacatctactcagtgttccgcaatgctgcctcctttaaagaagtgtctgacagcctcctcacttctagcaaggggcagctgcagaaaatgaaggaatctttagatgacgtgatggattatcttgttaacaacacgcccctcaactggctggtaggtcccttttatcctcagctgactgagtctcagaatgctcaggaccaaggtgcagagatggacaagagcagccaggagacccagcgatctgagcataaaactcattaaacctgcccctatcactagtgcatgctgtggccagacagatgacaccttttgttatgttgaaattaacttgctaggcaaccctaaattgggaagcaagtagctagtataaaggccctcaattgtagttgtttccagctgaattaagagctttaaagtttctggcattagcagatgatttctgttcacctggtaagaaaagaatgataggcttgtcagagcctatagccagaactcagaaaaaattcaaatgcacttatgttctcattctatggccattgtgttgcctctgttactgtttgtattgaataaaaacatcttcatgtgggctggggtagaaactggtgtctgctctggtgtgatctgaaaaggcgtcttcactgctttatctcatgatgcttgcttgtaaaacttgattttagtttttcatttctcaaataggaatactacctttgaattcaataaaattcactgcaggatagaccagttacatgctgtttgttccatatgctttgtgtgttgctttcgtagagctgcttaacctgcatgacagagttattatacatacatgaatttcaattggcctgttggggagtttggcagagtgagaacattagaaggctaatgttaaaaatgggatgcttggccgggtgctgtggctcatgcctgtaaccccagcactttgggaggctgaggtgggcggatcacgaggtcaggagatcgagaccatcctggcgaacacggtgaaaccccatctctactaaaaatacaaaaaattagccgggcacggtggcgggtgcctgtagtcccagctactcgggaggctgaggcaggagaatggcgtgaacccgggaggcagagcttgcagtgagccgagatagcgccactgcgctctggcctgggcgaaagagcaagactccatctcaaaaaaaaaaaaaaagaaaagaaaataggatgcttgataacaaattaaaaaaaaataggatgcttgataacagatttaaaacaaattaaaagctaatgtgcatattcaaattttactaggtgacagttggccctctttgtttgccaacttactggacccctgtgagtgggtttttaaaccagtaaaagggcctagtcatgtctgactacctcactgaaaaggaatcagagctgaaaggaagtgagtgattgtttaaatcagcatcatgtaaaggcattgggcatttcttgccagggaaccagttaaagcgtgagtcctaaagggagattcttcactgtccagccttagctggacttaacttactgtgttgtcattttgggaaaaagtcactaacctcagttgttgttggggacatacgtatagaagaccatgtgagactaattagaagtaaaaagactttaagccccctgtagaaaaaggttcttcttacctcctgcctatggtatccagacttctagtccattcaacattggttatttaggaaccatcctgaatctccttgtcacacagatgaaatatgtcaaactagtttttaaaagtgagtctcagaacttgtgaaataggccaggcgctgtggctcatacctgtaatcccagcactttgggaggccgaggcaggcagatcacctgaggtcagggattcgacaccaccctgaccaacaacgtgaaaccctttctctacaaaaaatacaaaaattagcctggcctggtggtgcacgcctataatcccagctacttggaggctgggcaaggagaatcccctgcgtctgggaggtggaggctgcagtgagccaagattgcgccactgcactccaacctgagcaacagagtgagactctgtcttaaaaaaaaaaaaatgtgaaatagagctacatgcttctggctgtccctgctaaaaggtaagcagggctgccctcagcagaactgggaagtctaactcaaattagtctctttctatcctggttcacccctttctctccatgaaaacaaggaagcggcacataactttacatgttcctttggtgtgagtgagtttattaaagttttttatcgaccaggcacggtgactcatgctggtaatcccagcactttgggaggccgaggtggagagatcacttgaggtcaggagtttgagaccagcctggccaacagggcaaaacccagtctctactaaaaacataaaaattaggccgggcttggtagctcacggcctgtaatcccagcacattgggaggctgaggctggcagatcaagaggtcaggagaggccaacagtggccagcctggccaacatggtaaaccttgtctctactaaaaatacaaaaattagctgggcatgggggcgtgcacctgtaatcccagctcctcgggaggctgaggcaggagaatcgtttgaacccgggaggtggaggttgcagtgagctgagattgcgccattgcactccagcctgtccagcgacagggcgagactccatctcaaaaaaaaaaaaaaaaccaaaaataacaacaacaaaaaaccccacaaaaattagctgggcatggctgtatgcacctgtaaccccagctacttgggggctgaggcacaagaatcccctgaaccaaggcaggtgaaggttgcagtgagccgagattgtgacactgcactcctgcctgggtgacagaccctgtctcaaaaaaaaaaaaaaaaaagtttttatcaagttacaaattttttcttctcattgtaactccagaaatcagtaaacaggtgagttgagttggagagtaggtgggaaatccctaggatttgttttgcagataaggagcttctggtttctgggaaggatggacttttgtgatttatgggtttccaggacagagcctagtcactcacttgccttcctgttcccagtgactggcattttctaggcctctgcctcttaattttttttttttgaggcagagtcttgctctgttgtccaggctggagtgtgatggtgtggtctcagctcactgcaacctccgcctcccaggttcaagctattctcctgccctcagcctcccaagtataggcgtgcaccaccatgcctggctagtttttgtctttttagtagagatggggtttcaccacattggccaggctggtctcgaactcctgacctcaagtgatctgcccgcttcggcctcccaaaatgctgggattacaggcgtgagccaccacgcctggccacacatgctttcttatcctgaacatacacctttgtgtttccctattataagagttatagtgtgttactttagtacaaattaaaaaaaaaaaaagaattgtagtccttactgaatagcttatgaaaaggagagaggtctcaaagctcttcttcctgagcaggggcagaataaaatgtagaacatccttagcttctagaagagcaccagcagcccttgctttttgctgtgagctgtgcacattggtcatggttttgctgtctttgtgtttcaagtttgtgtctacatgcatttcattcatttgtcaacatgtctcaggatttgtggtgttctggcatttttttttttttttttttttgagatgggctcttgctctgttgctcaggcaatagtgcagtggtgtgattggctcactgcaagcttcgcctcccaggctcaatcgattctccctcctcagtgtcctgagtatctgggaccataggcatgcacaatcacacctggctaatttttgtatttttgtaaagatggggtttcaccatgttgcccaggctggtctcaaactcctgagctcaagtgatccactcacctcggcctgccaaagtgctgcgattccaggcatgagctactgaacctggcctgtgttctcacatcttgcagcttcattgttgcataaactggcagaaaattttggttttacagactttttttcctccagaaaacagttcttttgagggaaaatactgactaaggctaacatagtatgtaaccatggcaggttcgtcaacatttgactgcatgaaacctggcatggtgtgcctcagggagtgttcaagaatgttttttcctttgcctgtaatgataacatagtctttctagtttgtcctatgcaaaaatgcaaaggaatatgatgcattggccattaatctctgagccttagttttctcatctattaagttaatgttgcctcaacagatggaagtgagtgttgaggatgggggtgtgctttttaaatttgcgctagaggcatggggacatcatctgtgggacagtgacatgtagtatctttaacttggcagttcaaggtgtgagtatataataccagctcatggttaggaaaatacatccactttgataaggcagttataggtattaaagaactaatgaaactgggcctagtggtatgcacctatagtctcagtttctcaggtggctgggacaggaagattgcttgagcccaggagttcaaggctgcggaaaaaaaacaactaatgaagtgaaaaggaaaaagctaaaatttggtttatataagatatagggctacaggtcagcttaagccaaagacttgttttatggtatctttcttggttaccttttgagattctgatgctaccccactccctccaccccaaaatgaacttctttaggactgaacttctaaaaccttagttttagaaattattaactcctgaaaaaaaaaatggtgtcaacttgaccctcactgggctagtcccaggtcgtatttttaggactggtgagggttaaggacttctaaccaaccatcctaagctgagagtcaggaatagagtgctcagaaggaaaagactgaattagaaaattatactcttaattggtggtgagaggcaggcagcctatacttcgttgaatttgacagatgaaactgctgattaacacagtacatctttaattgtaaaaattgcccaggtgcggtggctcatgcctgtaatcctagcactttgggaggccgagtcggcagatcacttgaggccaggagttcaacggcagcctggccaacatggtgaaacctcgtctttactaaagatacaaaaattagctgggcattgtggctcgctcctgtaattcaagctactgaggcataagaattgcttgaacctgggaggcgaaggttgcagtgagccaagatggcatcactgcactccagcttgggcgacagagcgagactccgtctcaaaaaaaaaaaaaattgttaagattgtcagtaagatgactaagtgaagtgataggaaggcagtcgaggggaaaatgtttgcagtgggaggtagacagaattgcctgagattcttctcatgtttttcttgcttaaactgggcctgcagattagagatataatatgaaatataatataatgaaaggctttgaatctcacaagggagcctagtcttgatacataatatactttctaggtttttagctggtacagattttatgaaagtgccatttgagagtgccatataaaagatagtagagctggctgggcacggtagctcatgcctgtaatcccagcactttgggaggccaaggtgggtggatcacctgaggtcaggagttcaagaccagccttgccaacatggtgaaatcccatctctactaaaaatacaaaaattagccgggtgtggtggcacacgcctgtaataccaggtacttgggtggctgaggcaggagaatcacttgaacctgggaggtggaggttgtagtgaaccgagtttgcaccactgcactccagcctgggtgacaatgagactccatctcaaaacaaacaaacaaacaaaacaaaaagaaatccaatgtcaaaatttccattttttcaatttttaagtgtacaattatgtggcattaagcacattcacaatgttatacaaccatcaccgttatattcatcttaagcacaaattctgtacctattaaacaataactccaggctgggtgcagtggctcacgcctgtaatcccaacattttgggaagccaaggaggttggaccacttgaggtcaggagttcgagaccagcctggccaacatggtgaaaccccatctctactaaaaaatacaaaaattagccaggcatggttgcagcgcacgcctgtaatcccagttactcgggaaactgaggtaggagaatcagttgaacctgggaggctgaggttgcagacagctgagattacgccactgcactccaacctgggggagagagtgaaactccatctaaaacaaaacaaaacaaaaaaacccacaataactccccaatttccctctttccttctattttttgagggatttttttttttttcctgtaaacagtgtcttgctctgttacccaggctagagtgcagtggtgcaatcttggctcactgcaacctctgcctcctgggttcaagtaattctcctgcctcagcctcccgagtagctgggattacagtcatctgccactatacccggctaatttttgtattattagtagagatggggtttcaccatgttggccaggctggtctcgaactcctgacctcatgatccacctgccaaagtgttgggattacaggcgtgagccaccgcacctggtctttttgagggatttttgttgctgttagctctttttcctctgttaggtaatcagctacattttttcctccactatcaagattctagcctttggtaatacgttttatgttattaattttttttcttttctttcttttttttttttttcagacagagtctcgctctgtcgcccaggctggagtggtggtgaacctcggctcactgctcctggattcaagtgattctcctgcctcagcctcctgagtaactggggctacaggggcatgccaccacgcctggctaactttttgtatttttagtagagacagcgttccaccgtgttagccaggatggtctcgatctcccaacctcgtgatcctcccatctcggcctcccaaagggctgggattacaggcgtgagccactgcagctggccttaattttcttgttttaatctgttgtttgctaagaaacattacctagcttatcgaaattgtatataaaataaaatttgatagagtttcttgtccctaaaggctttcctgtgcagggaagaggtagggttttgtgatggctgtttcaaccataaaaagaccttttgtttcctcagttgctaaacatttgcctagacacttgcttatggaaaagtggggtattattgtttttaagaaagtaatagattaatagttgaataacaaaaaatgctttatatctggtattttttaaaaaagcttcattgactaggttccaccactagttagtttcctttttaaaaggtttccttagtgcttttatagtatgagggaattgcaggaataagaccacaaacatcttttcaaaaagcacagctatggacaaagcaaggttcacctacatgcactaaagtctccatgagctcagatggacctgacaactcacttcatcggtgtttgtttcaatatccaagattcttcttttacaggtgtttgatttcaccaccatagacttgacatctgagactgatgaaattccagatattatagctttggaagaggagaacggatcaaataattcacatgctaatggccctgtcctctcagggcaagatgttgaataactaacaacaataaaataccccttttggttgaatacgcaatttgtattacattaaacttcctgtttttattcctgtgactttgaagagtgttaatctattttttggctacattggtcttaattgcaatgacactctgatctaaacttttgtaagagatcctagttctgtgtcatataatcatttaatataattaaagtttaattgctgaaatacttataatgaaaattgggctgtataatcttgacttcatgattttttttcccactggtatagtgaacatttgttgtcttttggtctcccatgattcattcatgcttcttttgaaggtctcagtgggtatagtggtcaaggtttttgctttcccttagcctagtgatgggcatgtgactaaaagcaggtcacctgggaggaagcatagcatgatgggtaagggctcagactctgggttgtaatctggctctgctgcttactgtgtgaccttcagcaagttacttaatttctctatgcctcatttttttcatcagtaaaacaggaatagggctaagtttgctctgaagattaaatagttaacatttgtgaaaagcataaagcagtgcctggcacagagccgcattaagtattagttgcctgtaatcccagcactttgggaggccaaggcgggtggatcacttgaggtcaggagtttgaaaccagcctggccaacatggtgaaaccccgtctttactaaaaatacaaaaaaaaaaaaaaaaaaaaaaattagccgggctgtggtggcacaggcctgtaatcccagctactcaggaggctgaggcaggagaattgcttgaacccaggagacagaggttgcagtgagccaagatcacaccaccgccctccagtttgggtggcagagtgagactccatctcaaaaaaaaaaaaaaaaaaagtattagttaagggagtaaactgtagaagcaatccgggggcagtggctcacacttagaatcccagcactttgggaggccaaggtgggagaatcacttgagcccaggagttccagaccagtgtgggcaatatggtaagaccttctctctataacaaaaaaccttaaaaaattaggctgggcacagtggctcacgtctgtaatcccaacactttgggaggccaaggcgggcagatcacttgaggtcaggagctccagaccagcctggccaacatggtgaaaccctgtctctactaaaaatacaaaaatttgtcaggtgtggtggtggacgcctgtaatcctagctactcaggaggctgaggcagaagaataccagcctagcctggaattcctggcctcaagtgatcctcctgccttggcctcccaaagtgctgggattacaggcatgagccactgcgcctagctgccaaatcttagaatgaggcctagtgagtgagaactaaactctgatcttttttctttcttgtccaaattcctatccacagaacttggggagtcatgtcctacaagccataaaaatctcatcagatgggttttgttgaagcctatataacccagcttactttccaacctgactagcataatatcacatgacagataaagaaggaaatcaaaatattttttcccaaaatatgtttctttgttatattttgaaatggtcctgcaacgtcgtcgcttatggggagaaatctacatctgtaaagaagctggctggtggctcacgcctgtaatctcagcactttgggaggccgaggcaggcagatcacctgaggtctggagttccagaccagcctggccaacacggtgaaaccccgtctctactgaaaatacaaaaattagctgggcatggtggcgcatgcctgtaatcccagctacttgggaggctgaggcaggagaattacttgaacccaggaggcagacgttgcactgagcagagatggcgccactgcactccagcctgggcgatagagtgagactccgtctcataaataaataagtagatctttcccctggcaggccctcccaatcctgaagagattaactgaggatccaatacttgctctgtcacccaggctggagtacagtggcgtggcatgtgatctcagctcactgcaacctctgcctcctgggttcaagcgattctcctgccttagcctcccaagtagctgggactacaggcgtctgccaccatgcctagctaatttttgtctttttagtagagatggggtttcaccatgttggctgggttggtcttgaactcttgacctcaggtgatctgcctgccttggcctctcaaaatgcaggattacaggtgtgagccgctgtgtctagcctaaattttttttttttttctgagacagggtcttgctctgttgcccaggctggtgtgcagtggcatgatgtgggctcactgaaacctctgcctcctgggctgaagcaatccacagcctcagcctcccaaagtgttgggattataggtgtgagccaccgcatccagcttctagtacttttgggtggccacctatgagacttcatactaaccctggtgtccacaaccacttatcttgacctagaaacttttctatggattccaggtctttagatagtagcttgactctaaaccaatggcaatcataaaatctttgttgttgttgttgttgttgttttgttttgagacacagtctcacccagtcgcccaggctggagttcagtggtgtgatctcggctcactgcaatctcagcctctcgggttcaagcgattttcctgcctcagcctcccgagtagctgggattacaggtgcgcaccaccatgcccggctaatgtttgtatatttagtagagatggggtttcaccatgttggccaggctggtctcaaactcctgacctcaagtgatccgtctgcctcggcctcccaaagtgtagagattacaggtgtgagccatcacatccgccccaatcagaaaatctttgagtccacctatgacctgaacccaccactttgagttgcctcacctttctgtacagaaccaat

SEQ ID NO: 45 - DNA, 2168 bp, Homo sapiens
tcggtgagtgcgcgcccagtgggtgccccagcgaaccggtcccgggcccccagcggcgcccagttggggtggggggctccccggggccttgggaccgctgctctgctccccgcggggctcaaaggtggacgggacgcgggggtgatggtccgagaccccccgctcgcctcgcggcttccagatttctttctccaggaagaaaaatggcatccgttgcagttgatccacaaccgagtgtggtgactcgggtggtcaacctgcccttggtgagctccacgtatgacctcatgtcctcagcctatctcagtacaaaggaccagtatccctacctgaagtctgtgtgtgagatggcagagaacggtgtgaagaccatcacctccgtggccatgaccagtgctctgcccatcatccagaagctagagccgcaaattgcagttgccaatacctatgcctgtaaggggctagacaggattgaggagagactgcctattctgaatcagccatcaactcagattgttgccaatgccaaaggcgctgtgactggggcaaaagatgctgtgacgactactgtgactggggccaaggattctgtggccagcacgatcacaggggtgatggacaagaccaaaggggcagtgactggcagtgtggagaagaccaagtctgtggtcagtggcagcattaacacagtcttggggagtcggatgatgcagctcgtgagcagtggcgtagaaaatgcactcaccaaatcagagctgttggtagaacagtacctccctctcactgaggaagaactagaaaaagaagcaaaaaaagttgaaggatttgatctggttcagaagccaagttattatgttagactgggatccctgtctaccaagcttcactcccgtgcctaccagcaggctctcagcagggttaaagaagctaagcaaaaaagccaacagaccatttctcagctccattctactgttcacctgattgaatttgccaggaagaatgtgtatagtgccaatcagaaaattcaggatgctcaggataagctctacctctcatgggtagagtggaaaaggagcattggatatgatgatactgatgagtcccactgtgctgagcacattgagtcacgtactcttgcaattgcccgcaacctgactcagcagctccagaccacgtgccacaccctcctgtccaacatccaaggtgtaccacagaacatccaagatcaagccaagcacatgggggtgatggcaggcgacatctactcagtgttccgcaatgctgcctcctttaaagaagtgtctgacagcctcctcacttctagcaaggggcagctgcagaaaatgaaggaatctttagatgacgtgatggattatcttgttaacaacacgcccctcaactggctggtaggtcccttttatcctcagctgactgagtctcagaatgctcaggaccaaggtgcagagatggacaagagcagccaggagacccagcgatctgagcataaaactcattaaacctgcccctatcactagtgcatgctgtggccagacagatgacaccttttgttatgttgaaattaacttgctaggcaaccctaaattgggaagcaagtagctagtataaaggccctcaattgtagttgtttccagctgaattaagagctttaaagtttctggcattagcagatgatttctgttcacctggtaagaaaagaatgataggcttgtcagagcctatagccagaactcagaaaaaattcaaatgcacttatgttctcattctatggccattgtgttgcctctgttactgtttgtattgaataaaaacatcttcatgtgggctggggtagaaactggtgtctgctctggtgtgatctgaaaaggcgtcttcactgctttatctcatgatgcttgcttgtaaaacttgattttagtttttcatttctcaaataggaatactacctttgaattcaataaaattcactgcaggatagaccagttacatgctgtttgttccatatgctttgtgtgttgctttcgtagagctgcttaacctgcatgacagagttattatacatacatgaatttcaattggcctgttggggagtttggcagagtgagaacattagaaggctaatgttaaaaatgggatgcttggccgggtgc

SEQ ID NO: 46 - protein, 437 aa, Homo sapiens
MASVAVDPQPSVVTRVVNLPLVSSTYDLMSSAYLSTKDQYPYLKSVCEMAENGVKTITSVAMTSALPIIQKLEPQIAVANTYACKGLDRIEERLPILNQPSTQIVANAKGAVTGAKDAVTTTVTGAKDSVASTITGVMDKTKGAVTGSVEKTKSVVSGSINTVLGSRMMQLVSSGVENALTKSELLVEQYLPLTEEELEKEAKKVEGFDLVQKPSYYVRLGSLSTKLHSRAYQQALSRVKEAKQKSQQTISQLHSTVHLIEFARKNVYSANQKIQDAQDKLYLSWVEWKRSIGYDDTDESHCAEHIESRTLAIARNLTQQLQTTCHTLLSNIQGVPQNIQDQAKHMGVMAGDIYSVFRNAASFKEVSDSLLTSSKGQLQKMKESLDDVMDYLVNNTPLNWLVGPFYPQLTESQNAQDQGAEMDKSSQETQRSEHKTH

SEQ ID NO: 47 - DNA, 781 bp, Homo sapiens
cactcgggcttgggacagggcgtgctgccgcgggtcacgtgctgcggaggcttggggaggggcggcgaggcggggtttatagcccgggcgcccgcgggccccacgctttgaccgggtcgtggcagccggagtcgtcttcgggacgcgcctgctcttcgcctttcgctgcagtccgtcgatttctttctccaggaagaaaaatggcatccgttgcagttgatccacaaccgagtgtggtgactcgggtggtcaacctgcccttggtgagctccacgtatgacctcatgtcctcagcctatctcagtacaaaggaccagtatccctacctgaagtctgtgtgtgagatggcagagaacggtgtgaagaccatcacctccgtggccatgaccagtgctctgcccatcatccagaagctagagccgcaaagtgagttctgatttttcaagatgcaagtcaagggactggtcagtggcgagcccctgagctcacagcagtaacatctggaactcctcagcccttcctggggcatacactgcctttacctagaaactttcaggtgaccctcattaccgtaagaggactgtttcttttcttttctttcctttttttttttttttgagatggagtctcactctatcactcaggctggagttcagtggcgcagtcttggctcactgcaacctctgcctgctggttcaagcgattctcctgcctcagcctcctgagtagctgggactacaggcgcacaccatcacgcccagctaatttttgtatttttagt

SEQ ID NO: 48 - protein, 78 aa, Homo sapiens
MASVAVDPQPSVVTRVVNLPLVSSTYDLMSSAYLSTKDQYPYLKSVCEMAENGVKTITSVAMTSALPIIQKLEPQSEF

SEQ ID NO: 49 - DNA, 2165 bp, Homo sapiens
cactcgggcttgggacagggcgtgctgccgcgggtcacgtgctgcggaggcttggggaggggcggcgaggcggggtttatagcccgggcgcccgcgggccccacgctttgaccgggtcgtggcagccggagtcgtcttcgggacgcgcctgctcttcgcctttcgctgcagtccgtcgatttctttctccaggaagaaaaatggcatccgttgcagttgatccacaaccgagtgtggtgactcgggtggtcaacctgcccttggtgagctccacgtatgacctcatgtcctcagcctatctcagtacaaaggaccagtatccctacctgaagtctgtgtgtgagatggcagagaacggtgtgaagaccatcacctccgtggccatgaccagtgctctgcccatcatccagaagctagagccgcaaattgcagttgccaatacctatgcctgtaaggggctagacaggattgaggagagactgcctattctgaatcagccatcaactcagattgttgccaatgccaaaggcgctgtgactggggcaaaagatgctgtgacgactactgtgactggggccaaggattctgtggccagcacgatcacaggggtgatggacaagaccaaaggggcagtgactggcagtgtggagaagaccaagtctgtggtcagtggcagcattaacacagtcttggggagtcggatgatgcagctcgtgagcagtggcgtagaaaatgcactcaccaaatcagagctgttggtagaacagtacctccctctcactgaggaagaactagaaaaagaagcaaaaaaagttgaaggatttgatctggttcagaagccaagttattatgttagactgggatccctgtctaccaagcttcactcccgtgcctaccagcaggctctcagcagggttaaagaagctaagcaaaaaagccaacagaccatttctcagctccattctactgttcacctgattgaatttgccaggaagaatgtgtatagtgccaatcagaaaattcaggatgctcaggataagctctacctctcatgggtagagtggaaaaggagcattggatatgatgatactgatgagtcccactgtgctgagcacattgagtcacgtactcttgcaattgcccgcaacctgactcagcagctccagaccacgtgccacaccctcctgtccaacatccaaggtgtaccacagaacatccaagatcaagccaagcacatgggggtgatggcaggcgacatctactcagtgttccgcaatgctgcctcctttaaagaagtgtctgacagcctcctcacttctagcaaggggcagctgcagaaaatgaaggaatctttagatgacgtgatggattatcttgttaacaacacgcccctcaactggctggtaggtcccttttatcctcagctgactgagtctcagaatgctcaggaccaaggtgcagagatggacaagagcagccaggagacccagcgatctgagcataaaactcattaaacctgcccctatcactagtgcatgctgtggccagacagatgacaccttttgttatgttgaaattaacttgctaggcaaccctaaattgggaagcaagtagctagtataaaggccctcaattgtagttgtttccagctgaattaagagctttaaagtttctggcattagcagatgatttctgttcacctggtaagaaaagaatgataggcttgtcagagcctatagccagaactcagaaaaaattcaaatgcacttatgttctcattctatggccattgtgttgcctctgttactgtttgtattgaataaaaacatcttcatgtgggctggggtagaaactggtgtctgctctggtgtgatctgaaaaggcgtcttcactgctttatctcatgatgcttgcttgtaaaacttgattttagtttttcatttctcaaataggaatactacctttgaattcaataaaattcactgcaggatagaccagttacatgctgtttgttccatatgctttgtgtgttgctttcgtagagctgcttaacctgcatgacagagttattatacatacatgaatttcaattggcctgttggggagtttggcagagtgagaacattagaaggctaatgttaaaaatgggatgcttggccgggtgc

SEQ ID NO: 50 - protein, 437 aa, Homo sapiens; identical to SEQ ID NO: 46

SEQ ID NO: 51 - DNA, 2226 bp, Homo sapiens
cattctggttgaacagaacgttttgtcagaacaattatggctttcttcctgaagtgtgcttggccggaaaagaaagcaggagacctcaagggctaataatctagcagtggctgacactgaaatgatgcatggaagaaaggctaccaagcaagggaggtggagagcagtttgaagcaactggggtaaagtccggagaagaagctggtgagaaagagacaggagccagatgctgaatgacgatttctttctccaggaagaaaaatggcatccgttgcagttgatccacaaccgagtgtggtgactcgggtggtcaacctgcccttggtgagctccacgtatgacctcatgtcctcagcctatctcagtacaaaggaccagtatccctacctgaagtctgtgtgtgagatggcagagaacggtgtgaagaccatcacctccgtggccatgaccagtgctctgcccatcatccagaagctagagccgcaaattgcagttgccaatacctatgcctgtaaggggctagacaggattgaggagagactgcctattctgaatcagccatcaactcagattgttgccaatgccaaaggcgctgtgactggggcaaaagatgctgtgacgactactgtgactggggccaaggattctgtggccagcacgatcacaggggtgatggacaagaccaaaggggcagtgactggcagtgtggagaagaccaagtctgtggtcagtggcagcattaacacagtcttggggagtcggatgatgcagctcgtgagcagtggcgtagaaaatgcactcaccaaatcagagctgttggtagaacagtacctccctctcactgaggaagaactagaaaaagaagcaaaaaaagttgaaggatttgatctggttcagaagccaagttattatgttagactgggatccctgtctaccaagcttcactcccgtgcctaccagcaggctctcagcagggttaaagaagctaagcaaaaaagccaacagaccatttctcagctccattctactgttcacctgattgaatttgccaggaagaatgtgtatagtgccaatcagaaaattcaggatgctcaggataagctctacctctcatgggtagagtggaaaaggagcattggatatgatgatactgatgagtcccactgtgctgagcacattgagtcacgtactcttgcaattgcccgcaacctgactcagcagctccagaccacgtgccacaccctcctgtccaacatccaaggtgtaccacagaacatccaagatcaagccaagcacatgggggtgatggcaggcgacatctactcagtgttccgcaatgctgcctcctttaaagaagtgtctgacagcctcctcacttctagcaaggggcagctgcagaaaatgaaggaatctttagatgacgtgatggattatcttgttaacaacacgcccctcaactggctggtaggtcccttttatcctcagctgactgagtctcagaatgctcaggaccaaggtgcagagatggacaagagcagccaggagacccagcgatctgagcataaaactcattaaacctgcccctatcactagtgcatgctgtggccagacagatgacaccttttgttatgttgaaattaacttgctaggcaaccctaaattgggaagcaagtagctagtataaaggccctcaattgtagttgtttccagctgaattaagagctttaaagtttctggcattagcagatgatttctgttcacctggtaagaaaagaatgataggcttgtcagagcctatagccagaactcagaaaaaattcaaatgcacttatgttctcattctatggccattgtgttgcctctgttactgtttgtattgaataaaaacatcttcatgtgggctggggtagaaactggtgtctgctctggtgtgatctgaaaaggcgtcttcactgctttatctcatgatgcttgcttgtaaaacttgattttagtttttcatttctcaaataggaatactacctttgaattcaataaaattcactgcaggatagaccagttacatgctgtttgttccatatgctttgtgtgttgctttcgtagagctgcttaacctgcatgacagagttattatacatacatgaatttcaattggcctgttggggagtttggcagagtgagaacattagaaggctaatgttaaaaatgggatgcttggccgggtgc

SEQ ID NO: 52 - protein, 437 aa, Homo sapiens; identical to SEQ ID NO: 46

SEQ ID NO: 53 - DNA, 1987 bp, Homo sapiens
atttctttctccaggaagaaaaatggcatccgttgcagttgatccacaaccgagtgtggtgactcgggtggtcaacctgcccttggtgagctccacgtatgacctcatgtcctcagcctatctcagtacaaaggaccagtatccctacctgaagtctgtgtgtgagatggcagagaacggtgtgaagaccatcacctccgtggccatgaccagtgctctgcccatcatccagaagctagagccgcaaattgcagttgccaatacctatgcctgtaaggggctagacaggattgaggagagactgcctattctgaatcagccatcaactcagattgttgccaatgccaaaggcgctgtgactggggcaaaagatgctgtgacgactactgtgactggggccaaggattctgtggccagcacgatcacaggggtgatggacaagaccaaaggggcagtgactggcagtgtggagaagaccaagtctgtggtcagtggcagcattaacacagtcttggggagtcggatgatgcagctcgtgagcagtggcgtagaaaatgcactcaccaaatcagagctgttggtagaacagtacctccctctcactgaggaagaactagaaaaagaagcaaaaaaagttgaaggatttgatctggttcagaagccaagttattatgttagactgggatccctgtctaccaagcttcactcccgtgcctaccagcaggctctcagcagggttaaagaagctaagcaaaaaagccaacagaccatttctcagctccattctactgttcacctgattgaatttgccaggaagaatgtgtatagtgccaatcagaaaattcaggatgctcaggataagctctacctctcatgggtagagtggaaaaggagcattggatatgatgatactgatgagtcccactgtgctgagcacattgagtcacgtactcttgcaattgcccgcaacctgactcagcagctccagaccacgtgccacaccctcctgtccaacatccaaggtgtaccacagaacatccaagatcaagccaagcacatgggggtgatggcaggcgacatctactcagtgttccgcaatgctgcctcctttaaagaagtgtctgacagcctcctcacttctagcaaggggcagctgcagaaaatgaaggaatctttagatgacgtgatggattatcttgttaacaacacgcccctcaactggctggtaggtcccttttatcctcagctgactgagtctcagaatgctcaggaccaaggtgcagagatggacaagagcagccaggagacccagcgatctgagcataaaactcattaaacctgcccctatcactagtgcatgctgtggccagacagatgacaccttttgttatgttgaaattaacttgctaggcaaccctaaattgggaagcaagtagctagtataaaggccctcaattgtagttgtttccagctgaattaagagctttaaagtttctggcattagcagatgatttctgttcacctggtaagaaaagaatgataggcttgtcagagcctatagccagaactcagaaaaaattcaaatgcacttatgttctcattctatggccattgtgttgcctctgttactgtttgtattgaataaaaacatcttcatgtgggctggggtagaaactggtgtctgctctggtgtgatctgaaaaggcgtcttcactgctttatctcatgatgcttgcttgtaaaacttgattttagtttttcatttctcaaataggaatactacctttgaattcaataaaattcactgcaggatagaccagttacatgctgtttgttccatatgctttgtgtgttgctttcgtagagctgcttaacctgcatgacagagttattatacatacatgaatttcaattggcctgttggggagtttggcagagtgagaacattagaaggctaatgttaaaaatgggatgcttggccgggtgc

SEQ ID NO: 54 - protein, 437 aa, Homo sapiens; identical to SEQ ID NO: 46

SEQ ID NO: 55 - DNA, 38142 bp, Mus musculus
  misc_feature (1)...(38142): n = A,T,C or G
gagaaattaggtggaggggtggttctctgttcataggcaatacaaaggttgaaaaagacacaagcagaaagtgtaacctgacagctccttgtcacaagtagtggctgaaatgctaaacagtaagccagcctttcaaatacccatttcttctttttttgttttgttttgttttttattttttgttttcttgttgttgttgtttgttttttttttttttttttttttttttttttttgagacagggtttctctgtgtagccctggctgtcctggaactcactttgtagaccaggctggcctcgaactcagaaattcacctgcctctgcctcctgagtgctgggattaaaggcgtgcaccaccacgccctgcttatcttctgactctaaaggaaacacttcgttttaaagtcgcctcttttctaacactatttggcagttgctaggcacccaaggtgagaggagaaactggtttctagattaagctcaaaggttccttcctagtgcaaaggatttcctgagcactccggcctgttgggttagaagtgatgtttactgtagcgattaccagaggtgtggccagcttctcctgtaattcataaagctgcagcaaaccttccactttataaatctgtctctctctctctctctctctctctctctctctctctctctctttctccagccagaattgccaggacaatattaatgtgttttcccagataataagtgtccacacagacaaaactgctttcagcatactttagactagcaacaactgccccttttttgccctctgatttcaagtcaacagttatattagaaatcatatgttcacacaaactcaatgtagtggtgctgccttagaggtctatgtgttgatgcatgtagagtctttgatcctgtaggaagttatgaggaaagtaaaagccatgcaaactgaagtctgtgtgttcttatgctgtccggtggcaatacgggtggttagagagagcctggtatagataacaagggtgtgttctaacagtaataaactagaagggtctttgcaatgtctgtttgttcaaattctgcccattgtacatgtgtctgcagattagaggatagacttttccaacagacagcaaaaatctgcttctattcgagtctaagaatgaagagtcttgtggcttcaccaggccagagaaatttctcatggtctacaccaaaagagaagagcaggaagtcagtatacttgctgtttattgtttcctcttttctcaaatgccagaagcccacactggccctgtcctgaacccagtcggtggaaaatgcctaaaataaaaaccaaggaaggaagataaatcaagaggtgtgtgaaatgcctgcgaggtgaccctggaactcccctgaagaattgcaggccacagagaagtgttcttatatttctacacaatcaaaacttttgaaaaagttttctgaaatgtgtgacgtgaggctcaaaaataagagtgactagaatttcagagccgttggcctcttctccaaagggttttacattttttgttaagggtcgatgagcatgaaccctcaggaccacagagaaaactgatagatatgaagctcgaggctctggtctttgtgaagaatttatttagactcctgactctaagcagctaggcctttctttctgcacatttccaaggagaatttgtttatactaaggaagagaagatttttcttaatgtcccaaagaaagtgggtacctcttaggtataaacactcaggctgtccttggaacgtgctctggcctgccgcaggtaccggtaagttcagggtgacacctggggtaatgatttagacaagatgagccgggaatagcagcacacatttgtatccactagtaggctgaggaaggaggattaagagtttggggctagtccaattttatggcaggctttgtctcaataactaacaaacaaacaaaggacaaaagaaagccttttatttgctacaaataaaaaatacgtccttttaaaaccacctggcattcaatacaatagtagcaaaagagataataaaatggtaagtattaatatagatactaaaaactaagcaagaatgcatgccttcctactctgtttgaccaaacaaaacatgtctctcatttgaaccaatcaccaagctgctaacataactaagaaaaggtatgccccacttttgaaaaactgcgccatcatgacttgggagcagttcaaagactcttttgcagctctagctaaagaggaggctggctggctgtctcacagcattgagaggggactgactgggcacaagagtgctgagttccctttctgctgtggagcctggaatggggggtggaggggtaggcactgaaacaggaagtagtggggcctgggggcaggctgtgcttccttggggccctcagttctttttagaaacattgtgcttttcaacccagtattttgagtgatgctgagaaccgacttctcagtttgcctggtagcagtcctttttgaagactggccatcatacagagctggaaattatgcacagtgggctcctgtaactgcaaaaatcagatactccaggccacatgagatattgtaaagatgatatgagaaagtcagaggagaaaagtaaccagtgagctagtcccagggaccttcttggcttgttgggagcaggtcccacagaggcagaaatgaggagtgggtcaaggagtgaatgtgttgtgtggggtgtgtgggatgggagtagggaggatgtgtgtgggaaggtgaggaggtgggggtggggttttgaatcctcactgactggcagtcagagtccttctttatttatacagaactcagtaaacagggatagattcatgttgttccaaacataaattatatcatttttatctccatgtattaacttcctcttggtcataaatttagtcaatattgataaaccatgacaaaacagagttatcttttacaattgttttcctcaccaaccccataacccaatttttaagaactgagaggtgtattttgacaaaatatgacaacccataatcaggctggcagttatggcagtttcaagggcacactgcacagaaagataatcttcaggccagcctgggccattgccatgtcccaagcagtgcattatcaacttttggtggtcaaagtgctaattgtcgttaggcctaaggaaagtcttcagtccaaagctgctgcagtcattattcaatttctggcataatacaatgtttatattttacatatttttgtagaatttatttatgtctctaatctcggtattcttttgttccttggtcatacaacagcacactgtccctgaatgggctaacttttctaataaaggggagatcttaatatttaattctcttattatttttccacacattcttttcccatctacttctactgaagtccctgtatagtgtgggattaactacaaccaatctaactttgttgctgtatcttttccttgaggggcataccctatgttgcccccaatcttgtatggcactaaatcacctgatcctgtgcttagaagaagctttcaatctaatctgctgcctagtccaatagccagctgaatcttgtttacctgttaggttgactttgttctgtctatcttgttcccgggtaagtatggggaagatgttccaaaagtatcttggagtcagccttataaggaaatctctggcattttttttttttaagtcttaacctccagggagtaaggatacctttaagtagggccagataaggataactccctcaaagagggactcaaaacttttgtcaggaggcttagaagcagtactcctgggagacagaataaatgattcattagaaatttcccatcgttcaatatccctgagttgtacaaatattgaaagttgttttaagtatgcagcacgtgcagatcaataccaaaaggaagaggtggcactatggcaattgcatcatgtgggtcagttttgcagggtctttgtggagccggtgcgcctcatgacttgccactgtttgcattagctgtatctaatgccactgagctaacattttaccctctgtgcttaggagatagtctcttcttctgtgttttcttcagtgctgtggtttatacaccaactctttctctgaaagagaacttacttaggatggcctgacactgagtgataaaaattcagcacaatgaacagaaaaccaacttgacaatggtttcaaccaatacgcatccatttttctctccatgggaaacacacggaggtaaatagtcgtagacattggttcactagctcaatagctcagtactgacagtcatgacttgggattgcagtaccacaatcttccagttgtgtggtgtgtgtgtgtgtgtgtgtgtgtacatgttatttttattctctagatgtaattgtcatctcagacttactggtgaatacgctcatcctagtcctttctgaactctggctgtccagttcaactcagctgttctatctcaaaactcctctccaagctgactgatttaaactgacttctcagcttctgactgaattgctctgcttggcctccaaggaattccagcaattggttctaatcatcaggctccttctggttccctatctcattctgtcttcacttgtgtctagtttattctctctgcaacctgtctctgtaaaactgtaatctctctctctctctctctctctctctctctctctctctccctctccctctccactgctcttttaagtcacctccctttcctatcttttctcatgtgagttgggcatattctatctatgactcattctgtcaaatcgttctctgattcatcactttgtctgcccctcaagtagagctcactttcaaacatggctgtttccttctacaaactaactttacctacattgtttgggattaaaggtgtgtattaaaggtatgtctgcatcccagccagatctgatctcttgccagatagctatgttgctggattaaaattctcctaagagtgtgtgtgtgaatataggcatgtatgtatgtgctcatttaggtatgcaagtgaacatgcatgcttgctccctagcataggaaagccagaggtagactttaagtaacttccgcagtcattctccactatgttttttgagacagcctcacactgaaccttgagctcatgggtttggctaaacggactagccaaagagcttcaaagatctgcctttctccttccccagcccaccccaacgctggtgctgaagagttgccttgctgcacctggctttttatgtgaattctgcagatctgaatccagccttcatgtttgtgaagctggaactaggtccccagttgcatgaacttccattcttagctgttgatttttttttcttctcaaacctgtgagatttcgttgtgttgggatttcatctttctactgcctcgtagacatcactgtctgcacattcaaagcaggaagttagaaaagggtgcagacaggcacgctttcttgttgcatctgctcttttagacagctctctagctgtgcacatgcaaattttggccaaaacaaggtcatattactatgcttagttacacctaaggttggaaaagcagtattgagtttttacagatgcaatagcaagaagtctgtgagataggagattgggaagaaactctttaaagtgaattaatgggggcatgcctcacatatgccaggaggcactcagcaactctccccgtagtcctctaaaagaaattgtaggttaggtgtctagtctccaagaaacccaggacaagccacacacagtacccagtacttctaaccccacccctgacctaaacctctctagcccaaacgctggacttcacttccctctccccagcttctcttttctatataaaacagccatgttggccatgtgctctcttggtcttctcttggctcttctctctcgcttggcctcttggctcctggctagcttccctcttggccttttggattcttgatctcttgttctgggtctcctctcttcgtctgcttgccctctcctctccctcttctcctctgctctcactttgcccgtctcttctctcatggcctgattcagtctagaccctgccaggtgcctcttgctgatctcttcctcatgtctacactaaaacccttctcctcagttatacacaggagccatcatgtcctggtttttcattcagtgtggctttcctgtctcacagataactgactgtgaggtgggggctaatgtgacacaatcacacatcagcatggcagatgagaggggtatgcaaggcaaaaacaaataatgcgtttcttagtgtcagtctgatatgtaaacactcggaatccccttcgatgacctggttatattatagccaaccataaattaaattttatattctttcacctatatctctctataagcttgggtttttttcttcttttgtttatttgccaaagactaatgggttgctagacacttgtctatggggtaggagatgtgccagtgagggaaacagttgttcttccaggagtaaaattagacaactgaaagaatgtgtgtgttacacatttattcacatatgaacttcttaaatctcatattaagtccccttttgtgctcctacaaccctgctgcatcctttggtaattacaatcacaatttcaataattatctgtggagatcgtgtccccttatatttatacattttgcaaaaaaaaaaccataatgtatatataaaacatgtgccttgagtatatataatttatagtgagctctctagataaacactatggcaaagaaaaaagttagatatgggtctgtgtggagacagaggcctggagagtcatgcggggtaaagggtactgtctataatctatagattgatggggagaatacagaactctgtgctgtagctacagacgctcaagcgtctgctttacaggggaaggaaatgcctaaatacagtgtgtgctactcattgttgtagctcggccatgctcgctcgcttgctcgctctttcttccttccttcctttctctctttctttctttctttctttctttctttctttcttattttttttcatgctctgtttctaagcttgtaattttttttatttagccgtattgatttcctctaagccatgttgagtgtggccttcagactgtatctctaatcctgagcagcaactccacatatattttagctttatattttccaccctcatcccagatttttttctttaatttaaaatccatcctgagagtacagtgggcacaagcacatacttggagaatctccactggtctggctttagaagacaaagcactgatcattcattctcttctgtattggctttacaaaatttctatcattggatttttaaaatatattttgtttattttccttctaattttattagcctatagaacctattccttcccccttaatctcctaattagcctgattagcaggctacaatattgtagacctcttggactgcagatatagcctggttggtaaagtacttaggaagcatgcgcacagctctgggattgttccccaacactgcggaacctggtgccgcaagcatgcctgtaatcttagcatttgggggtggagacaagactagtcaaagctcaaggtcatccctggctatatagtgagtgtgaagccagactggcatacaagagctcctaactcaacaaataaaaccaccgaacgaacgccgtttattcccccattaaaatctagactaagccacccctgccccaccccccacacgcacacgcatgcacgcacgcacgtccgatactgtaatctcattgttcatcttgagaactggcacaacatcgatactgcccttacagtgcctcttcctcagtggatacaaggtccatgggggcaggtgctgtgtctgcctccctcggggcaatattttactgcatagctatatcttgggtatccacagaagcactcggaaacacttaactcccaagcatcctctgcctccagaggactatggcagtgccttggaaggaaggatgctctgcaggtgatatctgaagctttgtccagatccttcctcagaaatggaaggttcactgccattccctcccagccagcaggagcgcagccagtaatcagcctcagctgccagtcttctagtgggagaggctaaaggtatggaagccacaaatcatgtcctgttctggcttgtattcagtgctgggaagttgccgcttcacttcctatacccatggaggacactctacaaagccatccccactttggagcaacttgtgaggttgacatgtcttcacaatcagatctagctacctctcttttatcccagaggtttatcccagcagcacttctcaaggactgtttccatcacttcataatctgcttcctggtaagccagcctggggcacatggagtctcaactacaacaaaatctgcaaaccgcatggtgcggtctctcctactctatattcctaaacagcaaagtacagtaatttatccttgtgccatacaatgaccagaaatgcctttcttgaggtgcatatcagatgcacacccaaactcttattccaagtactcacatctgtagcaccaagggtgagacatttgctgtatacctttttcagaaatgcagaaagttgaagtctaacctgaatcatatgtactgaaactgaacctgcacaaggtcaccaagatttatcctgacgtcaaagtctgagaaatgctgggctattagcataattaattcgttaattaatcaagacaaataacaagccttagctggtaactccaagtctgcagaatgtcttcataacattttgcttggaagactcagagaatgtcatgccagtatctctctctacggtatagagcttgcattctaggaagcagagaaaatcaaatcaatatgcatattgtaggagggggtgcaaatgtgttattaaaaataaagtggagtaaagagaaggggagagtgtattgcattcaaattccttgcagacatggtgataaaagagagctgaggcgagtgaggcagcacaagagtgttgtctatagtaagtgcaaggtcactaaagtgaatttaggggaatgagagagatttaaactaaccggtgcggtcagagaggcaagagggacgatctcttgatgaaacactacttagtgatccgccctttgacatttcatcattaaaatgggcatgtgctttttgtggtggtagtttgtttttgctaagaataaagtgctagccaagcacattggatttgcgttgtgggagtctgaacaaactgtcttgaaaaccagaagtttaagttccgcggacaaaactggtgggaactggagaaggatttttgtaacttctctaacacctcaggctccaacacgcctcatgctgagggatgagataagcatggtgtctggttgtggactgaggcaaaaatctccaaccccaggttactacataaccagaatgaggaactgaggaaggtagtgtcaggctgaagaaggtaaggttccggtcagagtttcaagcgtatccacagtccaggtcctgaatagagagaagagcccacagtttcaaacctcaggctagtccaccccttctccaacgtagtgaaacttctccgcccacgcagcgcactgcctggctccccagtccagacctcgcctataaccgtgtcgtagtccactttagacccgccaagacacgcctccttgtatagaccccgcctcacatcccacctctactcccaacctccaatcaactctaagagattgcgtattggtcccgcctctctggccagacccccgccctgagtccgcccctgaagagctgccttttaaccctttgccccgtgaggctccgcctcccacttaagccacgcccctcagtcccaggctggtctctcaagctttggttttggccccacccagctccccggcaggccgcttgcggacttggcgactagtctgcggcggacgtgacgccaaggccccgccacgggcagcgcgggtcccctgtcagaggtgtccctcgcgcaggaatgggcccgcaggcggcagctggcaggatgattctgctggtggtcctgatgctgtctgcgaaggtcgggagtggagctttgacgagcaccgaggatcctgagcctccctcgggtaatctctccgagccgctgcgggctggggcgggaggccaggccggaggcgccgggctgggaagtccctgcgttcctgctgcgccgccctgggcaaggcagccccaaggggccccgggggctccgcggtttacacgccgctttcgcctcttctttgccgacacaacacaaatctgtggtctgttttacagttagtttccacggcagcgtttggcattgtgtgtatgacttacagactttattttcaatctgtagtcggaatcctctgaaggaaaaggggtgccaacggatactaagagattctgatttgtttgttagtctggcgtttaagtgttgagatgcaagggttcttctcgtagcttaaatcctcagagcctttgatttcaaatgattatatattcccaggacatatatgctgggaatagttcctctttatgattagagctctagagacagcaataaaacttttcatgcccttccagtccctaatcgtaagtatctgagaagttcccaatctccagctgctggaaggcatggggagacctctttaactctcaggcgagttccagctctgaacccctcctatggtttccaggagcttcagttaggcgtgcagattccaatcctgccttgacctgattttcacagtagctaggatgtaaccacctagatgtcagatgaaggaaatgaggtgcatgttcaaactgaagttccactgagctatagagaaaaatgaaatcataattgcagaacagtggaatcagaaaaagtgttagttgtgttacacagccagattaaaaaagacaattaccatgttttcttatgataaatcaaccccagagaagtgtgtgtaggaaatcatgagaggggaggaagagatcttgaggaagaagagtttaaaacaagcaaaagcagggtaataaaactcatgggacattaatgtagaagagaggactcttgggggaggcaggtgaccagaaacagagagccaggagcaactaaggaatgaatcagaagcaataatggtatgtatgcaatatgtatgaaaatgtcttattaaaatcttgtgctttcataatttaaaattttaaattaaatataggatgcatgtatggaaaaaaattaagcaaacaaatccttagacatcccttaggatagacatggtaccaagggctaggtagatgaattatagttatgacttactgaatgctgggcactgtctattttcacataacagatctatttctacagtcacctctactaaaagtgccaccggtatctgcatccatggtgaggcacacggggctgcccaagtggtaggagccacttactaggtggtagagtacaaattcttaaccatcccactgccagcaattaccagggggagtcgcctgtccctgttgtccattgaagtacactgtgatcagagattgaatttactttcaggctgctggaaatcaagactgggtacctaacctcattcaggggactctgggaagactttttcagagagatgtagcttagaaccagaggcttagagagaatgtgcttgcagggatatgaagtggtatgttcagctagtgggagagttttaacagactgtgtggcaggagagaaataggaaaccactggaattcttgttgtgtattaatatcaaggaatggaaatggggctttaattggcttaacccaaaacagaaggttattggttcagagaatgagataccagcttggcttcgggaagttggaacacaagaaagctaccactgatgagcagtggttgtgcacacctttaataccagcacttaggaggcaggggtggtggatctctgagttcgaggccagcctggcctacagagtgagtcccaggacagccagggcttcacagggaaaccccatctcaaacaaacaaacaaaactgaagaagaaaggaggaggaaggaggaagaggaagaggaggagagaaggaagaggaggaggaagaggaggcagcagctaccatgtaccattttttatttctagttgtcctggttattgacagattccctatttggcaggaatggtgtgtgctggtagcctttgggttttaaaatcttgcaacttcttctgtcacaacaaaaccccagaggaaggctcatttccctagcttggttgggtgccaaccaagtgggaaggacattgttgaaaggtgtggtgtggaggaattctcagaaggagaagcacactgttcctgaacaaagttcagggcccaagccaggaatctaatgtgcccagcatggttggtgtcgctgagtggtgtgcaaggttagagaatgctagttagaagtgccaggcatcatcatattgagtagtttaagggagagagtccattagggagctcaagtgtcaggagatgccatgaggagtggctgtgtaatggaggagaggggaaagcttgcaggaatattgaggaggtggggtcagttggactctgactgggtgtgggtggagagaggaacacagctgcctggcccagggcagagccttaaacctagtgccaggtacttccctctactttagatcctcctctgtgtgacctcatagtttgcacccgctatggtaacacctatgcccttctgtgttgtaccccagcactttataatgcatttccttagatttttgtcgtgttccctctgctgtttttatttgtttgtgtattctgtcttgaagtggaatctcatatgtagcccaaacttgcttcaagctgagctccctggtgcagctccctgagtgctgggattattatagccccaggccagaacaccaattccttttgcttaaagtgaagattaaagtgtaaacttctgattcacagtctctacagattttgaaagatgacattttgattctaaaacaaacaacatcaacaaaacctcttagagattgaaagcacataaaagtttttaaaaactgatatccaaaacttagcaacacacggcaacagtgtaaatttttacaaactagatgagcaataaatggctttgtcataattgttcgaataatgagaatgagattttggtcagaacaaagtaactgcttgagagcaaggagttagtctgtgtgcaattttcttgtgaaaggggaattttactttagctgtcccagggattcataatcaaaatgcacagtatccattttttcctgtccaagttacagatgtttcttactgtaatttattattctgtttttgtactgtatacagttgtgatggagccttaaaatctagcattattgcatgagatagatgtttgtgaaattatcagaaaacagttatttccacttgtactttatatgttgagcttacatccctcattttattaaacagttgcgatgctgtttaattaaaatgaacaaaacgttgcacactgtcatctttacctcccttccctaaagctttgttttctccttgataaaatatgtcccgtaactatatgtcattcccaggatgtgctcaatgtgggtgtcatctgagatgtgctctgtggagcttgctatgtatgaattactgtcacttaacgcacatcattacttcaacaaatagttttaaatattagaatattttagttatgtatgaagatgtgcattggctttttgaaaaattatctagatcaatataagaaatgtaaaattcattcaagagcaaacactcatttttctacaagtcacatggttttttttcttgttttgtcttgtcttaaactggggctggcttacagggtcagaggtttagcctattatcttcatggtgggaaacataacaatgtgcaggcagacatggtgctggagaagaagctgagagttctacatcttgatccacaggtagcagaagtgaatgccacattaggcctagcttgagtatctgaaacctcagaacctgtccccacagtgacacacttcctccatcaaggtcacacctattctaacaagaccactcctcctaatagtgtcattccttatggggcaagcatgcaaacccaagcctctatggagaccattcctattctgaccaccacatttcacttcctgagccccataatgcagaaatgcattcaatccaacttgagaggtccccactagtctgtaacagtctcaaccctgtgtaaaagctcaaagacttctgatattgtcggcagtctcttaactgtgatcccctgtgaataagactgaaaaagcagatcacatacctccaacatacagtggcacaggagaggcatcccattccgaatgggagaaaagagagcatagcgggaaatactgggccaaagcgagactgaaaaccagcaggctgaactccacacccagcatctccatgtctgacgtcaaagtgctcttcacatctccaattcctctcagctttgttggctgtaacacacctctctttcttgggctgtttccactctctgatagctctcctcagcaggaatactgaagcaaggaagacgtgttttgtctcacaatctcaggggtgcaatctatcacagtaaagagggtatggcagcagagagtgggagtcgggttgccacagtgagctcacagtcagatccatgagacagggagaatgctcagtcttccttcttcccctttctcatttagttcactctgggaccccttaaggcagtggctctcaatcttcctaacactacaaccctgtagtacagttcctcatgttgtggtgatcctagccataagagtgttttctttgctacttcataactgtaattttgctagtgttataagtcacagtgtaactatttttggagactgagggttaccacaggcgtcacgacccaggggtagagaactgctgacttggagtgacacctcctacatccagggtgggtcttccctcctcagataaactgtcccagaaagcgccctcgcagacacatgcagaggtgcctttcctgggtgactctaaatatattagaggacagtagagattaactaacagctcatatcatgactacatttgcataatccaaagagaatcagaactctcctgtccattttccataaaaacacatcctatacgtttgctttgattgaaataattcatcacctgctgcaactgacttcctcttttatgcgcatgtctgtctttctaacgtcatctgatcaggttttctgttattgatgttggtttcttactgtggtccattttgtttctgaatctcttacagtgcctgtaccgacgaatgttctaattaagtcttataacttgaaccctgtcgtatgctgggaataccagaacatgtcacagactcctatttttactgtacaggtaaaggtgtattcgtaagtatcattcatttattatttctcttctgttttcatctgaatccttgcacattccgtcatccttccttctgtgaccgctcctcccactcgctgaacttgtcagctatctgtagctgtcacaaagatgctaaggatgctgttaatagtgaagtggagtttgtttgtttaatagtgaagtggagaaacacgactaacttccaaggtttctctctagtctcttagtaaactaggatttattaaggaactaagattttttttttattatatgtaagtacactgtagctgtcttcagacactccagaagagggcgtcagatcttgttacagatggttgtgagccaccatgtggttgctgggatttgaactccagacctttggaagagcagtcgggtgctcttacccactgagccatctcaccagcccaaggaactaagatttattaccaaggaataggtatatcgggtgatggcagtgagggcagacaccacttgacagtagtttagcagtgtcttgtgtaagaaggaaccaacctgaagccatttttgaataaagcttccattttgaataggggtcaaataaagtttaagtgtctgagacctccctgggtaactgacgcctgctcggcagggagagatctgtaaatgaataactgacatcctggttgagacacgaatgttaggcaagtcaccccgccactgttgaataaaccaaccaatgagacgaggagaagcataccgcagagaaatgttctgagaaagtgccctatcattaaatccttactggtggaaaatatgtgactgacttgtgcagatgtttgtggtttgcaagcttaaaagctcaaacattctggcattctcgagatctcagttcagctcccgagtctgcgctgcatccctgatcgatcagtagcaccttgatcacaacacacttttctattctgcattgacctggcgtttgagttgtgttagacccaagcagaccccataacactagaaataaatacttacagctcaagtggactcagatggaaaacaagacttcagtgtggatttgtcttctcatgatttaattgaggttgctaaaaggcagtctttatatctatcatatagatcatggtcaatgactgtcccagatttggtgtcatgcagcctggtcatgtgacaaaggtgttagcattcaaatctgtccattgcgttttcttctaagtaaataatctgtggacagaactccatgaggtcgtgaataccctgttcctacacaagtccacagatatttcaagagttattatagctctgtcagagttacccttgctgcaatgaagcgtcatgaccaaagcatcatgggaaggaaagggtttgttcgacttaacacttctaaatcactgtttatcagaggaataggtcaagacacgagcttaaacagggcaggaaccaggaagcaggagctgatgcagagaccatggagggtacagtttactgccttgctcctcacggtctgctttcttagagacttcaagaccaccccagtgatgacaccacccacagtggactgggccctcccccatcaatctcgaattaagaaaacattaaaactctgaacactgaggtaggcagagaccctcatacataattaatgtgaatgcaaaatagatccttgcatggggaaagaatatgtatctgacagaacttaatctgcttgccttggcacatttttgtggtgctgaatatcaaacccaaggcttgataggtactaggcaagctgtctacttctgcgtcacacccccagctcccacgtcgcatttgtgtttgttgtatgcatgaatgtatgttcatatgtatgcaggagtgtatgtatgtgtatgcacatacatgtggaaggtgggaacgacctcaaatggattcctgaggcaccatttgccccagagattgccaaacaggctaggtgggctgtccagcaagccccaggcatctgtctgtctttgctttattagcgctgggaccctgtgagcatgccaaacctggaggggggcgtggttttgttttgttcttttgttttacatgggctctggggcttgaactcaggccctcatgctctccatagcaagcacttgattggctgaactgtctctccagccagtgtttgcctttggatctgttgattccatattaggagcttaccggaaagatacacaacttgagactgaataggagagtgagcacacagctgctacagaaagggattaacgcagtagctttgtaaactatgaaggggtgttctagggagctagatgtagtgatttccaggctttgttgtaaattaaagtaaaaattaagttctgtaagacataaggcacatgcagtgtattcctttggggaagaaatgaatgagatgagctgttggtgttgtctgagtgtgtaaacagcacaggaaatgaaaaccccgaagccagcacatgagatcagcttcctaaagaaatgggtaacaatgttgtgggaactgataggaagaacatcttgttttcttttgagaaatcctgatttcagggttaagccaaggaacaaaatcaagatttttttttaatggagatttcagagaatttggtctgtttggtttgaaggatttttgttctgtcttttttgggctgaggtccaacttgttcaaataaataggcattctgtgtccaagcaacagccccccgcctgcaaagacagaaagttaattagaaagtttcccaagtggctgacagatgctggggacatgttgaagagatccaataggcatcttgaagtaggctcgtattggccaaaggatgggacagcgtaagcagcaatatcaataagaacataataataagaaagaaacccatatctatattttcattaattaacaatgaagttgggataatgaaaagttcttgtgtggacagggaacttctaaagcattaactgtggcaagcgaagctgccaccccagctatcgtcttcctgtaatacctgtaacatttactaggaagataatttaaaaaagaaaacaaaacaaaaactgaccacagtgatctttgtaatgtatttgattttgtaattgaatcacatctttattaatagaatccatcatggctttttaagcagagttcaaaatttaaatatgaaatatactgtattaatcctgtctcttataaggaatttacagcaagggttaagtacaccttatctcaaatgcttaagacaggaatatttcatatttcttggctttttcagatcttgaaaagctctctctcacacccacaccacaccccatatatatatacacatatatatattatattagaagtgggagttgggttatatatactgtacctacatatagcctgaaagtaacttgtaatttttatgttgtttgatccattctttaaattgaattttttgtaaacagtaaacccagggctttgtacatgacccacataatttaccatccagctacttccctagcctatgtgatattttgaataacgaatttcatacaggaaacaaacaacttttcatgatgtagcatttcctgtgacatcagatacatggtcaaaaggcatggattttagagccatttgaatttcagaggctggaaatgtacctctaattgaagaataaggtctcttcctttcatctggcgtctttgtcctgttttaatccagcccttcaaagaagctaactggatggaaatcaagacatgggtggatagccaaagtctgtgtgataatatgggacagcatgcatctcttcccttttgttttaggggttcctggactgattcctgcaccaacatttctgatcattgttgtaatatctatgaacaaattatgtatcctgatgtatctgcctgggccagagttaaagctaaggttggacaaaaagaatctgactatgcacggtcaaaagagttccttatgtgcctaaagggtaagtagattgtacacataagtaacttttcagtgagtgtgtgtgtgtgtgtgtgtgtgtgtgtgtgtgtgtattggtgctttgtccacatgtgtgtaccacattcatgcagtaccttcagaggccagaagagggcgccaaatcctgtcactgccattactggtagttaccaacagacatatggatgctgttaaccaaacctgggtcctctggaaatgcagccattgctcttaaccactaagccttctctctagctcctacatggatacattttaattttgaagtacttacacttccctgtatgcttgcttttattggtagttgtaacaagtgtctaacagcatatgacaatttaaggagccaatgtctttcttccaggccttagaaaacatcactgaactggccttcagtttgccactttaaaactgcttatcagccagttcattcaggtcctgaccagcgctgctcagtgctggaggacatctgcctttctctccctatctactgtgaaattcatttcaacgttacttcactgaggacttggccactgggctcattccttctaccttccttaaatccttggagaccttggaagcaaaaataccaacatactacatgaacacttttagagtttaagcagactgtggtggtccatacttgtgtaagggagcaggcaggaggctcaggtggggaccattaggagtttgtgaagtgtttgaagccagcctgtctaaggagaaacagatgtgtagagttctttatgtctgagtccaaggctttcagctctttgcactcccagcatcctaccctataatttactggtctcagctctcacttccaactgcagaatactgagtctcagatctctgctgtggtgggacatcccagctcaggctgtgccctagcctgctggccctcatggcatcccttccagcttcccttcctagttcaccctctatgactctcacttcttccatgtttcgtgcctgtagggtccactgccttggttctaccccagcttttggggtaccccgggtttttccgtgggcccttcctttacttaatttaggtattttttattctctggatccatctgatatgtgccatcatcatgtcagagttgcccaccacagatttatcaaggacctactgtgtcttggagagtatgctagggatacactgaagcgtcaacaccagacctgagtggaagagtgtatgtgcgcagtgcatctgagaagcatataccagtgttcaccaaacaaccaaacacaccagagacccagaatatgtccagactacttgagtctgcagttctggttttcagagcaaagaagtgaaccattagcaatcttttatagaaccatcccaccagacatccatggatgttaaagacgttgggtttcagtgagaaaaataactaaggatcgttctaggagttgtacagatggctcagtggttaagaccattggctgttcttccagaggacctggttcaaatcccagcagcacctatatggcagctcacagccatctgtaacttcaggtccagggaacccaaaactttcttctgacctccacaggcaccaggcacgtgcatggtgtgtagatacacatgaaggcaaaatactcttacacatagatagatagatacatagatagatagatagaagagggccttttcagaaacagtttttagaaaacaggtttcttaagctacaaaaataaaggagaaggtatttccttgggtgtctattttgtatgtttatgtggtagtcaggtcctggggaatgaatcttggaccttacgttacttggcaagtgctctaccattgagcaacatctccatctgctgttttgatcctgacactaatttgcctaggctgctttcgaaccgttttcagctgctcttctactctatcctggacaaccagtcctgcctttcatcttcgaaaaagcaacatttatcactaatcatactttcctaaagacaaggtcagaggtgaagttcaatcaccgaggcagagtgtaggtaaagagcttcttgtctgagatttactaagctttgtattcttagaatgtcttggagatctttgcagttgtttaaatgtacccattgatttgggtagacttcgtagctgtgctgggaggagttacactctccctttctctccaggaaaggtcgggccccctggcctggagatcaggaggaagaaggaagaacagctctccgtcctcgtatttcaccctgaagtcgttgtgaatggagagagccagggaaccatgtttggtgacgggagcacctgttacacattcgactatactgtgtatgtggagcataaccggagtggggaggtgagtgcgtctctgccatcttccttaaaagtaggaattggtctattgcttgtgcaagctagtctcataagttgtagtgaaagcaggccattcatgtggatgcagataagactcatgtgtcatagattctgataagaaaaaaaccaacataagtactattgaagtgacccaaaatggacttaattgccaacactggccagatgaatgcacttacggtttttctttgcctgtttggtctcagggccctctctagaacattactctctctgtatacccatttcttttctggtaagatgaatatcatcttagggtttttcctttcccttacttataattaatatgcagaatgtaaaataatatacaactgtgatttcagttatttttgaaagataagctgacagtacatctacagtgccacgactatattattctggcagcaatatggagtccacactttgattcaaactgtgctccctccattctgtgcattgctttttgtaagtatagtatttattaagtccatactatgggccttctaagtacctagaactacggaagtgaacagtacagacagactggggaaaatcccagtgccgcagcctatggggatgggaaccctccaggaaagctgggaaccggggtccctgctagggttggaggctgatccctgcagctatgtcgaggggcatcatttgaagcctaggaccgaggaaagacagaggtgcagttggcatacaggggacagcagcacagggccagggggttggggagagaggtgccggggcagagggaggcagagcaggcattggggagcttcactagtgttcttctctccggaagtgctgctcgcccggaagtgctgctcgcccgcccgtggctcactggaagcaacctgcgcttccccagaatgccctttaccgttttcagtctgttcttcgggtcaggggttgtcacctcctcttcgtagtctttccacactgggcaggttacttcatttcctgtggtccagttggttttcctaggattccccgtgcagtactcctcactttctgttacgctgtttcttacctcttgtctgcgctagattgttagacactaaattaaatggacgctggagtacaggtgtcggtcatccttaattcacctgaacactcaaggtgacaacgaggggacgtttatttagctcagctttagagacacaaagtgtgctgtttgcatctgctcagctctggagacagcagacagggcatcatagccagcaggacttgtacaaaccacggctgctttttctcccattcttctgctggcagccaaggcatgcacaccaaattatacaccatttttcacaagagatttcacctcaaaccagagcagaaacaggagaggtatccttgtggggtgggggaggggtctcaatacatccaagcacatgacctaagggacttgttcatgattgacacatccctgtgaccacagatctgacaaacaccataacggagtaaagatttattttgactttgagtttcttagggcccagtccatggtcaccttgctacatatccttgggcaggacaccatggcggcagcagtgtgtggcaaaggaaatgagagaatgaggcaggcgaggccaggacaaggcaccctcaaggggtaaacttcaagtgacttagaccagattgaaacctcctaaaatattactaccaactgaagacccgtaagggacattttacactcaaagcttaacttcccactgagggactgtctcttaaagacctcagccaggtgcaccctcagacaccagccctttaatacactgcccttccctgcgacctagccaagctacaacactgtctttgtgtgtccgggccccagcacaggactgagctctgactgtacaaggtactacaccagccatggttatgtgtttactgcacagaaagcctgtggccttcacagctgccttcatctgcttcctgtgagatgcttctccgatctcctcagcggcttctaggactctaggaacgagaaccaagtacgggctcatccacagccagctaaaacttgcattcttcaagttttaagcaatcctgttcccatacacgtcgctttccagctgatgtactttctcagactgtgttgaagtcacaggttgactgattatatgctatcaaagctgattttaatttcatattcactctctacatgtcttcctgcagtgtttaactaggacagatgcaacggtttccacccccctggggttaaagaagccatacactttcatattgttgttttcccatttagatcctacatacgaaacatacggtcgaaaaagaagagtgtaatgagactctgtgtgagttaaacatctcagtatccacactggattccagatattgtatttcagtagacggaatctcatctttctggcaagttagaacagaaaaatcgaaagacgtctgtatccctcctttccatgatgacagaaagggtaagttcttgcctttccccaactgaagacagtgctgaggtggggcaacttgaaaataagaaagttgatttataacttaagcacgtgacttttctttaaaagaatatctagtagtccctttcctcggagaagctcaaaattaaaacaagatggtttctcaagcattgacatatactgtgttctatagcagccaacttacaaagcgcctagatggctggtagcatcttgaccgcaagaagaaaagatacacaacaaatagatacaattatctacataaatatatctattccaagtcataatttggaaatatgttaacttgagaagagtcagaagaggaccatggaaatgtctgtgggtgtaggaagcatgagcatttagaatagtttgaagtcccactgggaaagtggcagtcccagggtcccctctggctctcagggcctcatcagatgcgggtggttggccagatttccagtgccaggcgtggcttccctcctgtcagcctgtgttccataccagttcagcagctgttagttacccccaggatatcaataccatggcttcagctttgtggctgtctcacctggctggttcctgccgtgtttcatatatgtcatggttggcaggactgctgatgggttttctttctggaggcctgcagcactgggaagagtctgacctagctacgaggcacgctgagttctcacgcacactgcccagtttgtaccgcggttctgatgatcttgctgtgatcacttgctgaagagcggcagtaagacttctgatgtgcaaagcagtgtccttgacttgtaacttgtggctgttccttttctttttagattcaatttggattctggtggttgctcctcttaccgtctttacagtagttatcctggtatttgcgtattggtatactaagaagaattcattcaagagaaaaagcataatgttacctaagtccttggtaatgcacttaactatttatttaattatagatgctaacgtatcaattcaacctttgttgacaagtcccctcaccactcagtatcattggaaatgtaccctggcgaatagcactctatttaactttattgtagttctcttcgctaaaacccaccatgcgccccaagcctcatatcttgctgtgcaccgggtacctttgtataattttcagggtgaaaactgacaagtttagtaaggagctaacggtctccagggaagagatgacaatggctcagtcagtgtaagtgtgtgagaaataggttcagagccagcggcagagaccttgctgcactctgaagcgtggggttagctatgactctccaggaggccacagtgaagctctggtcctaggagcagcatgcgggagagccagggagagccagcccatggccccaaagcttccaatgcacaaataggtcgttgcagttggagtttggaagaaaagatggccctgaaggaaactgtcacatttgatatttaagtgtagtcacagtccagtctcttgaaatgatctaaagaatgcttataggtagtgtaaagatgacacattgatgcatacgtaacaagaatggtgtctaagatgctcaaggggtgcagtggcatttgctgtgacagaactgcctctgaggtggctatgaacaatcaacagcaagtggacagtccatgtgtgacccttctcactaggaggaggctaccttgtaatacgccgtccatcccatccccattatagcaggcgtgtggacccgacccacagcagtggccagacagatgtaactgtatgcaccttgccaggaaatgcaggcacagcacagcttttaatcacccttccaaacactgatcctgaggagataattccacaaataaaaatgtgtgaaagcctcaatgttttctttgtctattaaagaaaacattactgtaaaggaaggcacactcgctgacaagaaatttacactgctgtggcatctccacaggcagctagaagatggggtacagaaggtggtgtgcagttatgagatagttaatgactttattttttttaattttatttttttggttttttgagacagagtttctctgcgtagccctggctgtcctgaaactcactctgtataccagactggccttgaactcagaaatccgcctgcctctgcctcccaagtgctgggattaaaggcatgcaacaccactgcccagcgactttatatttttaaccttaaataaattctattttttaaaaaaaggacaagctgggtgtggtagctcacaactttaatcccagcactcagaaaacagacaggcaggtctctgagtttgagatggcctgccttacatatcaaatttcaggccaataagagctacattgtaagactttgtctatagataaatacacacacacacacacacacacacacacacacacacacggtggcacaataagagctacattgtaagactttgtctatagataaatacacacacacacacacacacacacacacatcaccaaggagttcagggtcttctaatgctacatagaaactttaagaccagcctaggctacatgagaccctgtccgcaaaaatcaaaatcattaagaaaagaaatgtaatgagcttattttaatcatgttttctgaaatatattatttttcccccgcacactttagacaggcattaattttagtaattttctctttattcactttcattctatttagctctctgtggtaaaaagtgccacgttagagacaaaacctgaatcgaagtattcacttgtcacaccgcaccagccagctgtcctagagagtgagacggtgatctgtgaagagcccctgtccacagtgacagctccagacagccccgaagcagcagaacaggaagaactttcaaaagaaacaaaggctctggaggctggaggaagcacgtctgccatgaccccagacagccctccaactccgacacaaagacgcagcttttccctgttaagtagtaaccagtcaggcccttgtagcctcaccgcctatcactcccgaaacggctctgacagtggcctcgtgggatcgggcagctccatatcggacttggaatctctcccaaacaacaactcagaaacaaagatggcagagcacgaccctccacccgtgagaaaggcccccatggcctccggttatgacaaaccgcacatgttggtggacgtgcttgtggatgttggggggaaggagtctctcatggggtatagactcacaggagaggcccaggagctgtcctaaggtctcccgaggcctgctggtggtaaagaaactgaccttttaggcagtttttctgcattgatttcatgaaagaagctatacattagctaatactaaccacatagaatatcagacttagatacgtgaataaggatcctgtgggcactgctgggtccactctgcaaatgccaagactatcaaaggaacgtattgtcgcttctggctccttcccaggtgggctagcatctgtgagtttgcctcggctagccttgcttcctacagccgccactgctcctccaccctgatcatctcacaggacagggtggaccgggtttttttttttttttcacacacctttgtatatgtaagttcatgtatataatatgtttacatgtttcactttgaactgaaagctactcaaagccagccgtaagtctatggtagaatgtgatggaacatgttggtggaagcttgtacaatagaacacattggtgggagcttgtacatacttttttatggagcattacttacgattttttaagtaaaatgttttgaaaccaaaactcacttggatattcatttattgaagcacacgggcaacctttcatagttatttggcatattttcatctattatttgatgatatatattaatgctttaggattatttttagcatatatatgtgtgtatatatatatttaaattttaggactaagagtaattctaaaaataatctcttttaaaatgggtcggggtggagagacatctcagtggctaacagcacttgttgatctttctgaggactggggttcatttccagcacccgaatggtgcttcacaaccatgatctagacaggcatacatatatatgtatacatacatacaggggaagcattcatatgtgtaaaatctcaaaatccttatagggcagggcacttacgtctgtttttcagtacagaataaatagctggtggataaaagcctgctccgagtagctgagaaggaaaagcagatttccctggacagtagagggtctaggcgtttcctgcagacggagggagaaagccttgagaagatgtgttgtacagaaagnnnnnnnnnnnnnnnnnnnnaaaccattcagctttgaactcaacaataggtttatcaactgataaatttaaaatgctatgtctcaaccacctcccaagatctctactggttgagtggagtcttgaccacatgatcctattggggacatttcacatgcaaaacaaagttccaactaaagccagaacacttactgttgaatatttcatattcaaaccataattccaactaaggttggaacagtaagtcattccccctgtcacatagacaactatgattagttcaaagtcttacaaacaggtgctaaggacttcctctctttttcgtcattgtctcctatgccactaagacattaattctttgctttgtccttcttatcttttaattatattcttgagttttattagggaaccataccctcccccacccacccactcccacttcttggccatggcgttcccctgtactgaggcatataaagtttgcacgaccaaaaaaaaagtaagatacactatgacaaagggacatctgcacatccatgttcattgtaattaatcaaagcagtgaacagtatctgtccactgactcgtgaatgaataaagaaaatgtggtgcatatactcaatccaatataattcaaccacagaaaatatgaaacctgttcatttgtggcaatcagtttagagactgaggtcattatgctatctgaaatatgccagatacagaagcaaaaaccctacataaatacatgaaacatacatatatacattcatattcatacatacatgcattaaaaagaaaaaaaagagagtgcttagccagaaggaacagtttctgttttacaggaggccttgaaatcactgagatagtagaaatgtaagatctgggctggagattgctgcgtaggtgcgctgcagcacacgcatgaggacctgagtttagatcctcagcacacacaaaaagctgcatgtggctgcacttgcctacaaccccaaaccaagaagcccgagaaaggaggcttcctagctcaagccgaaccgctgagctgaaaactgagcatcaagtccagggaagactaaggtaagcagagaacggttgaggaagacaccagaagttaagccctggattgcaccagtgttcgtacccacacacacatgcaaatccatgtacatgaatgattataccatgcaaaaacattaaaaacaaacattaatattaaaatgttcacctgctccaatgaattaatgagccacatttttaattcagttttttacttagtaaatgagccaaggcaaattatgagtgcaccttgactagaggatttaaggtagggcaggagagtgtgcaggctccgtgcaaatattagatgcttctatacaagagacttgagtggaccttagtggattgcaggaaccctagacgcaatcttgtaccaaggagctatttccagtattcagaacatgtccttttgcaatcacaactgagtgcattttactcctgactaactactctgatactgtttactaaggcatgaacatttatcatgttggattgccatccctctgaacaatggctgttcattcattagtcagttctgtgtgtgtatcacagttttaatctttaaagctttcttctagtgtatattagagctctcagcattgtgacagacgcctgagagaaacaactgatgggagaagagatgtatttgggctcacggctttggaagtttcacaccatggtcagcagtcaccgttgcttttaggtgtgtggtaaaacagaaacatcaggaccaatggacatgccaaaatcacgtcatgacatccaggaaacagaaaaatagcaggatgggccagagtaaaaatagactgttcacacccatgccgtccaatgtcgcccctacgctccagttccagtgttgtttactcaatagactaactcatcagtggcttaagacgttagatctgagccccaggctctgttcatctgtgggaaagccctcagctactgaggagtgcgcttcactagtctaggcatctttctactgattttttgtaataattgttttttgttttgttgtgttttgtttttttttttaattatctatgtatacaagtacattgtggctatctttcagacataccagaaaagggcatcagatcccattacagatgattgtgagccaccatgcggctgctgggaattgaacttaggacctctgaagagcagtcaatgctcttaaccactgaaccatctctctagcccctagctgttttggggggctttgtttgtttgtttgtttgtttgttttctaaggtcaactatagacttacagacttttttttctttgccagattccaccccttcccccatttgaagttctttggggatttgaatcagcattctatcactataatgcttactaataatgactaattttccatagttaaatgctcttcaatacaagtcttttatgtcccttattcgctttagacatcctaagcacagggtatttcttactacgtttatttttagcatgctgttctatgttttgtgttgacaaatggaatattctctcatattgaggtttatgaatggcttcatgtttaaacagaaatactatcacatcaagtcatctaagccttttcatggtttctgactggcttccccagtgagtatttgcgctttcacaggttagagcctttgctgggtgctgtcctcttacctcagggcagctcccctggggttccagtacagagcacagccaagccattgcttcacccagccttgccttgtaaccatacgcctgtctactcagtctgcacttcatctctctccctccttgctccttttcacggtaactcagcataaaagtggcaaaacagcggctgctatcttgccttgaaatttccttcactgagcagagtctgttactttaaaacagcctgtctcaaggtctcaggaaacgggcaagaggaagccagattctatgccacattgtaacctcatgagccagcccccaacagcctccagtctctcctcctagtcttccaaactcccaccacagctgttgagctgtttacaagtttctaagggagttttcagcctggattctcaaactcttccataatcctctcacagacgctctaaagaccataacagtcataccaacaccctcataacaacaccactctcagtaccgacttagtgacaagcatgaattacttgtgttgtagattaggcgctctgccagcctgactttgggcaactcagccacagccacttaagtaactcaccactgtcaggggctgtgcctttccaccatgcaataggagaaccttttaaagtgtgctggccaccccagatctctgtgggcatcttgcttattcattctgtctgtatctgtttctgtctccatctccctgtctgttttctatctgtctgtctgcctatttgtctgtctgtctgtctgtctgtctgtctgtctgtctccctgtctgtctccctgtctacctgtctgtctccctgtctgtctgcctgtctgtctgtctgcctgcctatcttcctgtctgtctgtctgcctatcttcctgtctgtctgtctccctgtctgtctgtctgtctgtctgtctgtctgtctgcctgtctgactgactgtctgactttctgtctgtctgcctgtctccctgcctgtctccctgtctgtctgtctgcctatcttcctgtctgtctgtctgcctgtctccctgcctgtctccctgtctgtctgtctgcctatctgactgactgtctgactgtctgtatgtctgtctgtctgtctgtctgtctgactagctggttcatgcccccactctgagacaccctttcaatctcctctgtctcccagcagatgtcttgccttcagcctattctgtggcatgatctctgagtatcacaccttggccccaaaccaccagggtacctggacagaagcggatttgggagagagtgtttgcttggcctacaggttgagaggttacatccccgtcacggaaagcttagtgggaagagctgcaaacactgagtgatagttgggaagcaggaaggttaatagaagggtcaggggcaatttaaaacctcaagttccacttccagtgacccacttcctccagcaacccccaccttcctacattatacaacttcccaaacaannnnnnnnnnnnnnnnnnnnnnnnnnnnnnnnnnnnnnnnnnnnnnnnnnnnnnnnnnnnnnnnnnnnnnnnnnnnnnnnnnnnnnnnnnnnnnnnnnnnnnnnnnnnnnnnnnnnnnnnnnnnnnnnnnnnnnnnnnnnnnnnnagagagagagagagagagaaagagaaagagaaagagagagaagaggattgaacagcattataaggagagattggcagtgtgcagggctgggagaaggttgggattcagggtaaaccagaagaactgagaagagccagaatgccagcatagactctacaacaggtacttgtgacagtgggagagcgtggaggccaccatgtgcctccatatgctaataggcagcacagtttgccttttgccccttctgccagagataaatggcccctttgatggaggggaaccagcttcaggagttgctgaggaaagctgactttttctctacctgacagaacttgggggagttttctttagacctgacagggaccaaatagtcaaacgcgtgaaccaacagggaagagttcacatagttggactaaagtagagcattccctatccaatgaaggtaagtgactcggataacaaaggcagctgctagggaggactggtgtttggggtgagcagacaggaagccactgttaagacaatttaaagcaaacatgacagaggtgaggcagtgagtggctatgtctcaggaacagcattcaagacagtggagagactgtgcctggcatggtttttttaaaatgtcaaaaaggccatgaaggtggtgagctgtagataaagaagaggatatgccggagattaatttagaagtaatgaagtcagcgtatataaagtccaataagccactgtggaaactttggctctcattctgaatgaggtgggaaggctggcatattctgagggtaatattctaatctcttgtttgagaagaatactccagttgatgcacaggttagtagcagttgcaagaagttcagtcaggtagccatgttactaccatgccaagacatcatgatagcagggacccacgtgatcatggtggaggaaagactgattccagtcaacagggccaacaccaagctcttgaattacttgtgcaaggatctaatatttgatgagaccacatagggtttccaagatcagtgaatgaccttgattaggaacaatcaaaacagcctgcctacacatgactgaaacatggataagcaagccctaaacaaggatatcaatgaacatgctaatgcagataggggttgtacagaaggcctcaaccctagccaaacactgagaaatgctgagatgggcagaacataaatttcattattcagtaccaaatagtcagctttgaaaacatagacacacaataaacagaccaaacaggttgtatttatgtatttaggaacactaatacacacacacacacacacacacacacacacgcacacatccactcacatatgcatacacgcagcacaccatgcttttaaaaaaaaagtgatcaaaacaaaatcagtaggctctcttgtgcaaaacaaaattatacagaaagagcaggaaatgttaatttcatgaagtcttattaagttttgcgaatgaagattttcaaatgttatacaaattgagtgaccttcatctgaaatggttaggaaatttcagcttctaggaaatttctacatttttgaatgttttcatgtgcaaagatgtctcagggataaagtcagagtctacacatatacatcattcatgtttcatttgtatctcaacttgaatacatagcccacagggctgtgactgtttttaatgcctctacctttgctttccaccacataagatctacatgtggtatcatcttagtgctccaaaagtttaaaattttggaagagtttggaggactaacctgtaatgtcttactctttaagattcaaatgaccaaaattaaacttaggttggacattgtacctatttattgcctgtattagagtaacaaagttccttcttggctgagttctattctgaaaacaattttaattacaaagcagttttccagaatgcagaggtgtgtgaaggtcataggcatcccctgggggagttgtgggggtctaatggatagtaaaatgcagtaagtatctgtcctgccactataggacgtgggtctccacaggtctagtgtttatgtgaagacaacagatgtctgtcaacagtggtggcagaaaggagggggagttccggagcagaaacaaggagcaaaccccacctggcccacttaggatgcacaccagcagagtcaccccaaacttcagctttagccaccactcagagggagaacactgcatatgcacatggctgtctgcttccagggccttaatatagaaaattatgttggctctactattgctgggaccaatatctagttcatttttgcttcttcatggctagacagtacctacacccaacaggcatttctttgagtgacgtcttagagacaaatggccattctttgacatctttctagccctttgtggaatgaatactccgaatgaagactgaaacaacagcaatcatataattgccttcacactgtgaaaccagccagatctgattttacaccctcctcgtttggtgacagattactacagaattctgaccaaattctctcagcctctccatgcctcagtttcttcatgtgaaatatcaagatgaaaataccaacttcctgggccaagagagagtttcaaacaaaacaatgccaagaaaatacttaacagtagacaacaactataatgtgttattattgcctttccatgaccctcactattttgaaacatacctcagatatcatgccattttaatctgtaatacttcaatacatccctctgaaaaggaacaaagataataataaaccccatgtcacataggaaaataaggttttttccttagaagaattgttggtcttcggggagctacagcaggaagaatagacttaagtctgtccaagtcagcagcttgggcaagttctccagtctcagggctgtgttgtcatagtcaagctggctctccctctgaggggtggcaggtagggaggagacgacagagtgtgtgtctgaagctagcatttcttgcctaagtcgaagagagcagaacgcccccactaactgattaatgttctattcacacaagatgactttacatttcatttgcaacaaccctgtacatgttctttggctgccacgttattgtgaaaataggtgtaatttgtctttttgtctactcattgaattgctagagacggggctttacacaggttgtagtatnnnnnnnnnnnnnnnnnnnnnnnnnnnnnnnnnnnnnnnnnnnnnnnnnnnnnnnnnnnnnnnnnnnnnnnnnnnnnnnnnnnnnnnnnnnnnnnnnnnnnnnnnnnnnnnnnnnnnnnnnnnnnnnnnnnnnnnnnnnnnnnnnnnnnnnnnnnnnnnnnnnnnnnnnnnnnnnnnnnnnnnnnnnnnnnnnnnnnnnnnnnnnnnnnnnnnnnnnnnnnnnnnnnnnnnnnnnnnnnnnnnnnnnnnnnnnnnnnnnnnnnnnnnnnnnnnnnnnncccattcactcactcccaccccacccctctagcatccccctacactggagtatcaagtctccctcccctcctattaatgtcagatgaggccatctggtgaggatgtggagaaagaggaacactccaccattgctgatgagactgcaagctggtaaaaccactttgaaaatcaatctagaggttcctcagaaaattggaaataattctacccgaggacccagctataccactcctgggcatatacccaaaagatgctccaacatgtaataagaacacatgttccactatgttcatagcagccttatttgtaataaccagaagctggaaacaaccccgatgtccttcaaaagaagaatggatacggaaaatgtggtacatttacacaatggagtactactcagctattaaaaacaatgacttcatgaaattcacaggcaaatgaatggaactagaaaatattatcctgagtgaggtaacccagacccaaaagaacacacatggcaagtactcaaagctttggttcttgagagaatgtagttcttatatacattttgttctacattttagatattaaggattgaaaccagataggcgatactctgcactgagctagagtcccagccagaattcagttcttaaaacatttcaactctttccctacctcctaacttatttgtttcccgaagtcagtaactgaacagaaaccccaagctcattctttgctgctcagtaccctgaactcaagtatttcccctttctccttgaactagaactgggaataatttaattgcttcaaaggtagattcatcagtgtcgaagatattgaatatcacctgtgttcaaatccagatgatcacctaccacttaaaaagcagggctggtgcaaagtttcaaatccagggagccacatcagtaacaagtgaagggggatgctggaaagattggaagacaagggtcaccaagatcatgggaaggaaacattgcatttgctgcgactcttcttcagacaggcaacgttctatctaagggcagcttcacttggagaaggggagggcctgaattcagaagtctgacaagcacagggagatgaaaaacatggagctatcatcacacattttccatacactcttgtataggtgtaaatattctaagtaaaatgcatagttcataaactgtgcagcacagctgtttttaaataaccgtcctgtgtatcagcactgcacgctgcccttgcagttctgtagttgggtttcccccggcttcctacagctcatcttagctgatccactgtggcaaagggtaagacaagacccttaagacgcctttcagctgccttatggaacgctttctttctcatttaagatagagagaaagagacagaggagacatgggaagaaagtcacaacctgatcttgggtcagctctgtctacatccctgaccccgccacaattaagcatctgaaacttcagggtaggctctgacttatttgctgctcaaaacaatgcctcctctatggtagggaatacatatttgacaaaaatgaaagaacaaatggacgaatccatggatgagtgggttaattaattagcactattcagcagcaattaccaatggggcactgttaagaatttgaatgattaggcctgtacagtgaagaagaagtcgga

SEQ ID NO: 56 - DNA, 2072 bp, Mus musculus
ggccgcttgcggacttggcgactagtctgcggcggacgtgacgccaaggccccgccacgggcagcgcgggtcccctgtcagaggtgtccctcgcgcaggaatgggcccgcaggcggcagctggcaggatgattctgctggtggtcctgatgctgtctgcgaaggtcgggagtggagctttgacgagcaccgaggatcctgagcctccctcggtgcctgtaccgacgaatgttctaattaagtcttataacttgaaccctgtcgtatgctgggaataccagaacatgtcacagactcctatttttactgtacaggtaaaggtgtattcgggttcctggactgattcctgcaccaacatttctgatcattgttgtaatatctatgaacaaattatgtatcctgatgtatctgcctgggccagagttaaagctaaggttggacaaaaagaatctgactatgcacggtcaaaagagttccttatgtgcctaaagggaaaggtcgggccccctggcctggagatcaggaggaagaaggaagaacagctctccgtcctcgtatttcaccctgaagtcgttgtgaatggagagagccagggaaccatgtttggtgacgggagcacctgttacacattcgactatactgtgtatgtggagcataaccggagtggggagatcctacatacgaaacatacggtcgaaaaagaagagtgtaatgagactctgtgtgagttaaacatctcagtatccacactggattccagatattgtatttcagtagacggaatctcatctttctggcaagttagaacagaaaaatcgaaagacgtctgtatccctcctttccatgatgacagaaaggattcaatttggattctggtggttgctcctcttaccgtctttacagtagttatcctggtatttgcgtattggtatactaagaagaattcattcaagagaaaaagcataatgttacctaagtccttgctctctgtggtaaaaagtgccacgttagagacaaaacctgaatcgaagtattcacttgtcacaccgcaccagccagctgtcctagagagtgagacggtgatctgtgaagagcccctgtccacagtgacagctccagacagccccgaagcagcagaacaggaagaactttcaaaagaaacaaaggctctggaggctggaggaagcacgtctgccatgaccccagacagccctccaactccgacacaaagacgcagcttttccctgttaagtagtaaccagtcaggcccttgtagcctcaccgcctatcactcccgaaacggctctgacagtggcctcgtgggatcgggcagctccatatcggacttggaatctctcccaaacaacaactcagaaacaaagatggcagagcacgaccctccacccgtgagaaaggcccccatggcctccggttatgacaaaccgcacatgttggtggacgtgcttgtggatgttggggggaaggagtctctcatggggtatagactcacaggagaggcccaggagctgtcctaaggtctcccgaggcctgctggtggtaaagaaactgaccttttaggcagtttttctgcattgatttcatgaaagaagctatacattagctaatactaaccacatagaatatcagacttagatacgtgaataaggatcctgtgggcactgctgggtccactctgcaaatgccaagactatcaaaggaacgtattgtcgcttctggctccttcccaggtgggctagcatctgtgagtttgcctcggctagccttgcttcctacagccgccactgctcctccaccctgatcatctcacaggacagggtggaccgggtttttttttttttttcacacacctttgtatatgtaagttcatgtatataatatgtttacatgtttcactttgaactgaaagctactcaaagccagccgtaagtctatggtagaatgtgatggaacatgttggtggaagcttgtacaatagaacacattggtgggagcttgtacatacttttttatggagcattacttacgattttttaagtaaaatgttttgaaacc

SEQ ID NO: 57 - protein, 477 aa, Mus musculus
MGPQAAAGRMILLVVLMLSAKVGSGALTSTEDPEPPSVPVPTNVLIKSYNLNPVVCWEYQNMSQTPIFTVQVKVYSGSWTDSCTNISDHCCNIYEQIMYPDVSAWARVKAKVGQKESDYARSKEFLMCLKGKVGPPGLEIRRKKEEQLSVLVFHPEVVVNGESQGTMFGDGSTCYTFDYTVYVEHNRSGEILHTKHTVEKEECNETLCELNISVSTLDSRYCISVDGISSFWQVRTEKSKDVCIPPFHDDRKDSIWILVVAPLTVFTVVILVFAYWYTKKNSFKRKSIMLPKSLLSVVKSATLETKPESKYSLVTPHQPAVLESETVICEEPLSTVTAPDSPEAAEQEELSKETKALEAGGSTSAMTPDSPPTPTQRRSFSLLSSNQSGPCSLTAYHSRNGSDSGLVGSGSSISDLESLPNNNSETKMAEHDPPPVRKAPMASGYDKPHMLVDVLVDVGGKESLMGYRLTGEAQELS

SEQ ID NO: 58 - DNA, 42027 bp, Homo sapiens
agtccagtttaaatcaggggatatggctcagcacctgtgtaaggctcctgtccatttcatggcagttaggaagtcccccaatatcttgtgaccattatcagatttgcttgtcctatgcagtctgaggagctccagctggtgattctgctgaacaccagctgtctgagtctcagctttagccccatgaaataaccaaagttaaagtcaggaatgtcaaagtggagtgggcctgtgtgtgaaatgtgctgggattcagggacagacgaaagagaaagaaaatgtgagcagacaatgctgagcaaagagaaatactagccatgatttatccaacatgttctctgtcccaggcactgaacaactcatatgccttcactgaaccctcacatctactctactgaggtgagtattactgcgattcccaatttacagatgaggaaagtgaggcaaatggagatataataacttacccaatgttctaaagctatgaaatgatggggctgggatttgaacccagtgagtctggtttcgcagactttttttttctttttagagatagggtctcactctgttgcccaggctggagtgcagtggtgctgtcatggctcactgtaaccttgaactcctggcctcaaaaaatcatcccacctcagcctccagagtaggtaggactacaggtacatgccaccatacctggctaatttttttattttttgcagagacgtggtctccctatgttgcttaggctggtcttaaactcctagcctgaagtgagcctcctgccttggcctcccaaagtgctgggagccactgcacctgcacccagccaggcttctcatactcttaattaacctctgcattccctgacaaagggactagacatgtgcattatcaggaaaaggtatcctttctcttggatgctgctgggaacacagtaaacaattttgcttccctgaactccacatttttgccatgtttccatcctaactatccctttttggtgtagttttctaaaaaatatgcttatgtcctcagataggtcccagttaaattgttcctccctgctctggcctaaggaatagtgttgccctcgttctatcttgatcttaataagtgagctcttacagtcttctatcagactgctgataaccacaaatgactacagaataggatagaggtacaatgactgtggctggcccgtgcaggacctaataaaaggcaaagccaggagaagcacaagctgaccgtgcttagatttgtcacatgcaattattggaatctaaagctgtaagcacgtttttcaaaaatacagtcattgcttagtagtccataggaaaatacacactttctaaaaatgtctattttattttctctaccactattcagtggttgctaggagcccaaagtgagagtagaaagtggtttcaagattcagttcaaaggtctcctcctactctaaaaaatttcctaaccactcctcaccactttgagtagaactcactgctccttgtggcgttcttgccagagctggcccaaacttccattacaagtcaaagaaataaaactgtgatgccctttttagtttacaaatctctccctctctctttctctcatttgctattagagaataagctctctttaaatcacagaggagcagggaggtgatgtagcaaataataacacagctaacatttatctaataacacagctaacgttcatctaataacacagctaatgtgacttgtcaggcagaggactacagatttttcataattatctcatttcaccttcacaaagatccgatgctgtgtacattattctatctccactttacaagtaaggaaactgaggcacagagaagacaagtcccttgccctagatcacatgataaagcagtggtggtgtgagccctaaatgcaggcagtccagcctcggggacttcatgctcgatcacggtgctgcacagtctcactcacaaaatgcctgactgactaaagactgtcttgctcactcctaaccagcaactaggatttctgtgacaaaatgaacccatttctcagatgatacatttccatgcagatacagttatcctctatgtaatctggagtagtaagaaattacattttcatttttgtttgatttcttgtccgaaaagacatattataaatttttcattcacacaaatggagtgtatttcaattctctttttaaaggtctaaatgttagcaagtatacattctttgaccaaagtattggttgttataacttgatgatgtaggggacaagagattcttttctcactcactgttaggttcatggccaaggcacctataacaaaagacagattaacaagagaagcgcatacaaatgtatttaatataagtgtttttttatgctgaggtttgacgaagagtgggcagccatgcagaagtgtgcttggaggacaaaaggctgtgatccaatggtcataaactgaggggaatttagcaagcctgcttgtaagctacttctctgtgtccctgtgtcatcagagattaaaaaaaaaaaaattccttccttcctgacatagaaagggcactctgtaatgtggccttatgacctctttcagataaaggcccaagaatttatttttgagatggagtcttgctcccatcacacaggctggagtgcagtggcgggatctcgcctcactgcaacctccacctcccaggttcaagcaattctccttcctcagcctcctgagtagctgggattacaggtgtgtgccaccacacctggctaatttttgtatttttagtagtgacggggtttcaccatgttggccaggctagtcttgaactcctgacctcagatgatccacccacctcagcctcccaaagtgctaggattacaggcatgagccactgcgcccggccccgatatttcttttataacctgcttcaggggagaagtgtgggaaaaagtcagagagtcaccttctcacttctgctgtttctccaaatgcctaagtaccatattttcgggtagcatgttctaaatcccatcattgacaaatgcctacaagtaagaaccaaaaaggtaacaaaaatcaagctgcagagtgtaagacagttgagatgataggcgtgtggttcaactgtggaattgtgggccatagagacaatatttttacgtttctgaacagttagggttttctgagcccattttactgaatcttggaatctaagctaaaaggacaagcctggtgttaacttcgaagtgattagtgagaatgccagagaaatttacctccccaaagatacctgcgttttcatttcaaggaagaattaaacccccaggaccatggaaacatctcctgggatgtaaagccagagacactagtctcatctttccagtggggaaatttatttacattccaaaagctaagctcccagaatctttctttctgttcccaaggagaatgtgtttataccagggagcaatggatttctcgtcttttctcacagtgggaggggaaagttggccctttctcctatataaatgcccagattcattttggagggtgtcctcacttacagtagacaccattacatataggatgacatgtgcagcctacatgtacatctgggtctcattgcatagccccagagataagaactgggacaaaagagagctgacaaaattatttgctgtaagtaaaaaaaaaaaaaaaaaagaaaagtgttctgctctagaaatctagtattggcattcaagataatcacattaaatatagatacttaaaacttaacaggactacgtgccctgcctagaaccaatgaaaatggaattctctctgctggctaaacaaaacacatctgttggctgaatttaggctctgagcctgccttttgaaaaatgagccatcataccatgatttgaaaggcacccaaaagacccttttgcccaaggcaaactatcttattgtatcctttcttgtcaagacctccagtgtcaccactggacacattggttcttctagttaagaactgttcgaatgtcaaaatatctaggagtgtccaccccaaaatggttatcaaatattgatgtcaataaattaatttgttcaatttgttcatctatcattacccagagccatctaagagcatctgctacggaaccattgacctagatgttgatgaaagataaggatggagagacactttcagctgaagccttgtgagctagggaagtttttggtattctccaagtaggaggactctgggcttctgagaagcagcaagaagtcactgggctttggtgtgtggtgaaggaagtacggagactggagggggaagatgcactgaaagaggaagtatgaggctctgaggacaaactgcatgctgctttagattactcagttctttttagcaacagtttttttcagcctggtgtttagtgttatattgggaaatgttttctaaaagaatagggtagctgccctttatgatgctgaaatggccaaaaatttcatggctagaaatgaaattcattgtgctttttttttctttttcttttttttttaagacagagtcttgctctgtcacccaggctggagtgcgatggcacaatctcagctcactgtaacctccgcctccccagttcaagccactctcctgcctcagcctcccaagtagctgggaccacaggcgtgtaccaccacacccacctaatttttgaatttttggtagagatggggtttcatcatgttggccaggctggtctcgaactcctgccctagtgaccacccacctcagcctcccaaagtgctgggattacaggcgtgagccaccacacctggcctgttgcgctcttttagttgcaaggaacagagacatttaggttacctttagtgacaagggatgttggtgaagatgtgtgggaacatcagaagaggaaagcctcgccaatgagctagtgcccagggagcacagtgagggagcactattcggggcacatggcagttctgctaagcctctggctgctgggcctcttgttctcccctcaacaagtgatcttctttgcttactattctagtcttctacatcctgtacttgagtttgttgtttcttcttttctcctttctcccttccactcagtcatcctcttctccatcatggtttacattccaactctctgaaagccaatctatttaggttggcctgacattgagtaaaaaaaaaaaaaaaaaaaaaaaaaatctgcacgattaacagaaaatcgaactgatggtgacttaaatcaacaggggtttatttttttctcccataggccaaaggcaggtggtcatagacattagttcagaaactcaatgctgacgatgattcaggctttctaacttcctgttcttccactggtagctgttgacttttcatcttcaatcttgttgcctcatggttgcaaactgccaagatctgctgcagatctaggcgtcactggatctacattcaaggcaagaagattggaaaagggccaaggccagcaaactctcccattgcatctgccccttctatgagaaaggaaaagttctcacagaatgctttccaatcctcttccccattatacacctgatgaccaccacacacacacatgcctcacagacttctgcttgtgtttcgctgaccaaaactacatcatatacctacacttagctgccaaaaaggctgggaaagtgagtaatgagcctgtctagcctctgcagtagggaggcagcaagatagaaggggaccgaaaagagctgttagcagtcagctaatgagtagtatctgccacagtcaccacgcagcatgtggcatctaccctaggcagtgctctaagacaagccaactactagaatacttgactgtctatggataaacatcttcaagccaggggttggtctgatacaatcggatgtcagcatgagagctaagaggagggttgagtgcaaggcaagaggatagtgctttgttgagtaccagtatgatatccaaatatctctctaaattcttatcagtgacccaattatagcttagccagccataaattcaactatacctgcttcagtcccacacctctttacaagcttgttttgttcatcatatatttatttaataagtggccacagacattggttcagctgctcaatgctgacagtgatgattcaggattacatacaattgatgattcaggatcatcaatattccataaatattaatggagtaataggcacttggctaggtgctcggggtctgacagtgaagaaaacaaatttattttttagaggaagagggagactactgaaacaaaattttctacgtgtgtatatacatattttatgtatgcacacacacacggatgcatttcattaaatctcagattaagtccctgtttacgcacctataatcgtgttgctctccttggtaacaattactacaatttcagtaattatttgtgaaatatatatatatataaaatgcatatatttaacacatacaatttattcatatttaattcaaatttaatagatatattaaatttccagtagaatctccagatagtagtaagtactatggaataaacaaagttaaataagggccagtgtaaaggcatgggtagagtgtgagagggcaagagtattggctataatttacagactaatcagcggaatttaaactatatgcttcagttacaaatcttcacgctgtctcctttaaagggaagctggcagacatttctgctttggagaaaagaggaaggaaatgcactgtgctcagagccaaaatgcacagtttgttccacacacacaggctctgttctcattggatcatatttctagcttcttaaattgttttatttggcctattaacttgaaaggcaggtgagtatggtcttcaaaatgtagccttgctcctgagcagcagcacttcagtatacacttggctttggaatgatctacgctccaccccaatttgttttcttcattttaaaaactaatctgaggctctagtggggaccaacgtatacttggatattccccagccattaggcattggaaatttatcaaggaaagctggcaccgctcatttgtttctgtgttagctgtatgagatttttatatgggattttaaaatacagtttattgctcttcttcctacctctcttattagccggtggccacccccatcttttaactttattcaggctaattttaccttatccttcaggtcacaacataatggtaacttccttaaaaaagaatttccctaaatccagacacagtggctcacacctgtaatcccagcattttgggagcctgaggcaggagaatcatttgagcccaggagtttgagaccagcctgagcaacacagcaagaccccagctctataaaaaatttaaaaactagccgggcataaggccaggcgaggtggctcactcctgtaatcccagcactttgggaggccaaggtgggcggattgcttgagctcaggagtttgagatcagcctgggcaacatggtgaaaccccatctccacaaaagacacaaaaaaatgcctgtggtcccagctacttgggaggctgaggtggaaggatggcttgcgcccgggaggtggaggttgcagtcagctgagattgtgccactgtacctcagctaggtgatacagtcagaccctgtctcaaaaaaaaaaaaaaaaattagccaggcatggtggtgtacacctgtagtcccagctatttgggaggctggggcaagaggatcatttgggcccaggagtttgaggctgcagtaagctatgatcatgcctctgcactgcagcctagacgacagagtgagaccctgtctcaaaagaaagaaaaaagaaaagaaagactttctttaaaatgtagactaagttaaattcctgtttatactcctttaatctcttcccattgctctccttgggaatgatgatcacgatttcagtacttgtgtaattccttgtttaacagctatctccctcagtagacagtaagctccgtgagggcaggggccatgtctgtcttgctcaggtctttatctctgtgcctggtcatgtcagtcacagacagtatcacttgataatattcacccaattaataaatatatttagtctccaaatgactaactagcaaagtcttcagaaggatacgtagggtggtgggtgctgtgattgtgaaacttgcccagatccctctcaggaacagaagactgggttctgtccccttcctgatgctaggagggctgccagtagacaccctcaaccgtcagcgttcctctggggaatgcctccatgaaagaaatggacagccccaaaatcatgacagttggtattcaatgactaatcagtgctgggctttaagacccagcccctcataccaactcaagacacctttacaaggccatcccaactccagagcgccccttgggagcctttactgggatggcatcacagatcaacttcttcctccgctctgcttcctccacctccccttcacagacgtttattccaagagcactccctaatcaatcaatgccttataccttaatctcgacctcagagtttactgccagggtaacccagcctgtgacaagtaccacaaaaatgtttacaaactggatatcatattttgtcctactccatagacgcctaaacggtaaagatcagttatttatccttgcatccttacaacgactagaaggtgtctttcatatagtggacatcagaaacacatcaaaggaaatattctccctaaacttagtctagattgagctaaattcttctgattcaaagtgtggtcctgttgaaaggggcaccagcatcccctgtgcattttgtccgaaatacaaaatctcaagacccaacctgaattagaactactgaatccaaatctgcattttatcaagatccccagatggttcacatgtatgttgaagtttgagaagtactgagctaagagatttattaatacaagtaaaatgatctggctgataatacctctagtttatatagtgtctttataaggattttccctctttaaaaattttccttaacactagtaatcatgcagtctttcactcaacaaatactaattgagtgccaagtaaagatgtcagctctacggagcttacattttagaaggagaagaaaacaaatatcaaggtgtatattatagtgtacagcaaggtgaaaagtgccatgaaaaaacagtagggcggggtaaggaggaggagaaggtgtgttgcaatttaaaatttttaacaaaagttcatgatactcagagaattgaaacaggtgagatcattagacattcgcatgtttgagcacaagcgctgaaggacttagcaatgtggctgcagtggaataggagagatgcaaaataacagacaaacccagagaggtaagagagcagacctcttcatgagaggctgcctgataaactgatttgacactgaattgctgagaaggtaatgcaaatagtttttttctccaagaacaaagtagttcttggtcaagccgatttgatttgggctgtgggaatctgcacaaaccatttcactagctaagtctcaggttcctcaaatgaaaaagcagggactggaaatggcttttgaagtctcattctcttctaaaaatgtcaggctccaagacaaccaggtgaagtccaagagttagtaaaataaggattgtggctcggctgtggcctaatgcaaacttgcacaaccccaggaaaccgaaaaaaactggaagaagaattgcagaatggggtgccaggttgaaagaccttaacctttgcactcaaattcctcccacacccagaagtccaggtcccgaccgcacgacgccgtgctcactgctgggtgctgcgcctgagtccgcctcctgcggcttcccggacttgaccccgcccacgccctggtcccgcctcctgccgacgccggcacagaccccggtgacggaagtgacgtaaggccggggctggagggcagtgctgggctggtcccgcaggcgctcggggttggagccagcgaccgtcggtagcagcatggctctcctctttctcctaccccttgtcatgcagggtgtgagcagggctgagatgggcaccgcggatctggggccgtcctcaggtaccgtcgttcgcggcagggctgcggccgggtcgggacgagagggagggagggatccgccccagccgggaagccccgccccgcttctccgaggtcgccctagcccgggacccctgcgtcgggccctgagcgggcgacggggacgcgaggtggggtcgcgagactggggctccgtggtttgaactcgtcggttgcctttctcctgcctcttccctggttgccgccacaacaaatcacgccgcttgtttttccgactcttgtaatccacttttaaatacgattatgcgctgcagaaggacgttgctggtcaatgtgggacagcgtggtctcaaagattataatatcgtcttcttactgtacctttttttatggttagatacgcagatactcactagtatgctacggttgcctgcagtgttcagtgcagtgacaggctgtacaggttcatgacctaagagcagtaggctgtgtcatctgggtttgtctgggtttctactgcccgaagaaattgcctaaggggacatttctccatttctcagaacggatctccatcgttaagtgacgcatgactgtgagtgtcctgatcagcatgtggcatcgtggtctcagttcgtggcttaaatacttctttcttagcgggggtggggggggggactcaaagtgcttagggtaggaaagtatgcattatgtcgccagctgagaagtaagtggcagctgagaagtaagtggcagtccgtcttaggtctcagtctggaagtggtggattgccggcactcactagcagatttggcagtaggtctcttcgtacgggtttgttcttcggagcattttatttccacctgcttattgacatttcctagaaaacaaatgttgagggtggcttttctgaagtgcagagtaattgtgattacgagctccagagaaaacagtaaaccttttcaattcagttttcttttttttattatgatttatgattcatagggactttgaaaggtccacgttttggttctgtgttcacaacaatcttctggagtaggcgttatttgtctctctctttatggacgagaaattgagttacggagaggcctgcccaactggcagagaggtcatagccactcagtggggagctgctcaatttggctccagagtccaagttcttaactgctcttctaggctctagtcagtcatccacatgggcagttgcagtactttgcggtaagagcttgcacttaggcacagactagtggaaagcaaggcggggtgcttgtctcttttagggaagtcagtgaagacttcacaaaggtgaccccagtgttggaaccagaggtgcagagactgaggtgcagaggtgtgatagcatgttgaattcgtggaatattaagcgttctattgtaaagtgtgtgtgagagcttacaaggggaggagataggttaggtggagaagtaggaaccaaataatgaattgccatattatgtgtaccagcaagaaacctagctttattaacttaagcaaaaagaggaatttattgtctcagaaaaaccagagttaaacagaaaattatagatgccagctgggtctcaagaggctagaaccaggaacccaaactgctaggactctccatttcttatttctgtctgggtattgacagctttccacacttggcaggaatcatggatgctgacagcttctgagttttgacatcttgcagcctcctccattctaacaaaatgccagggaaaggctctgatttgcccagctaggttcaggtgccagcttgcatgggaaggacattctcgtagagggttgggttgggttaccagaagaagcggaatggcgtgcctgaagtacaggtgttgagccaacaaaataatacacccactatgccttgctgaagtcagtcattatttactaatgctgacatcattggattatcaattacaaagggaaatgattttatgcaggatcagacatgccatttagaaagaccagtcatcttataaaatagtttgagggtaaacacaaggcccattaggaggctgctgcttaagttggagtcgataagtagtttaagtggagaagaggacagttagcagaacatttagaaggaagagttagtaggcctctgactggatgtcagcagagaaagaggataacgctagcgcaggcatagcgttaaagcaagtgccaggcccttccttctgaatacggggccctatgagtgcaccgtgtgacccctgtgagtgcacaatttgcacgtccttgtagcttgctctgggaggaggattgcctgtctgcctcccgtgggaagatcaactgcagccttctatattctgcagaaacttttgaatttgtctctgtacctctcgttctaaaactggggtcacttttgtgaagcctttcctgactcccctagaagagacaagcaccccggccttgcttttcattagtttcagtgagccctctttttaaagtgcatttctaacacatttctctagatttttcagtgcatttctctagattttgttgtgttccctgttcttttaaagttaatttaaaacacaaaatctccaaagtaggaagaaaccaacaatgctctggctcttgcttagcttcccagccttattcttactgttgctgggcttgactctatagttgaagttcatcttagatgagaggacctggtaagaacagggaagcagacaagtgaatatggtgatatagtcagtctccaggaaatccaggtgtttaggaatgtattgtgttacattcatgggctttcattaatacttcttaagtgaaaataaaatctgtgtgtgccacttaatcagtagtatttcactcttcatgcacttttacacataaaagtagtatatatttttaagtgaatcagggtgtgccactggctttcttcatccagatgagtgtcccactctgagtaatagctgaagagctaggctggacttcacaccaactggaaggctcttcactgaccttgtacagtttatcagctatgcttcctactaattatctgactttaggataaagctctgagtactgtttaaatttttcactatttctttggattctatagttatttcagagattcaaaatacacaggataatactttttaattatatttattgaatagggtattaaattttctttttcattttattctgattcataattcacacagactttgaaaggaccatattttggttctatctaaaagaaaacctaggctgggggcagtggctcatgcctgtaatcccagcacatcggcggaaggatcactggagcccagaagttcaagaccagcctgggcaacatggcaaaacccatctctacaaaaaaatacaaaaattaaccctgtgtggtggcatgtgcctgtagtcctagctactggggaggctgaggtaggaggatcacttgagcccaggaggtctaggctgcagtgagccatgattgtaccactgcactccagcttgggcaacagagcaagactctgtctctcgtgtttgtgtgtgtgtttgtgtgtgtgtgtgtgtttgtgtatgaaaacctaaagaaaagtaataaacagctatcttacaaaatttggcagcataccagtagtgaagttgctttacaaaccagatgagtaattaatggttcaattttgattgaacaaagaatcagaatgaggtttgaaccagaatgaagtgaattcctaacagaaaggaatttacttgtaattttcttattaaaggggtgcctttattttagattatcctaatgcatagtaatcagaatactaggtatctgtttaggtcttgtgtatttttaagaaattattcattttaatgcattgttcaacttttgcagtggccataatataattgtgataatgtaataaaatcaggaaacattacctgaagcagatgcttttgaagtcaccagaaaatagtcttctccaattccaatttaaatatggaggtaatttaccccttattttattaaacgatcacaaagatgttggaagcatttttcttaatgaaaaccaacaaaactttgcatattgtcaagttacgtaacttctctaagcctttgttttctcattggtaaaatatgtatggtaacattgtctccctcacgggatggatgtgatgagtatctgaggtaatgcattaaaaaggtaagcacactgtgtgtcttgtagtaaatacttaatatgttagggattattcaataatgtgcattattattttaacaaatatatctttaaatattaaattcccttagtcatatgtgagaaattgtgttggcttttaaaaaaacaaacttaaccagatcagtatgagaaacttaaaacaggctcagcagctaactcattcttccatctcttccaacagacaaaaaagtttggttttttagtagactggaaaggcctgcattgttttttcatttcctcaactgtttttcaattcagaatgagttagtccaaaagagaattagtgttgagaaatgacttctctcagggactagattggtctggtccagtcagaactaatgccagaccaaacccaactagatgaaattggataaataggagtaagaataaagccctggatttcaagtcagaaaagtggctgagcagatatttattggataagccccaacttggtggtggtgcgagggaaaaatataggggaggttagttacttacaagttcactgcaggccactatgtgttatgcctggctctttaaaaagaaaaatttcaattagaagatttcaatgaacacttgaaacatcacctgcaagaattatcaaaatgtctgtactcagcttaaacctgggggatgcggctccttgctacggtgaaagttggaaagcattaagaaaaatagtcattttatcaccactggaagccattcgggagggagattgtaatcaaatatgttctgacaaaaatacaaaggccttgatttggtacttttcatttattcagtgtggatttcttatgctggttctgtttgctgtgcagatgaaacctttgtgacagtccccattcctgtccctgtatctttaacatggggaaggtgttagatcttctctgagagttgttcttaaggaaaagatccagatgctttaatttgaaacatttgtttttgagttgtagtgtcagatgacttagaatccagaacaacagtttacttcatcctcacttccttatgcttctcagcgtgctcttcccatgaagaggttggtgagcaggttgtcagatgatttctgcagagtccatagccctgttccaccatagatgtacaaaccttttatacagtctttttacactagtgtgttaagatgggtgatgaactcctcgggctgtccttttttaaagagacacagatgcttttggtggttacaggatggactcaggtagcagccctggttcctgtcacccagctatgcagaggaaatggccagtgtcttcagactatactctgcaggtatctgtagtttgccatccaccctacattcaccaacatttattgcagagctatcacgactgctattttttggtcctttgtgacattgttatggtcccgtcgatagcactgctctgtatcacctgctgatcttcactggtcttttgtgttgtctctcttttttcatatcctgtctcttctggcttatcagctttctgaggaaacagttggctttaaccagggccctcctttttttttctgcattgtaattaaagtgttaggaaaaacaaattcttctctcctgtgtttagttttcttaaattatcagctgtgagttgtaggggagttctgggaattagatcttaaaatagctaaagtttactccggatagtatgcagatgtaatacactaaataattctgagtccatttccaaaagcaacatgagttacacaaaactatcttggcattttcaagagatgggaaaatctgtaagattatcttatttcatgaaatcactctggtaagatcttttcttaagccccagagataataatactcttttgctgtttctacatatatttttatttacatagtgtaaatgtattagaagttaattgtaagccttaattaatttaatctgaatatataacaatttaaacctcacattacaaaattctgaagcttaagaaaactgcttatgtctgtcatattattttggcaaataatatttggcaaaaaataatatttggcaaaacaaaggcagatgtctaataaccacacagtttctcctctggtagcattaaaaaccacagattacatcttttggtgtaaatttataagtttttcttttaacctagtagtaatttctttttgctataaaccattgaaatattttcctcctaccacctgtctgtcttgctttgaaagctatgatttaagtccttgtcctagtctaaccatatcaggcttttacttaaattataggaaacatactttgattcacgttaaaaactaatctaatgctgcacaagcctactcctgtttgtagttttccattgtgtgattcagtagccccttcctaagtacaaatgcactttgtttgatattctagtatgcagattgacttctatatgcctttttctcacaggaatttcaggttgagcgtataccattataaagccattcctactgggtataattaaaaagagagccttaggctgggcccggtggctcacacctgtaatctcagcactttgggaggcccaggtgggcgattcatgaggttgggagtttgagaccagcctgaccaacatggtgaaaccccatctctactaaaaatacaaaaattagccatgtctggtggtgcaaacctgtaatctcagctactcgggaggctgaggcaggagaatcgtttgaacccaggaggcagaggttgcagtgagcagagatcatgccattgcactccaacctgggcaacagagcaagactctgtctcaaaaggaggggagtggagcttaaaaggaagcaaaggatttccagtcttggaaacctagaggaaggggggtccttgctatgtagtggcagaaagctgagtgacactgtagccttcagtgacaccaaaagtagagaatgtctgaggagctgtgtgatctagctcaggaggtttctaaccagagtgctgaaagtgccacctggtttcttcttgcgtcttatagtaacaggtgagactttgctcaatcatgggaagaactgttaaaaagaaaccaggaccacctggtttgaaaattctcagcctctcgagaggcaaaaaaatgccaaaatgaagaaatggtctccgaaggaaggctcagatttagtatgagttttcttagcatcaagtacctctgttttccggttgaaaaagtatatttatatgtgtgattgttatttgatattaatgttgattgaacccaggtgaagaggaatgacttttatttctacctaaaatatggattgtgaagtatttgagttgtttcaggaggttgagatgcaaacgtgtgatagaaaaaagaccctcttaaggaagcctcagtatcccctgctatgaatggccatgggaactctacaaaaaacaaagagccaaggctactctggcaagaacagtgccttagggatcacctacaaggaagttgcttagagaaccagagatggcaggtaccaagagccttcagctgcgcctctggaagcagaaggagaaaacctaggtgtctggtcactggccacaaaaaggtcaagttagtagtatgaagtatttgaatcttcagaccctccccagcttgataatctcaaccttttggcccaaattattacaccattttggtaaataatatagaagttagatcttttggcaataaccaaatctattcatttgtttgaggggagccatgaaatatacaggtttactgtaaagcattctgtttttaagttagtttttcctcaactttttttttaaagaacacttaaattgtaaacataaagcagggtttctcaaccttggcactgctggcatttggggctatattattttttgttgtggaggctgtctgatgcattgtaggatatttagcagcacccttggtctctgccctctagatgccagcagtacctcccccacacacttcttctccaggttgtgagagccaaaaatgtctacagacattgattgcctaatgtctcctggcaacaaaatcacttcccacagagaaccactgcaataaaggaaaaaataatcagaaaaggaaaataataatggtgatagcatttaattgtccattagtgcctattatttacctaaaaaactcttaatccatgttctgctttgaaaatatatgtgttaaataattgtaaattaaggcaatataccagtttggtcttgaatattggaatttttgtttggggaaaatatagattttcccttcagcagtaagcaaatatcttagggatatgaaagtaacacctcatgacagatcaggaaatctgaagtatttagcagtgtggccaagaaagaacccaaatttattaatgtttgacctagggagtatttttcttatttaagcagtctgcttgatataaatataaatcatcatcattatcatccaaggcactttggaaaaatagaaacttctgtccctctcacaatttttgaggatgattataagttatgtttggaagccactgttcctatccacatggacattcatttatttgttttagttatataagtaaatcatgtttaatagagtgttccagggaggtgagattgaataaccataaatttggggtcacatcgctaactgtgtacattcatgtttatctgtaaagaagtgaagggagaaaggagaagtgtgtgtgttcagttttccaaggggtgttggataacaaccttttacaccaaacagtggggaaaaatgactcctttttttttttttctaagagaactgaatgcagtggcacagtcacagctcactgcagccttgacctcctgggctcaagcaatcttcctcagcctcccgagtagctgaaactacaggcacaggcctcttcacctggctaattttttaattatttgcggagacagggtctccaactcctgagctcaacagatcctcccacctcagcctcccaaaatgctgggattacaggtgtgggccaccgcacctggcccatgactacttttaataactagattttggtagtgtctgattagatgttaaaatgacttctgtctgttctcttacgtgactcaagtcttatcaacagatgttttctgaaagagtgaaggcaagaagaaatgttgggtatgttttgtaaaaagccctgcacaccccagagagcagagtgttgatgaaactggaatgtgtggctccattgttcaatctttaggtatctattcctgtactatagaaaaagtgtggaaggcataaatagtagtatgtgtagagttgagaggttgatggtattttagagtgaaattggccatcctcattgtagccagttcctctgtagacatttgtattagtctgttttcgtgctgctgataaagacatacccaaggctgggaagaaaaagatgtttgattggacttacagttccacatggctggggaggcctcagaatcacagcaagggcgaaaggcacttcttacatggtggcggcaagagaaaaatgaggaagaagcaaaagcagaaacccctgataaacccatcagatctcgtgagacttactcactatcacgagactagcatgggaaagaccagcccccgtgattcaattacttcccccaggtccctctcataacacgtgggaattccaagagatacaattcaagttgagatttcggtggggacacacaaccaaaccatattatgctacccctggcccctccaaatctcatgtccttacatttcaaaaccaatcatgccttccaaacagtctcccaaagtcttaactcatttcagcattaacccaaaagtccacattccaaagtcccatctgagacaaggcaagtcctttctgcctgtgagcctgtaaaatcaaaagcaagctagttacttcctagatacagtgtgggtacaggtattgggtaaatacagccattccaaatgggagaaattggccaaaacaaaggagttatagagcccatgcaagtccataatccagtggggcagtcaaatcttaaagctccgaaatgatctcctttgactccaggtctcacatccaggtcatgcggatgtaagaggtggcttcccatggtcttgagcagctctgcccctgtggctttgcagggtacaggctccctctcagctgctttcacaggctgccatcaaatgtctgcagcttttccagaagttgtcagcagatctaccattctggagtctggaggatggtggccctcttctcacagctctaccaggcagtgccccagtagggacttgtgtgagggctccgacctcacattttccttccacactggcctagcagaggttctccatgagggccctgcccctgcagcaaacttttgcctgggcatccaggcatttccatacatcttctgaaatctaagcagaggttcccaaatctcaattcttgacttctgcacacccataggctcaacaccatgtggaagctgccaaggcttgtgacttccaccctccgaagccacagcctgagctatatgttggcctctttcagtcacagctggagcagctgggacgcaaggcaccaagtccctaggctgcacacagcacggggaccctgggcctggccacaaaaccactttttcctcctaggcctccgggcctgtgatgggaagcgctggcgtgaatgtctctgacatggcctggagacattttctcgatggccttggggattaacattaggcttcttgctacttatgcacatttctgcagccagcttgaatttctccccagaaaatgggtttttcttttctgtctcatagtcaggctgcaaattttccaaacttttatgctctgcttcccttataaaactgaatgcctttaacagcacgcaagtcacttcttgaatgctatgccacttagtaatttcttccaccagataccctaaatcatctctctcaagttcagagttccacaaatctctggggcaggggcaaaatgccgccagtctctttgctaaaacatagcaagagtcacctttgctccagttcccagcaagttcctcacctccactgagaccacctcagcctggattttattgtccatattgctatcagcattttgggcaaagccattcaacaagtctcttaagtaaagttccaaacattttcctatttcttctgagccctccaaactgttccagtctctgcctgttaccctgttccaaagttgcttccacattttcttgtatcttttcagcaatgccccactctgctggtaccaatttactgtattagtcctttttcatgctgctgataaagacatgcccaagactgggaagaaaaagatgtttaattgaacttacagttccacatggttggagaggcctcagaatcatggcgggggagaaaggcacttcttacatggtggcagcaagagaaaatgaggacgaagcaaaaagcagaagccccaataaacccatcatatctcatgagacttattcactatcacgaaaatagcacaggaaagactggcccccatgattcaattacctctccctgggtccaagccacaacacatgggaattctgggagatacagttcaagttgagatttgggtggggacacagccaaaccctatcaacattgaatacaatctgtagtatcaaatattgaaaattctagtgatgaaatgaggattattaattcaataatcagtgcatttgattataaaacttctatcatattaagggaatttattgcttcatgctgtatttgtgtttcctttatattgcaatgatgtttccataatttaaaacgaatcagaactcttctatagatttttcaataaaattaatttctagatgtctactcttcatttaaataattttggtatcctggtgaattctacttttcttcaaatatacatatctgggcaatgtggcatcttacaataaggctttccaatattaatgttagtttcttacaattgtcccttttacttttttattttcttacagtgcctacaccaactaatgttacaattgaatcctataacatgaaccctatcgtatattgggagtaccagatcatgccacaggtccctgtttttaccgtagaggtaaagaactatgggtgagtgtcactcttttatttatcctttttattccatttttgtttaggtccttggaaattccacaactgtgttctttcatcagccttcccacgtggcaaaacattctaaactgcttatagaggtccaaaagtactaaagatgcaaattctttgccaaatatttcttgcctcttatttcctcttccttatcagtattgaaatagagaagtatcactaaacttctgagattagcatgacaaataaagctaatagttactatgtcatcttcctgtagtgtatttttagtagaacaatataaatttcaaaaaacttttttgacaactgttagtttttttaatgtgcttacttctataattaacatatataaatggaatttagagttgtttaaaaaaacagatttttaaaaaattgaatgtggaatgtggcttgcataggtcttacattttgaattgagcctctttactgtaacagagtttgtagttcttctaactaaagagtaagggtttcctactttctctggcgtctccatcctattcttagctctgctctttctaccgctttgtgctgtgaataaaaagcaaagcacagacagaaatggtttgagtttatttaataacaataaaagttatcttcgcatttttttattctttttagtgttaagaattcagaatggattgatgcctgcatcaatatttctcatcattattgtaatatttctgatcatgttggtgatccatcaaattctctttgggtcagagttaaagccagggttggacaaaaagaatctgcctatgcaaagtcagaagaatttgctgtatgccgagatggtgagtagaatgtgtacacatgtaaattttaaattggaaaatatttatacatgtcttctgtatgtttgcttttattagcagttgctgaaaattatcacaatgcttaagaaacacttggaggaatttagagtcagtacaggttgagcatcccaagtctagaaacccagaatgctccaaaatctgaaactttttgagcgccagcatggcactcaaaggaaatactcattggagcattttggatgttcagatttagaatgttcaactggtaaatataatgtaaatattccagaatccagaaaaaaaaactcagaaaccgaaaatactactgatctcaagcgttttggatatgggatactcaacctgtatcctccccttctttcaagccccacaaaatagggctaacaggtggccatcacttagctgcttctatgccatgacatttccacttcatacaattatgggtctgtgctgcccagcggtcccctgcaccacccttgcccttcccatcttttgtcattcatttgtaagttatattcactaaggactttggcagctaactcttattctgaatgcctggggaacctgaataccaccttaatacattaaaaaattgcagagttccttattctcttcagccactgtgattttcaggtcttcagtcttccagcatcccactcccatagtgtacctgatgtttgctgtcacctcaaactcttgaatctttaattccagttcctgtattccaactatgacatcctgccttagctctcagaccctgactcctgggtaaaagacacctttagtcacttgactcctccctagtcttctagcccttgggtccctttccctctagcctcacttcctttctctgctcctgccttttagattgtgccacctcggtctcttctacaggctcttcctctccttaccctttaaatacttttcttccccagagtccacaattttgtcatatgattaccacaccatctgcatgttagatttttttccatatagatttatcaagggcctactacgtgccggaaagtatactgggccctgaggatacactgatgggttaaaaacagacctgcctggcacacagtggtacacagtaatatgtgaagactagataaatggttcacaacaaagtctcaaacatcaaagacctaataaatatttatggaataagttctgatttttcacagtaaaaagagttttgatgagggaagaaaactaatgccatttctgaaacgttttttagaatccaggcttcttaatccacagaagcaaagataaaggaaaaattacttaatagagtctatattatgtgaagtctttttttaaccaaagtttataactatttttatttacaactagaaatgaaattaaactgctaaataggcattcagattaaataagagtacttcttgcctgagatttatgaaacatttgtttattaaggaccccgagactatcttctagatatttgtggagtggtttaaatgtggtcctgctttagaacaaccagaacaaaaacaataggttgattgatagattctggtaattttatgaaatgtaccatttagttccaaggccagtatttattatacttcctcctcctccttccccaggaaaaattggaccacctaaactggatatcagaaaggaggagaagcaaatcatgattgacatatttcacccttcagtttttgtaaatggagacgagcaggaagtcgattatgatcccgaaactacctgttacattagggtgtacaatgtgtatgtgagaatgaacggaagtgaggtatgtgtttcacatttttcataatggaaattcttgtgtagctagcaaaagttgttcctttctgtagtgtaatgaaaataggatgcttataaatattcaagcaagactcacagatcatagatttgataagaaaaatatgtgaatgctattaaagcaaaaatgatacagagttagtcactaacactgaccatgtgaatacatttagtttttatttgcttcatttagcagaatggctctaatctaggatttttcccagtacacctccattgctccactggtaaaatgaggattttcttcctcattggcggtgacgtaaagtaatattaatacttctgtttcccaccagctaaatttctggacaaatgaataggacaaatgaacatttgttagtttaacaactaacaataaacattcctgcaatttgagtttttaaatttaccatttttataaggaatataacagatgcatagtatcgtgctgtgttgaagtaacaaattgacttattgatagtaaagctatttttagacatgttcaagtcaatcatatatatttcttcagttgtttgaccaggactaatatggtgattttttttttttttcagattaaaagaagctgtgcattttcactgttttcttttttcatctagatccagtataaaatactcacgcagaaggaagatgattgtgacgagattcagtgccagttagcgattccagtatcctcactgaattctcagtactgtgtttcagcagaaggagtcttacatgtgtggggtgttacaactgaaaagtcaaaagaagtttgtattaccattttcaatagcagtataaaaggtaagttcttgccattttttttctaaatatagagggagcagtaactaaaataggatcatgtgaggaaagcaaactcatttgcagtttcaaaagatctgttttaacaatattcatttgcattagttccattccttagagaagttcaaaattaaaaataaagcagtttctcacacatttaaagatatagaacaactaatttggaaagccatgtgatggccccttgacccaggaaagaaaaaatatataataagtacataaaactacacaaatgtttgcatttcaggattatgaattataagtcagtttgttacttcaccatagcaagatgttgtgaatccactaaaatgttctttatggggattgtaatttaaagactgaagagcaggaacgatcactggttacaactgtatgacgtggactggacaaagactcgagattaatatccaaaaaagtttatagatgggtttgaataatagataatgggtcatttttataacattttacaataattaattttatttcatcttttaatgtggggggtggggaggtagagatatatatgctagaacttgaactttagaactgttactctcaggtgtcaggaaccttaaagaagtttggacttttctttgcagttaggaaatgtaagtgttcattatagataatttataaaatatgaaaaaccagaagaaaacaaaataatctgtagttctaccatgcaaaaataccccattattcacagtttgatattttctttagtttttctacatagacatgatcatattgtatagtatatatgattttgtgtattgctttaagcatatattgtaactcatgctttgatgattatctttgtgtgtgtgtgtgtgtgtgtgtgtgtgtgtgtgtgtgtgtgtgtatacatatatttttttccttaggatttttttagaatagatttcataggtttaaaattttatgatgcaagtatattttcgaggaatggaaatataggctgaagagccagaacaaacacctaaaattcaatactaataacttcaagccattatatgaaggtttcaaataggtgatttaaagcagtgcaatgcattttatgctaattttcgttatgctatttgaaaaataaaacccttcttaatgctcaaaatttgaaataatgcaaatgccgcagatttgtttttagcctgaattatacactgcactgatagtatggccacacggtggcattgccgtggctcctgagcagcagccctgcctgcttgcctcaatgccttgcagccagcacttgctcagcccgtgggacttctaacagcactaatgttggttttgtagttattttcctttttacttttgtaatgatttaacttttttcacaccctgtaataagcgtaatagaagcattcattagtaacttccatagttagaaaattctgggtaacaaaatgccctaaaggatgccggacattgtcacagtatgttagagtgctgttaatttggaagagagaactatgaaaaaaaaaaaatactgaagattgtgctgcaaaaataaaaggcagcattacagcaaagtacacaatggtgattctagatgtatgtgcttggaaacaaatctttcctattttatattatttatgtctggtttataactaaggggactttattcctgtgcagcattgctgtgtgcatgtacatctgtgaagctttataagtatttgcagtcgtgaaataaatgtaacaggaaattctgaggagtggggctaaatcatcttaagagcaataaacattgccagaatttctttctttttttttttgttgttttgttttgttttgaaatggagtctcgctctgtcaccaggctggagtccagtggcacaatctcagctcactgctacctccacttcccaggtccaagcgattctcctgcctcagcctcccacgtagctgggactacaggcgcatgccaccacacccagctaatttttgtatttttagtagagatggggtttcaccatgttggccaagattgtctcgatctcttgacctcgtgatccgcccacctcgacttcccaaagtgctgggattacaggcttgagccactgtgcccagctgccagaatttgtttctaaggagaggtatttttaaaattattcttttgcatttttaaccgaaagaaatgcataaccctggaaacacactgtatgtagggctgtaaggaaattattgtagaaaagctattttaactatgttgtgtcatagtagaatagtcccagaaagttctagaattgcagagctgggaagaaccatattgctatctaagacagatacctaattttttactcagatttcctaacttctgcttccttcagtgttctttaaaactctggccctattcactaatttgtaaatctattcaagaatggcactaagactttttgatagataatagcagtattccatcttaattgtaacttgtgatttctgccttttttaaggttctctttggattccagttgttgctgctttactactctttctagtgcttagcctggtattcatctgtttttatattaagaaaattaatccattgaaggaaaaaagcataatattacccaagtccttggtaatgtatttaatttttttatatacactaaaaagttaacttgaaccttttttgatagtttcttaaattatgtttttaaagtagaatgatattcaacaagatgtcacctgccatcaatcagtcagtctaccacacatgcaaaatcacatactgtgtcttttgctgtgcagcaagtattttgtttttttttttattctcagggaaaaacacggtgagacaattctgttaaagatcttaaagtctagggggaagaaaagataaatatacattggctatataacgtgtgatagattcaaagatttatacctgagcccatgaggactttgtccagctttggggtggggttagtcatggcttttccagaggcaatgcctgagcagtcttgagggacatacaggagtttaggcactaggggacagaatgtgctgaggtccagagccaagaaagcatgactttgaaagctctgcaaatacagaaacacttcattatggttggagtatgaaaggaaagttggccaaaaatgagactaacgtaggagtttgacgattttaatgtccaacatttcaaagcctttgatgtaaagaacatttaaaggtaacagaatagtatctatttgagtcaaatatgacaggaataatatctgtgatgctcaaagggcacattaaaatttgctataaactacctttaaagtggataagaactctcaacagttagtagtcaactcacaaatgaattataatattttattcttactagtaattaagcacaaagtaaccttgcagtatgccattttacacgcgctagagaagaaaaaagaaacctggatatccagtagtaccagcagtagcataacgggtaaatgctggtgaaaagtaatctagccctggtaagaataaaagcacacagtgggtattcagtgtaatagtgacgtaaacataccatttctttgatatggtcactccactcttaaaaaatgtattataaggaaataatttcataaataaaaagatgtacaggatatttaacatgttccatagctagtaaaaattggaaacatttccccatctattaaattatttatcagtataaagaaataatatgagctactaaaaattataatgatgaaggcaagtaatgagaatattacttaagtagatgtgcccactttgtaaacataatgtgcgtacatgtggaagataattgtattaggattctctagagggacagaactaatggaatatatatataaagatatatatataataccaaataaactcccctttatataaatctatattttatatattatatattatatatattttatatgttatataatatatattatatataatatataatatattatatattatatataatatattataaattatatattatatataatatataatatattatatattatatataatatataatatattatatattatatataatatattataaattatatattttatataatatattataaattatatattttatataatataagttatatattttatatattatattataaattatatgtttatataatatattataaattatatattttatgtaatataaattatattttatataatatattataaattataaattatatattatatattataaattatatattatataatatatattaattatatttttcatatatatatatataaaggggagtttatttagtattatttagtattaactcacacgatcagaggtcccacaataggccatctgcaggctgaggagcaaggagagccagtccaagctccaaacttgaagaattcagagtccgatgttcaagggcaggaagcattcagcatgggagaaagatgtaggctgggaggctaggccagtctctcttttcacatttttctgcctgcttacattctagccatgctggcagctgattagattgtgcccattcgggttaagggcgggtcttcctttcccagcccactgactcaaatgttaatctcctttggcagcaccctcacagacacacccaggatcaatactttgtatccttcagtccaatcaagttgacactcagtattaaccatcacagtaacgtacaaaaagcaacatatattagtaagatatctgatggctttttaaaaattctaaaactttgtttttaatattactatgggacctttcattaaaaagaaatggcaacatctgattcacccattatcctaaatgtgccatttggtggtccattacttcagacctttgttttttttgagggtaggcacttaagcttaacaattttttatctttaatcaatttttctccccatagatctctgtggtaagaagtgctactttagagacaaaacctgaatcaaaatatgtatcactcatcacgtcataccagccattttccttagaaaaggaggtggtctgtgaagagccgttgtctccagcaacagttccaggcatgcataccgaagacaatccaggaaaagtggaacatacagaagaactttctagtataacagaagtggtgactactgaagaaaatattcctgacgtggtcccgggcagccatctgactccaatagagagagagagttcttcacctttaagtagtaaccagtctgaacctggcagcatcgctttaaactcgtatcactccagaaattgttctgagagtgatcactccagaaatggttttgatactgattccagctgtctggaatcacatagctccttatctgactcagaatttcccccaaataataaaggtgaaataaaaacagaaggacaagagctcataaccgtaataaaagcccccacctcctttggttatgataaaccacatgtgctagtggatctacttgtggatgatagcggtaaagagtccttgattggttatagaccaacagaagattccaaagaattttcatgagatcagctaagttgcaccaactttgaagtctgattttcctggacagttttctgctttaatttcatgaaaagattatgatctcagaaattgtatcttagttggtatcaaccaaatggagtgacttagtgtacatgaaagcgtaaagaggatgtgtggcattttcacttttggcttgtaaagtacagacttttttttttttttaaacaaaaaaagcattgtaacttatgaacctttacatccagataggttaccagtaacggaacagtatccagtactcctggttcctaggtgagcaggtgatgccccagggacctttgtagccacttcactttttttcttttctctgccttggtatagcatatgtttttgtaagtttatgcatacagtaattttaagtaatttcagaagaaattctgcaagcttttcaaaattggacttaaaatctaattcaaactaatagaattaatggaatatgtaaatagaaacgtgtatattttttatgaaacattacagttagagatttttaaataaagaattttaaaactcgtttttgtattcatttattcaagcacttaggcagtctttcatagttaagcagaatatttttatatccactgcttgtttccatgcattaatgctataggattatttgctaattgttcatatttaatatttaaaacaaccctaaaaataatatttttaaatggtccttataggtctatatttcagtgcttaacacccagtgtgcagaacactgttctaagtggtttgagaagaaaagatttagctgtagagcatgtggattgaggaatctagcataaaggtggtgggcagagccatggaaatggatggaaccttgagaattacatggtgtggaaagaatccccagtgagaggcaaaccaagagttaatatatatgttacccaaggatttcttggaattactaagaggatagaaatattcagaaattaatatgaatctgtgaattaatggaccaaaaaaaatgaaatacaatttacatgagtagcaaatcacatttctttggtttctggaaagatatttctcttcacttaaaaatgcaaattacaaatgagatactatcagtgaaaaaagtagtggtgtggtttgcagtggaactggtatagtcactgattttagggtaatgtcttgtaaattgcttttcaaactgataccccatacatatcacattccacaaaagtaatatccttcaacagactttgatctctcttgtgggaaaattacaaaaaaaaaaaaaaaactacatgaacaatgcacacattagaatgggaaaagcaaaaatatgaaaataattgaaatagccaaggaagaggtaatacttactaccctccaaaatgattataccaatgtgtactcccatcaaatgtgaatgaagtacctgtttttacaccctagctaattgactgaaataagtctttaatctcggtaaaacactttacacattaaatgcatttgcatttctttagtaaatttgagcatgtttttatatcttatttatagtttcatgccaactcatcttgttctttgtccatttttttatgggctgtttatatctttcttactaccctttatctgccctgagttacagatttattttataatttcctgccttttgacttaccacacagatgtttaagttgtttataaagtcaaatttatttatttccttctatttttaaaaagcccttcccctttccccaaaagatagaagttttcactcatgttttcttctggtctttggtgatgattgttttacatttaattcttctatccatctagatttttttcctttgaggacagagatagagatccagctttatttttttgttttagtttcctgtggctgccgtaataaattaccacaaacttgggtggcttaaaacaacagaaatttgttatctcacagttcagaggctagaggtctgaaatcaaggtttcaatagggccagattctatctgaaagctctaggggtggagggccccttcctagtttctagtgattgttgtcaatccttgatattctctgacttatggctgcattattccaatttctgcctcttgtcacctggcattcttctctgtatgtctgtgtccagatctttataaggacaccagtcaattggattgattagtcccactctaatccagtatgacctcctcttaacttgattacatctgtaaagacactttccagttaagatcacattcataggtaccaggggttaggacttcaacacatctttttgaggatacaactcaactcatatatttcccttaacaaattagttatcccaaatactattcattaaattatctaacttttctatgctgatttcaaatgtcacatttatcacatgccaaattctcagcactcctggaacagttttgttgttcagtcttttcccgtctatgtatcacacttttaatacacattatactgggatatattttatgtttttttgagacagagtctagctttgtcacccaggctggagtgcggtggcacgaacatggcttactgcagcctcaacctcttgtaatcaagcaacactcctgcctcagccccccaagtagctagtacagacgctcatgaccatacctggctaatgttctgtatttttttgtagagacagggttttgccatgttgctcaggctggcttcaaatgcctgtgctcaagcaatctgcctacctcaacctcccaaagtgctgcaattacaggctgttttgacttctgaggctttcctgaatactttcagccaatgttcattgctcatatttcttagcaataattatttatttatttacttactgtatttttagtagagacagggtttcaccatgttagccaggatggtctcgatctcctgacctcatgatctgcctgcctcggcctcccaaagtgctgggattacaggtgtgagacactgcgccctgccagcaataattattttttaggtgaactataacctaaattttttggccaagttttcccccaaattttaaactcctttgggatttatgttggcattgttttgactttataaaatgtttagaaataactaatattttcaagggttgaatgttctgcaagaatggagactatttctgtcttcaagtcttacatccctcattagaggtttacttcatacaggtgtagaaaatttactaagtgtattccttgatattttatgttttttgttgcctatgggaatgtcatcttgcattgtggctcctgaatggctgtctatatgtacacgcacacacaaactattgttacaagttgtttttgtatctagccaacatctaaactgttttttcttcatggtttttagttgattggttttcccagtgtacaaacgtgttgtctataaataagagtaatcctgccttctcatcaccaatattatattttgttttttattcccttgtcctcaaactttgatgaattggtatacgctattttccaagagtgattgaccaaacctggtggctgtgggcaaatcgcttagcctcatgagagggttggattacattctctctatcttttggctcttaagagtcattgcttccatttgtgttaattagtaagagcattggctgggtgcggtggctcatgcctgtaatcccagcactttgggaggccgaggcaggcggatcacaaggtcaagagattgagaccatcctggccaacatggtgaaaccccgtctctactaaaaacacaagaattagccatgcgtgatggtgcatacctgtagtcccagctactgaggaggctgaggcaggaatcgcttgaatccaggaggcagaggttgcagagagctgagatcacgccactgcactccagcctagtgacagagcaaggcttcgtctcaaaaaaaaaaaaaaaaaattaaagcatcatctttccaacacagttttgtgtctaaacttaattttttttcccctacttatttctggttaccagaaattcacgttattgaaccattattcatgccaagttaaattgtcttaagattactgcctgggtccaatttaaggtaccacttcttatgcctgataaggatataagtggatgacttagaaaataagtgccagctttgtttgtatagtcattagttagcttcatttatgagatgcaatacttactctaccttccaccgccctgcaaataataactggtctctccattggtactgttacagggctttaaggcttaaccacgtaccccaagctctctttgctccagtatctcctctgcccaggagataagtgtcagatatttaattgagaggaaagagtggcagagatatgttctgactagcacattcccagagtgtcctttctagagctaattataaaatgttataatacccacaatgtatctccaaaattaaatattgagcagatatctaccaataaaaggtgagtagtagagaacactcacacattggcttctcagacagcctttttaaggaaaattcgtggagctgaacaacacaggtatgtagtcagactggatgtcagaccccagcccttgggctatgggacatttttgctacataaccagagatgtgccagtccctttcctggtataaaaagaggtgagggccaaaggggtcagtaggtacttcactcaattcgaggggcctctgatccatctgaggtgaggccacttttatttcacttctgacaccatcttgtgaacctaaataacagcaagagtctctctaaaagaaaataatatttgagaatgggtcttgcaatgagaaaatagtaaactgcctgtgtattcagggagataaaggaagacaaaagtttttaaaagaaaaatgaagatgacctaattgtattgagataattaacctttactatgtaagccaaaaataaaattgtaagccctccccacctcaaaccatctaaacggacgccccctcttggccaagcgcattgtaaagttaacctgaaaaactagttcaggccatgatgggaagggagagttggatataactcagtataccctcctcccttttggaacttaggaaaagctgaccagcattaaacttacgtctgataagaaacattttcaatctattctctctgaaatctgctacctggaggcttcatctgcctgataaactttggtctctacaaccccttatcatcataacccaggtatttctattgattctgggtctttgggtaacaacataactctttcaacaaattgccaatcagaaaattcttaaatctacctataacctggaagcccccacttcaagttgtcctgcttttccagattgaaccagtgtacatcttacaggtattgattgatgtattatgcctccctaaaaagtataaaagcaagttgtaccctgaccaccgtgggcacatgtcatcaggacctcctgaggctgtgtcatgggcacatgtgtcatgggcacatccttaaccttggcaaaataaaccgtctaaatgtattgagatctgtctcagatacttttgagttcacaaattggtgatgaagggattctgagtggaggtgcccctgacctttgatgaatctattggtgcttggtaccagcttgagctatccttatggctcaaatcagaaggacaatttgctgaggcctgggagttccccctccagagaatccctgatctctcaaaatttggtcgagatctaaagcttattttgctctacaactccttttctggagttttacttgattccaacaaggaaagcaagtttttctgcttccatgatgatgcatagcaggtaactcatttctggagtttcagctagtttccgatagggaaggcaagaaccttatgtctgttcctgtgcacctttccaggtatttttcctgcttctaagatggtaaagagcaatcttgtgccagggctctattcctaggtaagtagcaagaattgggatttttttgtcttggaaattctccttaatgactacaagttgaaattgacaagcagctggttttaatttctccttaccgttagagcactcagtaatcatattgttggggtttttgttgttctgatctttctcccataggatttgatcaactataacagacttggtcaaattccaatgagaattccaaattaggggaaacaaggcctctgaattggctaaaattcctggcagctgcacaaacaaaaacaaaaacatgtgcttggtttctgtgttcacttcctttcttaaaaaaaaaaaacaaaaaacaattattcttctgtttacttttgttccactctatttttccttcccccttcaccatctctggtaccaagaaaaatctacagaagggttctaatgtctcagaccccttaaagaactcagaacaaaggcaccactcccacccccttttggggtgttctgttttctttgtggggtttcaagagtcatgggcagattcttcttagatttaaaactctgctttcctgtattgcattacctgaccctcttggcttttgcgggcaccagagattaccttgtactgtgagaagatgtgaccttggagtgtgtaatggcagacaagagctataaagttaggagtggctgaggacagtttacagctggtcttagctttttccaccccgctgcccccaccaatgaagttgttgtttaggatcctaattctagttcagaggtgcattctaaagagctttctcattgtcttctctcccaaaattaatctcgattggcttgtctgtgtatttgtgagagcaactaaactgttgtttttgtagataaatgtcagactgagtttcctaagctctgaaaagaaagggcattttgctccttccagccaaaaggcatccctgggttactggggtggagcctaaggggttgactaccaaccccatgaaatgcagccgccctacagggaacccccagcaaaattagtttaaaaaggttcatccaggaagctcatgtaggaactccatgttttgagcactcggaggtctaaacctccagagagagaaactgagatacataagagggtggcaacgactcactggtgacacactgtggagccccacccagaatcagcatattttgacccactaaactaaaacttaggccacagctcagttcctccttttaagaaaatatgtggggaataaattaaggatatggaaaaacaagaacaaggcctctcaggcacctcatttcgtttcatggtgcctctacttgcaagtggttgtgtaaatggaagggcgtgccaggttttctaatactccagctggttacacattaggtctgttcttgtgcgcattttaaactgatgggcaaattacatcaaggaaaattcagaacctaaagttcaacctgcaactctaaagttcctaagttctctatctctgttttcttttccacctgctttgtctgctattattaacacatttctactgagataaaatccactgtttgcatccaaccgtttctttttgttattgtttttgcaaactggtaagtttatattaatatctcatagctaaaattttgaagtgaaagcaacaggatctttgtatgagtgtgtatatgtgtgtttatgtgtacaaacatgtattttattatgtgtttttggccacaaggtactaaaatggcttaaagttgaagggtactcatacattaaacaataagcccaaatgcttttcaaggtcatgtgacaagtaaaaccttttataaataaactggcttaaaattattggtcaagtaatattagaaatgtcttataaattgtcaacatatatttttgtttgcatttattgatcagcaatttcatacttatccctgacaaatactctgtgtcaaaatttgacataaagtttataaaactgtaaacccaaccgttatggttggatctgtatccccacccaaatctcatgtcaaattgtaatccccagtgttggaggaggaacctggtggaaggtgattggatcatggggtagtttctcatggtttaacaccatcccccttggggctgtcatggtgatagtaagttctcatgagatctggttgtttaaaagtgtgtggcacctccccaacaaccttctcttcctccttctccagccatgtaagacatgcctgcttcaccttcacctttcaccatgattataagtttccaagcaaaagctgctatgcttcctatatagcctgtaaaactgtaagccaattaaacctcttttctttatagattacccaattccaggattttttaataacaatgtgagaacagactaatacaccaacccaaaacagaatgatctttgcttgtgtagtttttgacaaacaagatatcaaatattgttggtttaatgaaaacagctaaacttggaattattggtaaaataaccatatatttaatcctgaggttcttacttaggtaaacacctgaacttcataggctataaaaatcattgacagggaaataactttaaatgatgactatcacagttttcatagtctacataaaatattaaaataaaataatcaggtaaatgtaaagggataaatacctgtaaataaacttgtcataatttagaatataaaattatattaaattcaataatagatatttaattaaatatctgggtattttccaattcaaaaaattatattttattctttttttaaaatatgttcttattaaaaggtaaataatttttgtctaattcaaagcttatttaaaagtcctgtataaataagaatgtgaaaggaaccaggaaatagaccaatataaagaaaagtatagatatacagaggtatttttggtaagaaagcttaaaagaaaagtaattttgtatgagaaaaatattgtttggtgaatttttgtcctaagataaaatgaccgagttattccagaaagagtgacacttaggtcaaagcagaaagtccaagcatgttgtgaatggtctgtgtaagtcataataaagttagtaaaaaagaaatttatacaaatgttatgtgattaagttgtccataattacagaaaattataatcttttttttaaattgaacttttatgttaaaaatacactagactgggtgcggtgctcacgcctgtaatcctagcactttgggaggccgaggcgagcagatcatataggtcaggagttcgagaccagcctggccaacatggtgaaaccctgtctctactaaaaattaaaaaattagctgggcatggtggcaggtgcctgtaatcccagctacttgggaagctgaggcaggagaatcacttgaacctgggaggcagaagttgcagtgagctgagatcgcaccattgcactccagcctgagcaacaagagcaagactctgtctcaaaaaaaaatacactaataaataactaaagatttggttagaacaagattttatttaaaatattgagttactcaatgcacaaagtttttaatttttaaattctgtaatgtttctttttgaaattattcaaattgatatctcagtccttttttcgcttttgaaaaggcctaggatggtaactctctccttcaacttttgtttggccttataacttttttaaattaataatctaaagtaggggagagaatttttgaaaagaggcaaatgaaaaatcttttggacctgccgttttctatatgtctgttatatctacatgtttacatgtgccatgtggaagtgatatttcactaacaagtggtacaaaagagctctaatcaattggcttggagaatgttaatgcttatcagactgatggaacctagctcagatgccttttagctcacatgactagtaatctttggtaagattaatttggtaaatttaatctcaattatttccagtaatttaaaatcttaaagtcatgttatgtttaaattaagtaaacctaggttacttttttcccccactggggatttgggttaataagtcatgtaatgtttaaattaagtaaacctatgagttttttttccactgggaatttgagttaataagacttaaactagtaggtgaataaaaggtgtttttggtgaggtttctgaaaacacaaggaactagtttttgctaaagaaaatgtaatttttttctagagactatttatgaatcactctaaaataaaggaaaaaattatatagataaaactaaatggataaagaaaaaaataaaagggtgtgaaatgagaaatcctgactcttgagtagccatgtggttgcccatcttaaggagctgcagctgggctatagtcagttactaaaagtaaaagttaccagtggaattagagatggatcctactcatactcccagggagttagttccctgaatgcataagggaaggcaagctaataaggaagaaaaatgtttcatcctttggttattatctgtaaaagctgaaatgagagtaaaagagtgttgggttggtccttaagagtggaccaagaccagaagtgggtctgtctcagctcaagcctctagcatccaagctactcacaaaaatataaattaaaccg

SEQ ID NO: 59 - DNA, 2093 bp, Homo sapiens
aaggccggggctggagggcagtgctgggctggtcccgcaggcgctcggggttggagccagcgaccgtcggtagcagcatggctctcctctttctcctaccccttgtcatgcagggtgtgagcagggctgagatgggcaccgcggatctggggccgtcctcagtgcctacaccaactaatgttacaattgaatcctataacatgaaccctatcgtatattgggagtaccagatcatgccacaggtccctgtttttaccgtagaggtaaagaactatggtgttaagaattcagaatggattgatgcctgcatcaatatttctcatcattattgtaatatttctgatcatgttggtgatccatcaaattctctttgggtcagagttaaagccagggttggacaaaaagaatctgcctatgcaaagtcagaagaatttgctgtatgccgagatggaaaaattggaccacctaaactggatatcagaaaggaggagaagcaaatcatgattgacatatttcacccttcagtttttgtaaatggagacgagcaggaagtcgattatgatcccgaaactacctgttacattagggtgtacaatgtgtatgtgagaatgaacggaagtgagatccagtataaaatactcacgcagaaggaagatgattgtgacgagattcagtgccagttagcgattccagtatcctcactgaattctcagtactgtgtttcagcagaaggagtcttacatgtgtggggtgttacaactgaaaagtcaaaagaagtttgtattaccattttcaatagcagtataaaaggttctctttggattccagttgttgctgctttactactctttctagtgcttagcctggtattcatctgtttttatattaagaaaattaatccattgaaggaaaaaagcataatattacccaagtccttgatctctgtggtaagaagtgctactttagagacaaaacctgaatcaaaatatgtatcactcatcacgtcataccagccattttccttagaaaaggaggtggtctgtgaagagccgttgtctccagcaacagttccaggcatgcataccgaagacaatccaggaaaagtggaacatacagaagaactttctagtataacagaagtggtgactactgaagaaaatattcctgacgtggtcccgggcagccatctgactccaatagagagagagagttcttcacctttaagtagtaaccagtctgaacctggcagcatcgctttaaactcgtatcactccagaaattgttctgagagtgatcactccagaaatggttttgatactgattccagctgtctggaatcacatagctccttatctgactcagaatttcccccaaataataaaggtgaaataaaaacagaaggacaagagctcataaccgtaataaaagcccccacctcctttggttatgataaaccacatgtgctagtggatctacttgtggatgatagcggtaaagagtccttgattggttatagaccaacagaagattccaaagaattttcatgagatcagctaagttgcaccaactttgaagtctgattttcctggacagttttctgctttaatttcatgaaaagattatgatctcagaaattgtatcttagttggtatcaaccaaatggagtgacttagtgtacatgaaagcgtaaagaggatgtgtggcattttcacttttggcttgtaaagtacagacttttttttttttttaaacaaaaaaagcattgtaacttatgaacctttacatccagataggttaccagtaacggaacagtatccagtactcctggttcctaggtgagcaggtgatgccccagggacctttgtagccacttcactttttttcttttctctgccttggtatagcatatgtttttgtaagtttatgcatacagtaattttaagtaatttcagaagaaattctgcaagcttttcaaaattggacttaaaatctaattcaaactaatagaattaatggaatatgtaaatagaaacgtgtatattttttatgaaacattacagttagagatttttaaataaagaattttaaaactc

SEQ ID NO: 60 - protein, 489 aa, Homo sapiens
MALLFLLPLVMQGVSRAEMGTADLGPSSVPTPTNVTIESYNMNPIVYWEYQIMPQVPVFTVEVKNYGVKNSEWIDACINISHHYCNISDHVGDPSNSLWVRVKARVGQKESAYAKSEEFAVCRDGKIGPPKLDIRKEEKQIMIDIFHPSVFVNGDEQEVDYDPETTCYIRVYNVYVRMNGSEIQYKILTQKEDDCDEIQCQLAIPVSSLNSQYCVSAEGVLHVWGVTTEKSKEVCITIFNSSIKGSLWIPVVAALLLFLVLSLVFICFYIKKINPLKEKSIILPKSLISVVRSATLETKPESKYVSLITSYQPFSLEKEVVCEEPLSPATVPGMHTEDNPGKVEHTEELSSITEVVTTEENIPDVVPGSHLTPIERESSSPLSSNQSEPGSIALNSYHSRNCSESDHSRNGFDTDSSCLESHSSLSDSEFPPNNKGEIKTEGQELITVIKAPTSFGYDKPHVLVDLLVDDSGKESLIGYRPTEDSKEFS

SEQ ID NO: 61 - DNA, 1918 bp, Homo sapiens
aaggccggggctggagggcagtgctgggctggtcccgcaggcgctcggggttggagccagcgaccgtcggtagcagcatggctctcctctttctcctaccccttgtcatgcagggtgtgagcagggctgagatgggcaccgcggatctggggccgtcctcagtgcctacaccaactaatgttacaattgaatcctataacatgaaccctatcgtatattgggagtaccagatcatgccacaggtccctgtttttaccgtagaggtaaagaactatggtgttaagaattcagaatggattgatgcctgcatcaatatttctcatcattattgtaatatttctgatcatgttggtgatccatcaaattctctttgggtcagagttaaagccagggttggacaaaaagaatctgcctatgcaaagtcagaagaatttgctgtatgccgagatggaaaaattggaccacctaaactggatatcagaaaggaggagaagcaaatcatgattgacatatttcacccttcagtttttgtaaatggagacgagcaggaagtcgattatgatcccgaaactacctgttacattagggtgtacaatgtgtatgtgagaatgaacggaagtgagatccagtataaaatactcacgcagaaggaagatgattgtgacgagattcagtgccagttagcgattccagtatcctcactgaattctcagtactgtgtttcagcagaaggagtcttacatgtgtggggtgttacaactgaaaagtcaaaagaagtttgtattaccattttcaatagcagtataaaaggttctctttggattccagttgttgctgctttactactctttctagtgcttagcctggtattcatctgtttttatattaagaaaattaatccattgaaggaaaaaagcataatattacccaagtccttgatctctgtggtaagaagtgctactttagagacaaaacctgaatcaaaatatgtatcactcatcacgtcataccagccattttccttagaaaaggaggtggtctgtgaagagccgttgtctccagcaacagttccaggcatgcataccgaagacaatccaggaaaagtggaacatacagaagaactttctagtataacagaagtggtgactactgaagaaaatattcctgacgtggtcccgggcagccatctgactccaatagagagagagagttcttcacctttaagtagtaaccagtctgaacctggcagcatcgctttaaactcgtatcactccagaaattgttctgagagtgatcactccagaaatggttttgatactgattccagctgtctggaatcacatagctccttatctgactcagaatttcccccaaataataaaggtgaaataaaaacagaaggacaagagctcataaccgtaataaaagcccccacctcctttggttatgataaaccacatgtgctagtggatctacttgtggatgatagcggtaaagagtccttgattggttatagaccaacagaagattccaaagaattttcatgagatcagctaagttgcaccaactttgaagtctgattttcctggacagttttctgctttaatttcatgaaaagattatgatctcagaaattgtatcttagttggtatcaaccaaatggagttgtaaagtacagacttttttttttttttaaacaaaaaaagcattgtaacttatgaacctttacatccagataggttaccagtaacggaacagtatccagtactcctggttcctaggtgagcaggtgatgccccagggacctttgtagccacttcactttttttcttttctctgccttggtatagcatatgtttttgtaagtttatgcatacagtaattttaagtaatttcagaagaaattctgcaagctttt

SEQ ID NO: 62 - protein, 489 aa, Homo sapiens; identical to SEQ ID NO: 60

SEQ ID NO: 63 - DNA, 219715 bp, Mus musculus
  misc_feature (1)...(219715): n = A,T,C or G
gcaccaagcattcatctgcaaattcttctctgcaagtgcaatgtgaccaactgcctcatgtctctgccattcaaaataagttactcttccatttctgtgataaaacaccccatcaccaaggcaacttataaggaaaagcatatggtttcagagagttagaattcatggtggtagagcaaaggaacagctgagaactcatatgatgatctacaacaggaggcagagactgcactgaggatccaaggaatcttttgaaacctcaaagtccaacctcagtgacacacctccaactaggccacacctcctattccttcccaaatggttccaccaatgggaaccaagcacccaaatatatgagcgtatgatgaccgttctcattcaaacacctaccttaagttacttttgttatagaatgagaaaactctcatagacctaatcacaaagtaactcttgggggccggtgagatggctgagcaggtaaaggcatatattgtgtataaaggcatatataaagcctgtgaactgagttccatccccagagctcaggtaaaggtggaaaggagagaagaaaattgtctccacaaaattgtcctctagccccaacatatgcactgttgtttgttcataacccccacacattaaaattatgttttaaatgatttttttttaaaaaattatctggcctacttttatagacggttgtaagactcatttcagaaagggctacggaaaggaatgtgatacagaacagatgacaggaatctgagtgggcaggtcttcctgggtgttgccctatagtctctcagaattatcttatgctcttattgacatgtgcctagaaagtaaatcatatttgcaggtgactgatacacaaggaagattaacggaaggacccaagatctgccctgtaagtggacagcaccatctcataagctggggaccagacagatgtgagttgctctattgtagtgcaccctcctcaccatgatggactaacctccaaaactgtgagctaaatccttcctgagagaactgactcctgagttgtcttgtgacctccacaggaatgccatgggaattcatacccacaacaaataaataaagaatgagtctacccttttaaatatttttttaattatgtgtatgtctgtgcaccacatctgttcctgatgcctgcagaggtaagaagaaaatattgaattccctggaactggagttttggacagttgtgagctgccatgtgggttctgaaaatcaaatccaggtcctctctacaagaacaagtgctcctgacttctgagccatctctccagcctggttcacctgtgcttaagctgcttgtatcagatatttcatcacagcaatgagacatcttcacaatttaaacctatctctacatagctgtcaaggtatcattgaactcaagcattaaagtaggttgggatcaaacctgattttggtcttcattctgaagtctcccatgtcatcaaactatgatcaaataaatgtgttcttctcttgttaacctagtctttgggataggggtgtctactgtgtccctttatggtgaggagaggaaggagtccaccttcacttcttgcctctacacagggttatggggtaggaagtcaaattgttcagtgcactttctctagccctacatggaaacctgatagttatttttcatgtcctagataaacctcaacccaccaaaattctgatcatgcagacaggcacgactctttctctggggaggtttgtgggctccatcaccatcaccactcttagctccccacaccttccacttctgcccttattattataattccaaaggagagaaaaatagaaatattgagcactagtttgcttattatatctttcatagccaaagtacatcaaaaaatagaactgttttctcaccctaagcaaaatgtgcaaggacttaccacaaaaacagtattgttgatattgctggccatagccatagcaactaagcttgagaattgaaagcaagaggttgagaggccttgacttaggaaatggatgggactcagacaacaggatcacagctgtgatctccaacccccatcaggaaaaggctaaccatttgctgtcaagtagcttccattgctgacttcctaaagttcctcaaagaagtgaattcaaatcctaggctagagcatctccttcactgtgcataggtaccgtaccctacacaaagacaaggaagccctggatctgaagcttccagcagtgaggcagacacttccattcctgaaggttttggaaagggtgtttgtgaaggtaagggtgaaaagtgagagccagaattggcaggtaactaccaaggaccacctctgcactcatgggcaaggaggaataaaaggtagaacccaggagcaatgacttagaagggtccacatgagggtccacatggtagaggcaaagaattgactcctgcaagttgtcctcctattttaacacaagtgctatggtacatatgtacatacacacacacacacacacacacacacacacacacacacacagagttaaatcatttaaagtaagtaaaaataaaaatagcccataatgtaggctcccttccaattccaaattcatgagacagataatcttctctgttcagcttaagtggtttcagagaatgtagggtttctttttagagaaaaaacattaagagaatcctatacactgaggaataaagttaggctgaggctgggtagaaagtttgaataatacatgctgtataagtagaggagtcagggatgtttaacaattcttttcaaactgctttagtcatgtggtttgaatgggccctatcgaactatatatttgaatgcttggtccccagttggaactgtttgggctggattaggagatgtggccttgtcgaggaggtgtgtcattggaggtaagctttgctgtttcaaacgtccattcgcagtcagctttctcagtctcctgcctgtagatcaagatcagctctcagctattgctccagcaccatatttgcctgccgtgaactcaccctctgaaactgtaagccatcaataaactctttctttatataaattgccttggtcacagtgctttgtcatagcagtagaaaagtaagacacacaccatgttcaaggcagctagctgagtgcctctcacatccagttttagctcctccatcagtcagttcatgttacattgagcatctgcattgagtcaaacgctacttctttaaaaatagactaaggggccaacaaaatggctcacagggcaaaggtgcttttcactaagcttgacggcatgtgaagacacatggtagaagcagagaactgactcctgtatttcctgcttcagggaatctgatatgataccctcttatggcctctttgggcacctacatgtgcataatgcacacacacttttaaaattaaaagcaaatctttaatatatatatatatatatatatatatatatatatatatgtatatatatatatatatatatatacacacttagattagattagagttcaatgcaatgacctcatttcaacgtaatcacctcaccaaagagcctctctccaaatgatcatattgagaggcatgagtgggggaggggttagtgtgctaccagatgtagctcattaggtaaaatgctagtattgcaactgtaaaaccatgagtttgactcccaatgccactccaaactgcaggtaataacccacatctgtaatcccagcatttgaaaggaagtagaggtgggaagatcagaacttcaagatcatccttggttacatgattaatttgaggccatccagaaatacatgataccctgtgtcaaaaacaaaagtacagccgggcgtggtggcacatgcctttaatcccagcactcgggaggcagaggcaggtggatttctgagttcaaggccagcctggtctacagagtgacttccaggacagccagggctatacagagaaaccctgtctcaaataacaaaacaaaacaaaaaaacaaaaacaaaaacaaaaacaaaaaacccccaaaccaaaagtactagttgttaagtctttgagatataaatccttgcgcagtagtgcagttggacacattacagggactgtatcacttctgctcatcttcccatcatccagcacagagctggacttgagacttgactcagaccccttacataaactattacattccaaaccctcatgttgatctcccccacaatcacgtattgtattagaggcaaagaaaatcagaaggaccctcagtaggaataggaaatatttgttgtcacaatcaagtcacagttgctttctcttagaacttccatagggcaccaaaccagtcccctatagttggttggctcttctgccctggtttgtgtgcctgcactgatgggctgctggggaagttcttctgacagctgatggatgactcacctgactggcctgccttgaagatgagtcacagatgagctggaggatggagctggtcaggtatagaaaagcagcttaggaatgagtaaaatgagcaagcaaaacaacaacaagtgggggggaggggcgggcatcttgtaattttataatcccacagctaggaattcaagtctgaggatctggcagaggggagctcaagataggcttttatcccaaagttaagttattatttttcttcctttatttttaaaaaagaacatgggggtctcactctgtagccatggctggcctgagtgtcataaagatccacctgcctggggctggtgagatggctcagtgggtaagagcacccgactgctcttccgaaggtccagagttcaaatcccagcaaccacatggtggctcacaaccatccgtaacaagatctgactccctcttatggagtgtctgaagacagctacagtgtacttaaatataataaataaataaatcttaaaaaaaaaaaaatccacctgcctttgcctcccaagtcctggtgtagggccaccatgcccctatttataatagtatctggggagagtgcctagcatgcaacaagagaaggacgcgctatgggtgcagtgcattgaaattattccagttaaattattccagttacgtggcaattgttgtaaatttacatttatttgtgagtatgtgtgtgtgtgtgtgtgtgtgtgtgtgcgtgcgtgcgtgagagagagagagagagagagaggtggaggtcagagaaccaagaaaggcagnnnnnnnnnnnnnnnnnnnnnnnnnnnnnnnnnnnnnnnnnnnnnnnnnnnnnnnnnnnnnnnnnnnnnnnnnnnnnnnnnnnnnnnnnnnnnnnnnnnnnnnnnnnnnnnnnnnnnnnnnnnnnnnnnnnnnnnnnnnnnnnnnnnnnnnnnnnnnnnnnnnnnnnnnnnnnnnnnnnnnnnnnnnnnnnnnnnnnnnnnnnnnnnnnnnnnnnnnnnnnnnnnnnnnnnnnnnnnnnnnnnnnnnnnnnnnnnnnnnnnnnnnnnnnnnnnnnnnnnnnnnnnnnnnnnnnnnnnnnnnnnnnnnnnnnnnnnnnnnnnnnnnnnnnnnnnnnnnnnnnnnnnnnnnnnnnnnnnnnnnnnnnnnnnnnnnnnnnnnnnnnnnnnnnnnnnnnnnnnnnnnnnnnnnnnnnnnnnnnnnnnnnnnnnnnnnnnnnnnnnnnnnnnnnnnnnnnnnnnnnnnnnnnnnnnnnnnnnnnnnnnnnnnnnnnnnnnnnnnnnnnnnnnnnnnnnnnnnnnnnnnnnnnnnnnnnnnnnnnnnnnnnnnnnnnnnnnnnnnnnnnnnnnnnnnnnnnnnnnnnnnnnnnaaaaaaaaaaaaaataaagaattgaagtcaggtatggtatcaggtatatttattacctgatgaactatctcaccgatcttgaaaatgttgtttatgaagaatttgtttttagacttattttatgtgtgtggttgtttctgccagcacgtgtatgtgcatgcagtgccagggaaacccataagggggcatcagatcccccaaactgaagttaaatacgtggggtgcagcacactggttctgggaatcaaacccaaggtctcttacaaaagcagcaagtgctcttaacaagtcagctatttcatctctccaatactgtttaggaggaaactttaatgatacaaaagaaaagttagctgagaggcagaggcaggcggatttctgagttcgaggccagcctggtcctcaaagtgagttccaggacagccagggctatacagagaaaccctgtcttgaaaaaagaaagaaagaaagaaagaaagaaaggaagaaagaaagaaagaaagaaagaaagaaagaaagaaagaaagaaagaaagaaagaaagaaagaaagaaaagaaagaaaagaaagaaaaaagaaaaaagaaaagttagctgaagcagtaagacatggcccagatcctgactcgggcagttgtggggagcgggtgtggcggcagtcccaaaggtgctagagactgcagctaagtcatatgacttgcacctgacttcctcatataagacacaaacatcttgagtgctgcgcaggtgtaccaggattcaggtgaatccaatttggtggagatttgcccctgctgccctgattagctgaagctgcgtgcctggtgaggtggcgtggcctgctgtgcgtggatgtgaactgagagtatagaagagtgagaggcccgggttagagggaggattattattcgagagaggattactattagtggggagatatataaacaagggagatacaaacaggggagatataaacaagggagatataaacaagggagatataaacaagggagatataaacaagggagatatagagaaagaagaaataggactgaataaacgtgtgcagaaggatcctgtagcagcgtcgttcttgctggcgagttgggggcgcgcgctcgagagttggtgctgaaacccgggacaagaaacatcttcaggcacgagtgaagaccccctgctacagggaggattcagaactgcataacgggggaagaaaggggttaataaagtgttcccgtaaaacagactgttgagaaggatccggcgtggattcagaactcttcagctggggaacggtattgannnnnnnnnnnnnnnnnnnnnnnnnnnnnnnnnnnnnnnnnnnnnnnnnnnnnnnnnnnnnnnnnnnnnnnnnnnnnnnnnnnnnnnnnnnnnnnnnnnnnnnnnnnnnnnnnnnnnnnnnnnnnnnnnnnnnnnnnnnnnnnnnnnnnnnnnnnnnnnnnnnnnnnnnnnnnnnnncgagcataaagttgccaggaagcaggcacaaggtaacgaaaggttcccggctttgggacaagttaaggttcccggtttggggacaagttaaggaactatgataacctcagtgtagtgatcaatagatcctcgctgtgtagttatgcttttttctcccattgaccctttgtgggtaggtctgatagttttggtcttgtttgttctaatatatggactctgttactgtttgaaactgtgtgtagaggcagtcaagacaggtcagaaaatccttacagagcaacaagaaagtatgtcggaagaggaaaagggcttaaaaagaaaaaggaaaaagaaaggagacacagtgttatcaggtggtcaggaaggacaaaataaaagagccgaggtggaggaggaaggcaaattagcttttgtgccgcctccctatgcctcctcagcagccacctgtaggtggaccttctgtccggatatttggaggggatcgaccggatcaggtgttgacgtgggcgagagggtctgtttgtgtgtttccacaggaccagacggaacctctttgggtgccggagagattggtgagacactgcaagaatgaggctcctgatccagttgcccctgtggatgtggtggatattcccacaagcacaaaggatggagccgagatgagagatcctttcggtattccagaagccgataccagctcgacatgacattcaagtttttccacgctttttgatccctgaattccccttaaagagatagtctctctggccatctatcccttgcttcagggaagatgagtggggatgagagccctgggatgtatgcttgttatagtgtgtgtgtgttttgtgtttggcacatgtgttaggtgcagagtgtgcggcccgcacttttgccatggtagcgtaggcttttgctgcagtggaggcgggacaatctcctcagattcggtttgccgctctaaaagaaattatgctgcattatgccgtggggtgcgaggctaagcactgcacagaggatagcttgctgttggcatcctgtggaaggcacgtctgattgcatgaaggttcagtgtcctagttcccttcccccaagaaaaacgacacgggagctggccaagacctctctgggtgatgagcctaagggatggttttgtgtagggcccctatgcttgcacactggggatcagacctctaccttcacccatgaggcttgcttgcagcaattaagatctggccatagattatcaacatcctggccttttgatgcacctgccacaagcaaaacacaatctccccaggtgtggcttggcatgatagagaggtagtcagtgataagactccctgggcatgtcaccaacctaagacagggatcaaaccaatgctgtttgtcacccaaggacgggtaaggggcatggctgcggggggctatctacagacattctctctgccaaaaaagaaaaaagggggaattgtggggagcgggtgtggcggcagtcccaaaggtgctagagactgcagctaagtcatatgacttgcacctgacttcctcatataagacacaaacatcttgagtgctgcgcaggtgtaccaggattcaggtgaatccaatttggtggagatttgcccctgctgccctgattagctgaagctgcgtgcctggtgaggtggcgtggtctgctgtgcgtggatgtgaactgagagtatagaagagtgagaggcccgggttagagggaggattattattcgagagaggattactattagtggggagatatataaacaagggagatacaaacaggggagatataaacaagggagatataaacaagggagatataaacaagggagatataaacaagggagatatagagaaagaagaaataggactgaataaacgtgtgcagaaggatcctgtagcagcgtcgttcttgctggcgagttgggggcgcgcgctcgagaggcagtcaatgcaaattgtcagttacacacatttataagttccgaggggagccggattggtaaatatccgaatcttaacagtttttgttttgatttgttttaaagaaccagaggtgagttgtctgtcgtttgtgtaaaagtgcttctgaaactgtgagtcgtgacccctttggggggtcaaataaccattctacagaagtcgaacatcatatatcttgcatatcagttatttacattacaactcataacagtagcaaaattacagttatgaagtagcaacgaaaataattttatgattagggggtcaccacaacatggttattatcattattattattaattttattattagtattaaagggccgcagcattaggaaggttgagaaccactgtgttaaagcatttgttacttttacagtcagggaaggaagcaaactttttaaagccgctgctgtccaccaatgaaattctgagctctcagtgaaagcgccagaggtgcttctgctcctagctctaagccctggatctctctttctccctggggctgtctgaccagtttctgaggagctatcacgtccccgtggccactgcaagcgccacgcgtagccaagcgtatcacagctcctgaacagaggtggaaggtcaggggtggagcccaactttcttctgtcccggagagagatctggtctgcactgcgtgcctgaagctctggtcctccttcaggccattgcggccgccgcccagcccgcagcttcagggtctaaggcaaagtgccgtgtcattgggaaagctggtggcggggcattgaattacaattccatggagctggagtacaactgcgggggtgggaaatgaacagaatcccctgttctcctcgcaacgcactctgactagcggggtgaggccgtccgaggcgggggcccactggggccgcctggactagcttgttcctcttcagggcaacacctgtgagccggcagccattcatccaagtcggcctcgctcctggggcgagccctccgcctgcgccttgaccctgcccctccagcttagcgatgctgcgagtcttcatcctttttgcggagaatgtccacaccccggactccgacatcagcgatgcctactgctccgcggtgtttgcaggtaggaccgccggggagaccctgccaggcaccctatcgggaccagaatagtatcctaaggagtgatcagggagtgcctggaagccaggaaaaagactgcctaacaacacctgactaacgttgaatatcgataagacacagagaagaggggtggggcacctcaggggaaactgaggctgtgagatagaagtggcccaactgtgcttcagctggaccagggctgagggcaggctactactcttttctctggatcccttaaaagatgtctttccactcttggctgcacaatcctgtgaagcagggctctgctcctctccccggaaggccctggcctctgtctatttataacttccccgggcctttactcattatcagaagctagactagcagactgcctgccactgaagcaaacagccacgcctccagaaatcttattctctcattctctctctctcattctctctctctctcattctctctccctctctctctctccctccctccctccttccctctttctttccctccctctctcccctttcccaccccatagtgggggaagtttagctgtcaccattatcaatctttaggagtctcccttactgtcaacagagtaacacctgtttggggcgggggcgttatttaggctttattagactggggtcccctaatgcttgacagcctgctcctctctggtcctgtgactttccacagcaagctttggcagagttgtgcctgcgcttttcttttaggatgtgaaggctggccgtgtttgcttttccaggacaacccttccctatcccgggaccagaccaggacctggctctttagtttatctcccagctctgagacataatggggatcaggagtagagggcaagggtttgggccaatttcaccacccactctctacatttccttctctgccttccttcccggctagtcctcttttcccttcatacctgacccaggagattagagcatcagtctgcccctggccatccagtgaaaatccctttttggtgtcaccagtcatcaagtatgcacatgggctcacaagcgtgtgcacactctggagtccctgggacatctgaaggcttgaggcaagcatggcacacgtaggtgtgttgggagcacacagtgcccagtgtaggacttggtgcatctttggacagagacccagggtgggcagcctggaaagcagcctgcactaagagaagaagatgaagagcttagagaactccgcaaaggttcattgccttctctttctcctgcccacccatcccccagggcaggctcaggagctctagtaggaggaaggctagaggagtggggggtgggggtggggtgggtgtggggataatgaatgggagtgctttctagctcaccagaagcacagctggtagttaccggccccagggacctgtctggatctttcctcaacctcactgtggggggagggcatccatagtcctcctgttagctgctgcctggctcttctgggtatgttcccctttcctggatcccagagctcactgtccagaaaggaagtgtgttgtctgtgctctcaacctgagaagcaggctggctgggatgcataaccccaggatgtcattgtcaggcagtggagaatgcagtctttcccttcccccaggccctggccaccttccacctcctgcgtttagccaaactcttaacccatgtctaaatttgggtgtcttgcagcatttaagcttgctcacgcttctgctgttctccgtcagggccaggctggtgaatgattacagagcagcctctggcctgaggcagagaaatgtgaaccgcacttctgggaagcctattctccctagctgacccagacctgccttcccagtgacgtggtcacaatatctcacagattctctgtgggagagtaaattcagtcaggtctacagggttaaagggcaaggctattatccccttcactaagacttggcccagagagattttgccaaggagctttgccaaggtggtccacttgccagagaatcccctcccaagaggcctgtgaataagaaagggcacatggaatgcgtgccatgtgccacccacaccaaccaggctggatgcccagtgtagggttgagtctaggagagggaacataaggttgtaaggatcgcaatacaggtcaaataacccaaaggtggaggggcctaacttctttgagacagggtttctatgtgtagccttggctgtcctagaacttactctgtagaccaggatggccacatacagagatccacctgcctctgcctcctgagtgctgggattaaaggcctatactacacctcccagttctgacttcttaacgtctttatcacaaggaggggaagtggacattggctaaacaagcaagacatcattttcagaaactgtttctgtaaaaggctacaaaaatcctatgatgagtatccagacttattacacctgacacgcttctgaatagagcctataacatgaaccacctcctggtccagtagcaagcacggttggtagcaactctcattgtcccactttacagaagggaaaaccgaggcacaaagacaaaagtgactagcctgatgtttgctccagtaaggactggatttggggtttcatgcccacgcatcctggatctagtcatctctacgtcacctttactctctctactgctgccttctagctctaggtctgactcagagacagaggaggaagaagactgaattcaggctctggtgtgtgcctatctgcatgtttatttgcacacacacacacacacacacacacacacacacacacacacacacaccaccctgaccccctgacacatcacacacatggttcttactccttactcacctgggtaccaagggcctcagctcttctgtgtggccttcaggcctcatctcaggaggcttccgacttggatccccttctctctgtctggtgggtcagttagacaccacttagtaagattttccggtgtcccagcccttgtcccagagtcctcacacggctgtggaggtacatgcttaggatctgataccctaagtccagcatgatgggtcttaagtccctgaagatgacatgattatagcagggcctctgggggaggggcagtggtgtcactgtgggccttttttatggaataaaagctgagaaggggacaaaggaaggcagacagctggcagccttggtcacagcccagtgtcataaaactattgagagagggaagaagggagggagagggaggaagggaggaaggaagggaaaagggaaggagggagagcggctaagatcaccggctttgtacacataaattgcttaggatttctaatcttgaacttcacattccagctctgccacttttcaactgtgtgtccttggacaagccgctcagctactctgtctgatctggcagaccagacaaagcactttcaacagttcccgggcctcaacacttttttttttttttttttttttttttttgagacagggtttctctatatagccctggctgtcctggaactcactttgtagaccaggctggcctcgaactcagaaatctgcctgcctctgcctcccaagtgctgggattaaaggtgtgcgccaccatgcccagctcagtattttttttttttaactgagtcagttctatcgttggctttgtttgtccattcagtgtcctcccaaactgatacaaccagctgtatggctggtatctgccaatctgcaggcacccttgactcctctgtctgccattcctttatcagtccttctgaaccgaggcactgtctgcctgcccaacatagtgctgctaagcctctctgaatgcggatttctatagagacccccttccctcccccagctggagccctcagccctcccttcccaatgctctccctttctcactgcttgcctgctggcttctatccacctttgtcccctagaggaagtcctagctggtggggaggaagcagggggattagcactgtgctgaaggcaacacctttgcaaggtgtcatcctcttgttttcacaagaggatgctaaatcagtctctgcaagttctgggtcaccccatgaggaaaaggtggctggccaggggcctgcatcatttccaccatagcaggctcttcctggaggtcacatgcttagggctgtagttggaccacttgagtgtttatatcctcaacaacatgaaggtagttactggactggggcatccagagagaggtgaggatagcagagaggacatacagggggttagggacttgcaaatgtgtcctaaaggaattctgcaaactcccgcagagcagccctctgaagagtgagtggtgtcattgtgcagaagtcaacgtctttgcctcagagtgcttggtgtttaggtcctggggaacaaaactccagaccttaggagaatgtgttcaaagaaatcttcagtcttcattcatggttaggtggtatggccaccaagagattatagagaacaggactacaacattcctgagtcttgggagcctggccagtgatgacacccatgtgctcactgggtaagtgggggtcagtgcacccccaacctatacacaggtgttagatttatgttaaatgggctccatgttaaaaagccaggtatggttaaaaaaagagattctctgattttttccaaaggaagctataagaggagattgacatgttccaatgcttaacttggacacaattttgctataaaacatcatattgctccaagacatgtctcttggggacactagtgtattgtcttatgcacagcataaactctaggacagcatcctctcccttatccatcatcacccatgaggggtgacatcattaaagccaatgacgacttttaatttcctttttcttttttcttttttggtttttcgagacagggtttctctgtgtagccctggctgtcctggaactcactttgtagaccaggctggccttgaactcagaaatccgcctgcctctgcctccggggtgctgggattaaaggcatacgccaccacgcccggctaatttcctttttcttacctctatcagtctggaaacatgatgtctaagcacaacaaacaaacagaaaccccatctggaattctacaaactacttcacaattgatctcattcccattgaacttccagttgaccttcttacctttcaactggtgaatagtttgctctctctctctctgtagatgcaaatctacaaatacccactatcatgagacccctaatgccttcatgataaaccatggtaatcattgacatattggcatcctagttcaacagttcctgatgcatcaggttgtccaagattctgtctcttgctctgttctctccaggcaatgtctttgtcaatatgtgatagcatagcatcataattcatattcacaatatctaaaagaaggaaaaggtactggagaagcatgcgttttctccataaaggcacacggacagttacatacatatttcctccttctatttcattgatctcatattcaaatctagctgcaagggagtctggggaaatatagtttttaatttggatatcaagtgccagataaaactgtgggaaatatcagtagaagaaagaagaactgatatggagggtaagctccattctccattttagcttctctctctctctctctctctctctctctctctctctctctctctctctgtgtgtgtgtgtgtgtgtgtgtgtgtgtgtgtgtgtacacatgcatgcatgcataagcaggcatgcctaccttctagtactgggattacaagtgtgatctacttcacctggcttttaaacacagtttctggggctggaactcctttcttcatgttttcacagcaagtactcttaccatttaagctatttccatagccctgttacagctttatcattgagacaaatccccttgagaggaggccccattgagttgaggctccagtctgaagtctgcaggggaccggctgtgtgtttaggggaaggaaagttctgagtgatggacaacagtaagaccaggaagctggagcttcagatgggaaaggcctcaggatgtgctcagggtctgggtcagcagctgttgcttttctggttaatgggaaaggtatgtggagtccctgtttcttggacacaggccaaggttgtgctgaagtcccttggaatagtctctgaaaatattagacataccccttgcagatttcctgtgctgagtattgtggactggagtggggacaggaatagaaataggctctccttctttctctcttcctctctctctctctctctctctctctctctctctctctctctctctgttaggacttgcagaggaagaggtgggggcgaatctaggagtcgaaaaataaagctcacaatatctaaatttcccctagggggcaatgctgccttctctgaaaagtactgagtacctcaggaggcggagcccattctggggagccctgggcagtgtccactgcttcaattccaggctagccctgacctacacactgggaataccagggcactgagccagccctggtctctgacaatgaacaagcaagttcacagctaggcctttcttaaaactgccatgaactctaaggaaaaatgtctctgctgaagtggttacttcccagagtgacccaacctagagggaggtcagggccttcttccctagggactgatacttgaactgagaccccgtgggtggatggaggtggtattgcagagggagccagaaagcagcagtgagtagactcgaagctggaggggagcttggtgtgtttgagaaactgaaaactctctgaaattagaactctggggttaagggcctgagtggtcttaacctctggcacagggaaaggaatttaggcttcatcccaggagaagaggaggcccttgacagatcttcatcagggcagtgacccaactgtgcttgaagatctcacgactgcaatgtgggtaatggaccatatgtggttgtggtgaccatggcacggccagttaggagatgctgtcactcatcgggcagaagcagatgccagtgggtggcatcaggagcttgtggatgcccaggtggtaccgacataacaagtattcagaagagtgacctaaattgcagttaactggcattttaggctcaagtagacttaaatgacagttctaaagtgatcggtcactcccttgaatatgatggtgggttctggatatatatgtatgtgcactgcacacccccaaaagcattacctgaaccaggccgattcactgctttctctgctctgctgtccaggatccccggacatttgggtgtcattggcaattggctctatgctaccttgcttacaggaagcaggaatgggagttgtgtttcttggtgtaggacatataagcctgtgccctcataagaacaacttaggatgcaggcccatggcaaccctgccattgacaggagatagagtcaggtctatcatggaaccaaagacatgcatctaatcagctaggttctgtgtagtgtgtaattataaaaaccaatccactctatggctggctaagcactgccaatggtggtcttcccacctccatggggagccccaagtggcagtctgccctggttcctgtggttagctgctgccaaactgcttgcacttcccaagccacccgctccctgtggcaaacctgtacaagctggctgccgctcacgctaacctcctttgccctgtaagatgacaacttcagaggcttgtaatttaccagccagatttacaacagtaaatcatcaaccaccaaaatgcccacacaaagaactctaaaatcaattgatataaatacaagttgcacccctagattggacaaatgtaccctacatttctcagtcgtctatctacagcatccccagttacttatggctccaacgaccacatggttccggctcatcatcctctcctatggttccatggtatcgctcctatcctgactcctccccctccatggtatctctcctatcctgactcctccccctcccctttctaaaactttcagctccaccttcttcttccactgcccaatcacaggccctagtcttatctgattaattaagatttcacctgacctcacatcccttttgagggggcagaaaaaacagcaatccaagcctggcatggtggagcacgcctttaatcccagcactcgggaggcagaggcaggcggatttctgagttcgaggccagcttggtctacaaagtgagtgccaggacagccagggctacacacagagaaaccctgtctcgaaaaaccaaaaaaaaaaaaaaaaaaaaaaaaacaaaaaacaaacaaaaaaaaacagcaatccacagcaattctgctatgaaaaaactggctgccaagggagaggagcatagtcagagagagtaagagaaggtcctagcagccaaagaaggttctggattctccttcctacttgtctttcaccatgccccactccagtgaggattgctggccctcgcaggggccttcctcttcttgagagcatgtcccaccgtgcctagagttgcagctgctgccatctgctgtctgtgttgtctgatgtggcatcaccagctagagctgaccaatgaggagtgtggagttcaatgacctcttagtgaactgtttagaagacatttatagacagccccatgccatgtgcagaaccctgtttcaggtactacgaaggttacagtagctaagcaaagctcccctagtttcttagagactgcccaatattctaatggaaatgtgggaaagagatacggtgtagacattacctagctattgctgctgaaaagcaacatgcaagggagtcttggggtccgggaaggtgccatgtggctcaattgatagaacactttcctagtttgagctccagattgcataaagtgggcactttggtgtatgcctataatcccagcactgaggaaggggtggtaagaagatccaaagtccaaggtccagtgctcaaggccaccctgatcctagagtggatctgcaaaggaagagcaagagacagcactccagtcagagtgaacagcgcatcagaacccaaagggtgctggcctggcgctttttttttttccccaagataggatttctctgtagttttggctgttctggaacttactctgtagagcaggctggccttgaagtcacagagatctgcctgcctctgcctcctaagtgctgggattaaaggtgtgtgccaccaaatggtttacatttcttttaaaaataattatttatggagaacctgctccatcaggatctttttgtttcctcctcctcctcctccccttcctcctccccccgcctcttctttttcttctttggccatattttcaagcagagcccataggctctttttggtggtgtgttaagatttgaaagcatgactgaatagttcaggagagtagaggaggaaatggaaatagagtttggaggctctttcaaaaggtaatgcaaaaagagcgtgtggttggcgtttaggctgagtggtgtggttcccacatgtgtgtgctgtcaagagagagggagactgggcaacttgagaatcgctgtctgaccgctaagcatccacataagcagagttggttgtctgccctgccaagtcatacagggagcaggtgtggagggcacgagcaggatatcccctctgaaagtgttgtgtccctcaaaatgaaaagggccgggaccatgcccccgccccacccccatttacctgctggagtgtgtgggggtggaggtggggaagagaagcttgggtgctgttgggaaggatcttcctaagctgttacaggatcagacaacacacagatgcgtgctcaggactggaatgacttaagggtcgtgactttagcaactttctccaccttggagggtgaagagtgcaaagattgttgcagtggagaactgcaggaaatcgaatgggcagcgactgggaacgtagtgtgatttgagttagacctcaacaactctaggtgtcgccaggagatttccgtggcagctcactagcagttgtgcctgggtcactgggcacacagtgcgcacttattcggcgtttactgcgagactctttggacccgcgctaccccaggcaacaaccctgccctgttcttgccagccactcatccagtacctcgcagcagcgtttccttctctggagaccctcagaacaaggcaccagtgcctggtccagagtaattccttgctcctccttggccaccgccctgagggcggacccaggccgggatggaaggaaggatccgccccctgggtgtaccttatcccacgcgcagcctcgcattctaagctgaccaagtctccgcggaggcgcagcagaatcaactgctctcttggcatagccatcctggatctgaactctggcagggcagtagtgactgagtcctaagctcctactccctctccgtcccacgcgcctgggctgcggagccatgctctgttgcttgctggcaagggccagcaacctccccaatgtgaagaaggaccggcgcagcgatccagttgccagcctgatttttcgaggtgagagtcctgaagccacttcattcaggcttgggtaccatccgtttgtttctctgcatctagctttggggtctgtgggcccagatcagaccaggaatcccgccccaggactgacagcaaggaaacagcaaatgttacagagtttaggaaaactggaagtactgttctaggccaggagttattactttcccaagacagtactcagaaggaagaaaggctggatagtgggcacagggtgggttggaagacgcagagggtagcggtgtaatcagggccaccacataactgaactggtttgtgagcgttttaatagtgctctttgaaagttaccgtcccatccatctatccatgaatctgactgaacactgtccgtttgaatggccaaatctcaaccagaaggaagaggaactgaatactatggatgtggctttgtcgcaggaagtctgaggagtgtctgggatgtgggatgctttccaaattcaagttgctaagtcttgtgctgcttagaccagaaagggtttctctgctgagactacttcttcctccacatatctggccctttcactatggcttcaggcagattcccaagggaggggtgtctcaggaggggaaagggaagaggaaggacctgtcaaaatgagagaagggacaatagtggtgagtcaggaccccagttctgcagagagagataaataaggagaggagagagggcttcctctcaccaggagctgtaccccggggctctgcggaaaatatatttaaaaaggagagcagcgtgtagagaaactgaggcacggcttgtcacaaaagtgttaacctttgtgacaacagtggggacatcaggattccaagggtttgtccactttacatgcagccccacccccaaataatatgagagacagggactgagctgagctccagatcacgtgtttgttcttggtctcgggtggtcgcgggtgactatccggctgattcttttgcaaagtgtgatttgaaacatcctaggcctccctggtgtttcactggtcaggcttgccagggtgttcctgatgtcaggaaactttcagcagggttcttccttctttctcccctgaccgtctctcagctgtcgcccagactttcactatacggaaattgttagggaagttgggtatacctcagtggtagagcactttttttgtgtgtggtgtgtgtatatatgcatgtaggagaggctggaggacctctggtcgaaggcgctgcttaggtttggttttgttttttcttcctttctttctttctttctttctttctttctttctttctttctttctttctttctttctttcttccttccttccttccttccttccttccttccttccttccttcctttctttctttcttgagacattttgagacatctcattggcttacaatttcccaggtcaatgaaacgccataaaaactggttggccctggagccctaggattttacctgactctgtcacccgtcagtgctgggcttacaaatatttgccaccacacctaggttttgtttgtttgtttgtttgttttaacatccagctttagtcctcttgcttgctaggcaaccagtttcccttatcaggatcctcggcctctcactgttagaccattttcccatcatgaattaaaaagagaagcccttgggcttcattccttgcccaaaccaaaccagaacaaaacatcagataaaacctccagcactgagaatggcactactcttgcatcagataggtggccagagctgttgaagccccatttggctgttgccctgcttcagttatcctgaatatgctcatctgtggtcctccccaaatctcagccttcccacttgtatggagccttgctgtttatttgcacagataagaagggccgtgactgcatgtaacctctccagcagagatgagagttaaccttgggggtctgtattgccaccttctccacgatggctttcagtagaccctgtctaactgcagcagaaccttgttgggtccgctagcacatctccccagacctccatcaaatgccaggactcctgagaacagccacctgtcttgataattcactggaatgacctcttctgagcgggatatggcttttcacttctgacccctcgcctccctcaatctgggcatggcacttgtttttcgtggtactcgagagtcacttgcagagtatatcatccacaaacttctaggaggtgacctgtgaatcacctcctaacatgtatctggtgcaggccattttggacatggagatgataccatggatgatgataccatggacgaaatgagcatgcttgttcatggagtctggcgttgagttgatgcctggctgttagaatcagacccaggatttatgaagcacccagtgtggggatctctacactatagtataccagaatggtgggaagacctttaatagagcccattaccgtagctcactggcccctgaggtggggcccagcagggtattcctgaccaggcacagtcaggattgataagcagtgagtcacagagggacggtggcctgcttgctgagaaaccgtcccacaccaggtgctgtgcttgcctccagcatgaagctgagatatgtgggcctggactggcctcaccctgcagttgttgcctgggcattccatcttcagatgtaatttcaggatctgcctccaaaaatagattctgggctttgggaggttggactcagagctgtctggcttccccatctgaggctattatacaggctattaattaatgttagtcatatcattgatcttgtattcactgattaattacttaaccaaggttgccatgagtaactgggcatgcacgaagcttttttgaccatcatttgtatgaatgagaagtttcagcttcctttcttacagcgtttgatgtctctcttctgccctgaccattttccatcctgtaatacaattatttatatccctctatttatgtgttttctgcattgaacaaacatttgttgagcacatattatctacccattgtcatcccagatgctggagatgcatctgaggacaaaaatcagtcccctgctcctttggagttcaaacgttcctggattggccatacccctggcgaattcctgtctaggaactcaggtggccttgtttccctttctgcccctctcttggtcattgattgggtcccctctccttgtgcatcccctttgtcacccaggcaggatcctgggggtcttacaggaccatctgtcctgagggagtacttctgcctcacctgtcaggaaagaagggcaggaaggccactgaggtgattgattccctagggaacctgtgtcaaagtctgggaacattttgggttgacattcctggggcaacaggtggctactggaatgcagcactcaggggccagcaatgagctcaagagcccatacatggtgcaggccccacagagctcacggcaaggatttgtgtggctccaaaggttaattgtgcaaggtagagaaactctgctgtgatggacacactgcagtgagatgccttgcaatgccatccatacccaagcataaaggctagctatctctgtcctatgctggaattcccagactccctaccttcatctctagggaaccccaggaagtttgcatatttaaaaatatgccaaggcaacatgcatagggtcatacaggtctaagccagatggaatcccagaggggaagtgggaacaagctctgtccctactccagaagttatctccaactgataaccactcacaaaagaaaaattagttttctctaatagagtctcagtgggtttgcaagccacacttaagagcaggccctaggtccagctctagatgaccaacacaaaacaaacttagtgaatttttggagatttttttcttgtcttataatgctttatttgggagatacacacacacacacgatttatgaatatcttttgtttatacattatggtttcggtttccagttttgtgttttttattggatttctgtgtgtgtgagtgctaagtgtgagtctctgtgtctatctgtgtgtcttgtgtggttttttttttttggttctttttatcttatttgttttgtcttattctgtctggtttgtttgttgtattttgttttattttttagatgcctgtttactttataatgagggagaggaaaaaaaggctgtgggtttgggtagtttcttagggtttttattgttgtggtgaaacgctctggcaaaaggcaagttgggaaggaaagggttacacttccacattgtagtccatcactgaaggaagtcaagacaggaattcaaatagggcaggcaccggaggcaggagctggtgcagaggtcatggaggagtgctgcttactggcttgctcatcacggcttgctcagcctgctctcttatagaacccaagaccgccagcccagggatggcaccacccatcatgggctggaccctcccacatcaatcactaactaagaaaatgccctacagctgggtcttatggaggaattttaataattaaggctccttctttcaggcaactctagcttgtgtcaacctgacataaaactagccaggtggggaagtatggagggtccagaggggttggggatagtgaaaaccataagcaaaatatattgtataaaaaaatctattttatttatttttatttcatgtgcattggtgttttgcctccatgtatgtctgtgtgagggtgtcagatcccctggaactggagtgacagacatttatgagctgccatgtgagtgctgggaactgaacctgggtcctctggaaaagcagccagctctcttaaccactgagccatctctccagcccccccccaaatctatcttcaagtaaaaaaaaaagtaataaaatataaaatgaaagaaataagccaagggtactttttgtgttgatacttattcttccacacacccctttgaaagtccgtggagtgttttatttggtggatgtacagtagttaattcaaacaactctcctaagatgagcgcttagatcatagcactttttcttttcttctttctttcctttcttcctttctctttctttctttcttttttttttttttgataggttcttgctatgtagcccaggctggtcttgaactcttatgagtcttccatgtcagtttcccactcgctggtattacaggcatgtttttattgtgcctggctctcaatcacactaaaatataaccaattcttaaaatatactgtcaacctgaagactttcccagtgggtgatctttgcctagatgtttaactagctactttctttgggtgagttccaggagcagggttgctgtggccacctctgccgctttgctgagtttcccacttggccttctggaagtctacgccatcactacactacatgtcactaccatgtttgagggcttattttcttaatatcttcaaatctctaactatctcttgagattcaaatagcatttgttgggctgggagctataacttaggtggtgaggtgcttgcctagtgtgtatgaggtgtagggttccatgcccatcactgcataaaaccaggggtggtggttcagatccataatcccaggtcttgggaggtagaggcaggaggatcaaaagttcaagggcattctaagctacatggagagttcaaggttagcctgcattacctgagatcctgtcttaagaagtattattaatgacatttcaagattaactataacatttatttcttactgagttacctttttatctgctcctttggaggtgggtagtatttgtttttttttagttagttacaaatacttttttacatattaagaacaataacattttgtcatgggtgtttcagttaatttaaaaactgtttatgtgtatgtgtgtttgcctgaaaatatgtctgtgaatcatatgcatgtctggtatccatccctggagaccagtggtagacattggttcccctgtatctagagttacagactttgtgagccactgtctgggtcctaagaatcaaacccatgccctctggaagagcaaccaattctcttaaccaccaagacccttgtttgtttcttcaattgacaaaacttgcatagagctgagtgtggttgatgctcgcttataacccaagaagtacaaagcagagacagcaggagctcaagagttcaaggccagcctggactacacgagactgccttaaagaagcaacaagacaattagcataagaatatcttctccagtgccaagtgaacatcttcctttgagcatctctctctgagtgcactccatggcggccatggtaaccatcacccagtgttcttcctggccacctctttcctgagctgtatgattagacacatgaggaggggtgactgaaggagggaaggatgatgctttgatggtgatgtaggtgacagatgtatacaggtcttccgacgcccaggcttgagtttgtagacagacaatggcttttcctcatcatgttcagggttgcctttcttccctctatcatcagtggtctactgacaccgggattcttattaattttttgacttgtgacatgtagcaagcccacagcagatacttgtgggctaagccaagaggctcctgtggtattagaagctctgcggcttctgagccacagagttcagccacctgactcagggacaatagcagccatggccctcccctgaactgacaatataagggagttttggctcactatttgagactacaacaagtgatcacagcagggaagtcatggccaccaggtctggaggtggttggccacactgtgttagaaatcaggaagtagagagagataaaatgttgagctagaaatctcctttttattcagttgggcagctagggtaagtcttcttcaattggtctaatccagaaaatacttggacatgtacagaaatttgtatccagggtgattctagaccttgtcaggttgacagtaaatataaatcaatgcagtctctctgtccttgctggtctctgcttcctctctaggcggggttctcagtagctaaccatgtgtttttttagtcagaaactttaccctccctctgtccacactgacactggcctgtagtccgaggtcttctgcctgcatcctcaccatattcccaaggactttagagagattgtgataagatacatattatagaaagtttatctcttcttttttggggggatgtggggacaaggtttagctatgtaggcctgactggcctctaactcaggatagttttgagtttacagtaatctttctgcctctgcaacctaaattctgagattatagctgtgtgctatcatgcctgacttaatttatgatctgttttaggatttcaaagctgtgaagagataacatgacatgaccatggcaattcttacaaaagaaaatatttcactggggctggcttacagttttataggtttagttcattatcatcaaggcaggaagcagggcagcttccaggcagacatgtgcaggagaaggatctgagaattctacagcataatctacaggcagcaaggagactgtctgtcaccctgggcaaagcttgaacatatataagaccccaaacactgtctccacagtgacacactccctctaataaggtcacacctattctatctagtaaagccataccctatggaccaagcatttcaaaacatgagtctatggaagccatatctattcaaaccaccataccatcttacccatttcttaaatttttatttatttatttatttatttatttatttatttggtttttcgagacagggtttctctgtatagccctggctgtcctggaactcactttgtagaccaggctggcctcgaactcagaaatccacctgtctctgcctcccgagtgctgggattaaaggcatgcgccaccacgtccagctttttttgtggcacatttcttaattccagtgcttgggggcagaggcaggctgatctctgagttcagtgtgatattattaagtacatacaggggtcttggagtatagctcaggggggatagtgtgtgcttagcatgcagtcagtccctagtgtcttccttagcttgcactctccctctaaaaagacaaaacaaccccccccaaaaaaccagcaagttctacccacaaacaaaaacgaaaccccaagaaaacaaagaaaccctaccagacagttgtgcagttgtcagcagcttgcttctctagaacatttccagacttccttactcagggaacacttccacttccttctccccacctctagcaactaccatcttcctctgcttctgtgatccaggttcccagcacccagagtcattccctccctgcctccctcccactcttcatgtcttcttcctctcctctcctctcnnnnnnnnnnnnnnnnnnnnnnnnnnnnnnnnnnnnnnnnnnnnnnnnnnnnnnnnnnnnnnnnnnnnnnnnnnnnnnnnnnnnnnnnnnnnnnnnnnnnnnnnnnnnnnnnnnnntctcctctcctctcctctcctctcctctcctctcctctcctctcctctcctcctctcctctcctctcctctccagtgaatgaatgagacccaggcttccctacagttatctcgggtactgagtgcatctatagagcactatggggccctccagcactatcccctcagcagaaactgtgtgcactttggaaattattagatgaaaggacacatttcccaaggccagaatcaatggccaggcatgggattggcaagatgccttctcttatttaggtgcctgtcagtcacacgatgagctgggtaaccattcctttcctttaaacaaaagtttgcatttctacgtatattattcatacaaacacacaaactgttcacgtaggtttttgagacagggtctcttgcactagaacctaggactcacctattctgttaggctggctggccagcaagtcctaaggaaacgcatctctgtctccccagcactaaggttacaagctcaggcttccatacctggctttctacgtgctatagaactcagcttcttctgcttgagcaggaagcacgttatcattgagccccagcgtctccttgtccccagtgtctccttgtccccagcgtctccttgtccccagtgtctccttgtcccttgttcttctttggggttgtagtgccataagtggctcctcccaagttcaccaggactgtccgagagtttaccctctgagtcaagacttcataacattccactatggccctctgtggtcttcatcttcagggaatgcaggaagcagaaagtggttagaaaggcacttagcccagggctgtcatggacattgcctgattatgttagcagggagcaccaggaaatgagttttctagtgggccactcaagaagggcagtatgtggaatgttccatgttgcttctggagccacaggaagcagattgtgatagaggaggggtgtggacacttagctttcatctcctgtcccttcaaaaccctacagtggacacaggtcagtgcactgctgggcagctgaggcctggaaggtgcccagttctttaaggcctcaatgccacatgcctatagatgtcagaggactacccaggtgccagtcttcacctgccaccttgtttgggacagagtctgtcttgtctactattactatatgccagcctacctgactttgagcttctgacaactgtcctgtgtccaccacccatctcctggtagggaagctgggattgagattattactgtatccagcctttccgcacggatgctggagatccaaacacgtctctaggcttgtgtgacaagtgttttgcccctgaaccatcttcataacctccaggtccttatcaaatgacttaaaaaacaatgtccagctcccatggaaccagagaagagaccagcagcttacacaaggcaggcctgggtcagcactgagaagacaactggtttcttttccagcgtacttctggccccacggtgctttctttgatctttccgtttacctgaactgtcccatgccagtaagaaaggttgtggtgaactcaagaacagtgcttctgttccctggggaggaagctaactcacagcaacttcagaaagaaaagggtctatgaggatgcttcattatgaataagggttgctaatatgacagaggtgtggtgtctgttctctgaaaagaaaagaaaaatcacagcctggtcagcggatagaaaagcacactgtgagctgctgtcccaggctgggagcccagctgtcttgggagccccagagagaatagctatctctgtcaccctcagggaagatggggcatccaggaagtttgcatgaggagtgtctagtgggaggtcactagacagttcacagacttggataggtgcatgagaaaagctgcgaaggggagggcggggcaaatgtagctatgagcccgagggcggtgagccggagggcagctgggtacctcgcccatgctgtctcacttaattattgtgagttattgtgatcttacaaatgaacaaagtgaggctgagatttattttctatcttcttcaaatcagggtttctgtgtagccctggctgtgctggaatctgcttctgtaggccaggctggccttgaactcagaacttctcctgcctctgcctcccaagtgctgggattaaaggtgtgtgcaccaccacttgctgcccagcctttttgtttttttgaggctgaaatcttttttttttttttccgagacagggtttctctgtataaccctggctgtcctggaactcactttgtagaccaggctggcctcgaactcagaaatctgcctgcctctgcctcccatgtgctgggattaaaggcgtgtgcgaggctgaaatcttggggtcaactgacagggtcagaacaatatccattgtctttttttggggggggggttggtttggtttggtttggtttttttgttgttgttgttttgttttgttttttggtttgttttgtttgtttgtttgtttgttttttgagacagggtttctctgtgtaggaactctatagaccaggctggcctcgaactcagaaatccacctgcctctgcctcccatgtgctgggattaaaggcgtgtgccaccactgcccggctccactgtcatgttaaacaattcacccttttcaccaagttggtgagtgagttgggagttggcgagtgggcacttgccgtttgccttgctgactgcactcaagggaagccaccgctgctgctccctggcatcactccaggctctgacgctcacatacatctatggtattcctcttgctttttcaatagttgtttgtgtgtgaatgactctttgcttgcatgtatgtaagcgtgccacagagccccagtgagggtttggaatgccctggaactggagttaaaaacgtctgtgagctgccatgtggatgtcaggagctgaattcaggtcctccatgagagcagccagtgctcctcattgctgagccacctctccagcctttcctgctgtgttctttatgtccgtgtgctcagagctgcatttaaggaggctcttaatcttcaaatacacacaatataaatatgacacgtaaagttttaataatggctaataattttatacactatcatgtcttgcaacatgaagtgggacatttgtttaggacacttttcataccccacaagtggtgactatggaaaaccaagcggagtgtgaccacctgcattacaaactgtcctggttgggtttggtcagattgacacacacctgaacatagctggggagaggtaatattaagaaagtgcctttaacagattgacaaggttgtccagtctgagggtgcattttcctgattaatgactaatgtgggagggcctgtctcacagagctggtgatacccccccccccccccccgtggatgatcctgggctgtatgaggaagtggaatgagcaagccaaggggagcaaactagtaagtagtgtagaaaccctaactaagacataaggtgatattgaactcgagttggaagagacgagtccggtctcaaaatggcgggccatgatccacaggaaccagagcagctgaggaagctgtttattggtggtctgagctttgaaaccacagatgatagcttaagagaacattctgagaaatggggcacacttacagactgtgtggtaatgagagattccccaaacaaaacattccagaggctttggttttgtgacctactcttgtgttgaagaggtggctgctgcaatgtgtgctcggccacacaaggttgatgggtgtatggtggaaccaaagagagcactttttagagaggattctgtaaagcctggtgcccatttaatggtgaagaaaatttttgttggtggtattaaagaggatacggaagaatataacctgagagacgactttgaaaagtatggcaagattaaaaccatagaggttatggaagacaggcagagtgggaaaaagagaggatttgcttttgtaacttttgatgatcatgacacagttgataaaattgttgttcagaaataccacacgattgatgggcataactgtgaagtggaaaaggccctttctaaacacgagctgcagtctgctggatcacagagaggtcgtggaggtggagctggcagctttatgggtcgtggaggaaactttggaggtggtggaggaaactttggtggaagaggtggctatggtggtggaggtggtggcagcggaggtagttatggaggtggtgatggtggatatagtggatttggaggtgatggtggcagctatggtggtggtcctggttacagcagtagaggaggttatggaggtggtggaccaagatacggaaaccagggtggtggaggtagtggtggaggaggaggatctgatggnnnnnnnnnnnnnnnnnnnnttggaaattatagtggacagcaacaatcaaattatggaccccatgaaggggggcagttttggtggaagaagctcaggcagtccctatggtgatggctatggatctggaggtggaagtggtagatacggtagcagaaggttttaaaataaaacagaaacggctacagttcttagcaggagagagagggaggcgttgtcaggaaagctgccaattactttgagacagtcgtcccaaatgcattagaggaactgtaaaagtctgccacagaaggaatgatgatccatagtcagaaaagtcactgcagcttaaacaggaaacccttcgtgttcagggctgtcatagccacagtttgcaaaaagtacagctactgattaatgtaatgtagggtcaattagatgtacattcctgaggtcttttatctgttgtagatttttcttttcattacatcaggtatattgccctgtaaattgtggtagtggtaccaggaataaaaaattaaggaattttaaatttttcaatatttgtgtagttcagtttttctacattttagtacagaaactttaacaaaatgcagttttgaaggtgtttccttgtgaattaacaagaagatcattgctaattactactttgtatgaattttgctaaagttaactgtaaagaaacacctactgacttgcaatttaggggaatctattctccccattttcaaaacgatgctgaatgggcgctgacatgtggagagaatagatatttgtaggtttgcaatgtgtgttttagataattagaattgggaaataaaaaatagcatatttgtgaattaaaaaaaagactataccaaaaaaaaggctataccagccattggttagcttatgttcacaagacactattttaatgggagaaaagactggcaaattgattgtttagactgaagattttggcagttttattttaaaaatttaccagcctgctcggttcatggacagtgcctaatatttatcatttgttgctaatcgggaagtttgcttttcaagcaaatataagatgaaattttagaaagtctgtctctctcagcttccccctatataggatactgatttcccgaggagactgatggtgatattaataaattgggggctgttatataagaaatacttcaacatttggaagatctgtttaactcattgcatcaaagttttcaaatgtagatgctacagaatcatgagtaggtaagagattcgtttcagagaacaagacagaataactaagtttaatgtaacaaaacaaaaatgtttaatagcctaattttagaatacacatcacaacttttaaaaaacagtttaaacctaccatctgttgagtatacatgtaattttaaggactgtttacaattacctgcaagttcactaaaacatatgtcttgtttacttccagctacctatctggctggattttcttcttagatattaatcaaaacaaaccatcaatgaatacataaacacaggagcaaatatagccacccagccaagcattacagaggtttgcaaaaatgtaaaagtaacacttttagtttttccttgtagtgcaagttattttccacataaatatgtcactgatgctaatatgtattgggcttcttattatttaagtatttattttcattcttactattttcacttattttgattgcatgtttctccagtgtgtgtctgtatgggagtatatgcatgtgaatgcagttgtgcttagtgaccggaagggggcatcctatcctctgcagccgaagttacaggtggttgggaactgcttgatgtaggtgctgggaacagaacttgggctctctgaaagagcagtacaagcttttaactgctgagcaatctcttcagctccttagattgattaccaattttgctttgacacaggcccaggctatctagagctgatctttctacccctgcctcctgagtgctgggatgacagccttgctcagctaaattgattactaaatccgattttaatgtcttcagtttcagtttctaaaccctctgtaaattacaagaatgacattctgggacccagaagcttgagcttggacatgaacagttggtggagctttaggtatctgcagagcccactaacttcccaacctcagggatttacgaccaggagggagggggctgagggttcaccctcttccacattatctagggaaatgtgagtagcttaaacaagtaggaacctggctaagcccagccacagctcaactctggaggactcagggctcaagttccaggaacatgctccaggtcttagaggagatttcatagcccatgcagtcatggtgaccacaggcttctcaataaagagtctatgtattgtatgggaaggactgaagacctggctgaggtgagggttcctgggctggctggtcccttccctttcactattgtgcagtcagacactgtgtttttgatgctccctagaaaagtggggcaggtatagccatccatgcccctgtctgaacagagtggccatacctagattcatcagttcctatggccctttccttcaaagctgcttttctctgtagttacagatgtctttgttggaccacctggtggggacttcctcactctgatgctgtcgacccactgttggcctctttctggggatcaccttgagagaggagcagacctgcctgccccagcagagcccagagttgcaagccagactcaactttgttatgaacatagcctgcccatatattccagtgtccatccttagaagcagttctccctgggcatcttctatgtgatctttccttcaaggctcagtcacccactgcactaggaataggcaccccggccttagtgctccctgctccatagttgctgcagctgtttgctacctatggtcacaagggccagttctcagaagtcacagtgttagttctagttgtctaccccgaagcttcatgagccagataggactatctgagtctgcttgtttctcataaaccctttccaggtctcagtgaggaaggtaaacaatcaaatccatcattttaaccagttaaggttaaagggcctggtggcatagatctgtaatgagaagctgaggcaggaggatctgaagttctagagggagttcaaggtcagcctgtaacactgaatgagatcttatctcaaaatttaaaaaaaaatagaaaaataggctggggatgtgactcagttgtagcttagcaatagggtgcttgactaacattaggacaaccccagatacaatccctagtgtcacaggacaaacaaagtgaattctaggtaatttgggggttaaatattgaacatcagttatgatctgattcaagagcattgtcccacaaactcattgctatcaatcactcccagtttaccttctccatattctacccctgggaacccagaatctatggatttgcttgctctcgacattttatgcaaatgcgataatacaaaacaagtatttttttttaaagatttatttatttattatatgtaagtacactgtagctgtcttcagacactccagaagagggcatcaggtctcattacgggtggttgtgagccaccatgtggttgctgggatttgaacttcggacctttggaagagcagtcgggtgctcttacccactgagccatctcgccagcccaaaacaagtatttttttaaaaatcttttaaaagatttaaaaataatcttcttggaagattattcatgtttgtttattaattttatttttatcatttaaaaattgtttaagacagttaccccagtagcctaggctggcctcagactcaccttgtagctaaggatgaccttgaactgccgatcttcctgcctctctcccctacatactaggtaagtactctaccaactgagctacatccccagccccaaggaagggttcattttcactagaggtctgaaaagtcagaaagaggctggagatgcaagtcactggtagagtacttgcttgatatggtggggcctgggctaacctgcagcatagtgtgggtgggggccacgtagaggatctgggagaataaaggagtaggaagacaatgaccatgaggacacaattaacgaggatacagcttcagcattttcttctctcttcccttcccttcccttcccttcccttcccttcccttcccttcccttcccttcccttcccttcccttcccttnnnnnnnnnnnnnnnnnnnnnnnnnnnnnnnnnnnnnnnnnnnnnnnnnnnnnnnnnnnnnnnnnnnnnnnnnnnnnnnnnnnnnnnnnnnnnnnnnnnntgtgtgtgtgtgtgtagatttggactaggttgacaaatagagacctcagaagcaaaatctttctggcaaaggcgggctctgtctaggtaggtgatgggtggcttcttcgtcatggctgatcctgagccttgtaagtagtggtaggtgagatcgccaaagctcaatgggccagttggctgtgggtgtaagtggccaggagacatagcctggcaggatctatagtgacagtacttaggtaaggacagggagtcagtagtccctggtgagtacagcagggtgcagctgtgttgggtgagctcaagtgcctggtgctgttcactgagatctggccctgaggagcatgggctggctgcatacagacctgcccacaggggagcctttgtctgggaactgggtcagctgtatctgaggcagggaatcttggttctgtgaacctggaggggggaagctgggaaggaggagggatcaaggagccagggaggagcttgggcttcgaaacctgccaagtttgaagtcttagaagcatgaagaaagaatccaagccattgctgtttctgtgtggttcagcactgggtgcgtggtctggcatccctgaggaaggacagggcactgtccctgtgcttctgaagtggggctgtagggcggggagccagcctgtgcctgaggttacacggtacagctctagtcatggccctcttttgcttctgaaaattatacatgactttgggcatgtaagtatataaagtgggtaaattaagtatttactgataatagtccacaaaggaatttaactagacgtggtggtgcatatcttcaatctcagcacttggaaagcagaggtaggcagagctctgtgagaaggaaactagactggtctacatagcaagttccaggctagccagagctacacagtgagattaaaaaagaatttttttttacaatttttaattttataattgttttgcatgtattttaccatttatggaagatgaaaggaaatttgcctcctgaagtggacatactttagttttacctggataatcaaggcttggctgagtatttgatactgcaggatagagaacaacattttgcagagttgttcagtattttgattctagaaccatcagtgttgagaattctatttcacttaaagtacacagtgcaagatgacagaaggatgtctagggccattttagaaaccataggaaattctgtcctaatcttaaatcaaaattaaacattttaaaaatgaaatccagcaacccaaaccacagttattaagatgaaacatgaacataatacaatctaaagatgtaagaatccagtacttactgtaacagggcagaccttagcacgactgactccatgatggaaaactcagcctgtagacaacagcaacagccaaaaggatctaatccatccaagtccgtagttctgggaaagcctctaaatgtactaaccttgctttttgccttctgtagttccacttctggctaactgctctcaatagcctagaatatgtttttgttttgtttgtttgtttttcaagataaagtttctctgtgtagctctggctatcctagaactcactctatagaccaggctgacctccaattcagatattcacctccctctgcctcccaagtgctgggactaaaagtgtacaccaccactgcccagctcagaacatgattattgtacttaaaagcttactttctcaccccgagaaaggcttggtgctcctctgggatcctaaacacccagtatggccgctgcccagctaataagacttgctattgacttaaccccatgtctgagctgtcttctctggtggatgccccacaacattgcatgctgaggagtgacagtaagaaagtaataggaaatagtaatgttttctacaagaccagaaaactttgtaagtacgttaaaaaaaaaaaaaaacccaggggtctccagcgtacagtagtcttgagtctgagcccagatgtttgaggcagtgttgtgggttttgcttggcatgaccacatgcatggtgcaaggtgcgtgtggtgtgtgctcagaaccaaggcttcagtgaagggagtctcatgagggatccgggtgagcactgccattatatgttttattttaaattactttttggtcaaggtgtacttagaaaccttttatttcctttccccttccttccttccttccttccttccttccttccttccttccttccttccttccttcctccctccctcccttccttccttccttccttctttcctccctccctccctccctcctccctcttttttcttcctttattccttcctccctccctctttctttctttctttctctctctctctctctcttgagtttgtctacatagccctggctgttctagaacttaatatgtagaccaggctagccttgaatttacacagatctgcctccaggggtgccagaattaaaggcgtgccctatcacaactggctaggtttagaaaattttaccattgctaagtgtttttgcagtgcccatattacattgtgagatatatctaacccaaggtttatgaagctgtggcccacagttgttaagatggctcactaggtaagggtccaatcatggcacaggctcattaggtaagggcttgaccatggcacacgtgatatcttctcttcatacatatgcacagtatactcaactacaacaacaactactacaataataataaaagtaaaataaaagctgtggcctttgctatagcctcactgcttcgtggaaaggtaggcatctcaatgagcttgaaggtggactagcacctcaggagcaactctggacacggggtgtgtgggctaggaagggcccannnnnnnnnnnnnnnnnnnnnnnnnnnnnnnnnnnnnnnnnnnnnnnnnnnnnnnnnnnnnnnnnnnnnnnnnnnnnnnnnnnnnnnnnnnnnnnnnnnnnnnnnnnnnnnnnnnnnnnnnnnnnnnnnnnnnnnnnnnnnnnnnnnnnnnngtggagaagtgaagggcagtgagttcttgtggaaattcaagttgtccccggagcagccttgttggaaatggagcctcctggccagtcccaggctaaccatagcaacagagaaacctcccagctggtactaacctagcttagccaggtttctggtgttggggaagcctggtctatgagacaatccatctctagcagatgctgctgctgtcctcaaagacaggaaacagaggctctaagatgagactggtgagttcccagaagctatgctggagctgtgtgtggctggagggcaggtatttgggttattctcctggctttgttatctctgcatttcagaggctcccaaggcccctggcagctggcttctgggatctctgcagagttcagttcctctgatgacgtaggagttgagagtttagtgaggcaaaggtggacaggccgggtaactgcaggccacggggaaatgcaggtttcattttcatcattgtattcagtcctttcccaggagctgtgggaggtgtctgagaccccagaggcagcagggactgtagacatagttttgacaattgttggtcagtttggggcccggctggacctcctggagacagctctgtaggtcatatgttttgcagaggggtcatatgtctttaccactagcccctgctggtgaactctgactcaccagttttcacgtgagcaggtcactgcaggccagcatactgagagaacagttcctcagacctccacatccagaatagccagttcactagacagcacttaccagaacttactgtcttacagataaccctgtgtgatttttttaagtttcccaagcatttatcttcatttagcggttctggcaatttaaggattaaactgtaatagactaagtttaaaattaaggccacattcataaagatctgcaaaaggacagagctgcctaaacaccctattctgtgagggagtgatcagagcaagccagtccgtggtcttcataacagctagcttaaatgaggtgaccttatttaaagcagccggagggatagggtccctgcatggtaattctgtaatgccctcatgctgtagtctatgctcatgatgacgagcttgtataagagaagaagaaatggttcagcaggtaagagcactgactgctcttcctgaggtcccaagatcaattcccagcaaccacattggtggctcacaaccatctgccatgcgatctgatgccctcttctggtgtgtctgaagacagggacagtgggcccacattcatgaaataacatgaaataaataaacaaatctttaataaaaagggaaagaagaagactgcgctatggagatggctcagatgggtaagtgctcgctgtgcaggcgcgagggctgattagctctctagcactcatgggaaattaagcccacactgagcttagccccagttagctctctgcctcctgcttgttcactgagatatgagctctcagcttctgctccagcgccatgcctgcctgcctgctaccatacttcccaccatgatggtcatggactctaaccctctggaaccataaggcccagattaaatacttctttttatatgtctccttggtcatggtggctcttcggcaataggaaagtaactaagacaagttcagtaagtgtttttaataggacacctcctcaacacctgccagccacacagtctggtcccgagtaggtggtgactgttattgtcttgctgttctgaatcctctgttctgacccctcttaatgtcctgagggggtcttgctgcagccacaccctgggattcctgacaatcttctgtgagctcaccattgtcctctggtagccttcttccaatcagatagctcttactcataagtgggacttccctctcccagtctctctctctcacctttctccctctacagatccagagctgctatctgcctctagaaaccctcaaggccttccgcatcctgcataacctgcctccctgcacctcagctcacaagtctgttgctttgatcccgtctctctcctcacccactgtagcccagggaggcctggaactactggtcttggggcttctgtttcccaaatgttgagaattcaggtgtgcagcgccacacccggttctttacttcagcttcgtgttttaaatgtacgcagctcccagcgattagtgacttcttttatcagacagacagctctagattgttaaactgtttcaaccctggctgtctcttaaacatctaaaccctatctcagccctgcaccataaggattaagaaaaaaacctgctggctacaactcctaaccaacaggctccctgcaactgacctgttatcaaggaaaaaaaaaatcagatttctccaatggggtcttgccaggtacagtaaccactcccaggacaggctccagacccaggagtagttggccaacacaaaacaaactttataatactcttgtagaacttgtgtctcatttagcttttcttttcttttcttttcttttttttttcttttttttttttttttgagacagggtttctctgtgtaccttggctgtcctggaactcactgtagaccaggctgacctcgaactcagaaatccacctgcctctgcctcccaagtgctgggattaaaggcatgcaccaccatgcctggctcatttagcttttcttggctggtctttttttttcagtcttttgtgggttttttttttttttttttgtatgtatttcttatttgttattgttttggtttgtctgtattttttaaggagaaaatgagagagagagagagagagagagagagagagagagagagagagagagagagagagggagagagaatgggaaggaaggaaggaaggaaggaaagaaggaaggaaggaaggaaggaaggaagggagggagggagggagggactttaactccattattagcagcgagtccctgtctggtactggggggctggtgtgtgtgtgtgtgtgtgtgtgtgtgtgtgtgtgtgtgtgtgtgctcaggctattttcccattggaacactgggataatataagctatgtgaggcaagggtgtgctgtaggtgaataacatgacagtgtgtctgctaaaagcccatgaatgggaacactgaggaggctaagtatgggggccattggccatagcaggatgcacacagaggcacatacattaatcccacagcacgtgaatgtgctctgcatgccttgatatgtttcttatataaatgcatacatgttctttcatcaaatgaaaggaaatggactgcagagataacatagtgtgcggcacaagcatgaagactgagtccagttcccagagctcatgtaaaagctgggtgttggtatatgcttgtacttcagtgctgggcaaaggagacaggtgtgtattatgaccagccagcccagcctaattggtgagtcccaggtcctagtgagaaagccgcctcaaaaaccaaggtgttctgaggaatgtcaaacctgtgtatttatacacgtaagaataagttgggccttctatagctgatggaagtcatggatgaagtccgaattgtgccgattttaacttaaactttaaaacctccacaaaagtgtgtatgtgtatatatgtgtgtgcacatacttgtatgtgggtatacatgtatatttctgtgcatgtgtgtgcatgtgtgtgtgtatgcatgcttgtgtgtatgcatgtatgtttccacgcatgcatgcatgcatgtgtgttcatgagctggcgtgtatgcgtgtgtatatgtgtatgcannnnnnnnnnnnnnnnnnnntgtttttacacacacacacacacacacacacacacacacacacacacacacacacactgttttgtgtcattctccatgtgtgtgtcacttcacagtatatcacatttatttttcgttgtcacgtgttattctgacttgcacacacctctattaagctcactttgccacacagtgatagagataacgcgcatgctctttactcggaaatatgctgctgtgtgctcctacctgtctcactgtgctcactgtgccctgactggctggagtttcagttcttcccaatttcttgtttcaagtgattatccaatgaacaattttattccgattccaatgttttaatgtgtcaaagtttgtggggtttttgttgttgttgttgttttatgggggtggttttgtttttatttgtttgcttatttgttttgtttgcttgttcgtttgtttgcattggtccctggaagtgggtatatatgagtatatatataaaatgtttggagggctggggaactgtttgttgttctaacttgaggatagatcctgatgcccagaactcatttaaaaaaaaagtcagatgtgatggcacacacctaatcctaccctagggaaggcagacataggtggacgggtctctgggtcctggtggccagccagcttagcctactcaggcaaatttcaggccagcaagagattctgtcacgaaaaccaaggcaaaagctcataggcacagctgtaaacacatgtgtgccttctccccaacacatagacaagcacacacatatgtatattgcacaaagaagcttggagattcttccaagttgcttttcaaaaataatcaaacttgtgtctaacaacagtgtagacagggtgtgtgccaatgtttttccttttggcagtgtgatggtcaagaggagatatagtgtagcttgtgtttccttgactgacaggtaagaatctttcatttgattattgtcccctctgtaatttatccttccttccttcctgtctatctatctatctatctatctatctatctatctatctatctatctatctatctatctatctatctatctaactaacatttctattcctattttgagacagagtgtagctatgtagcccaggctagtctaaaattcacgatcgcctgaatactgagattgcagaccaccacagctagctggctgcttatttatttatttgtttgtttgtttgtttgttttatttagataatgtttttctttgtagctcaggctggccaccacagctttatttatttgtttatttatttatttatttatttatttaatggttttctttgtagttcaggctggccaccacagctagctagctagctagtttgtttgtttgtttgtttatttatttatttatacaatgattttctttgtagcccaggctggccctgatttctcttatcctctgcctcagaagtgttgagatcatagagtgattgtctacatgagcttttactttccttgacctcttcctctggcttcatcctaactctgcacacttgggctcttactagcaatcggcacacttggtccactcagagcacagaggaccttttcctctgctctcagtggcttagcttagggcattctctctcagatctgggaatccgtgagggtattttgaaggctgagcttcagggtgccgttgtagaactgggaagaacaggcacagtagggccaacctcgattttgcagactgttttctggactccccaggaggcagtttggggcccagattcttacagctcaccatcccattgttctctgtgggctcaaaagtgctgggcacaccctcattttcaaggattttaaaaactatattttgtcttggattctgtccaggacatccctggatttcaggatactatttcttttgtctttctctggactgaagtggaaaactatttcgagttacctctggacaacctctagggagtcaggtcccggaaggaaggctgcctgaggccaggagggttcaggggctggggaaggtcctaccatctcttacttcctgtctttccctgccaggcatgcatagctcagggcccaggaggctcagatcaggagtgtttcttctctggagtgagtgtgtgtgtgtgtgtgtgtgtgtgtgtgattgtgtgtgtgtaccccaggatggacaggggctctgactcatgatgacagtatgcaactgagtcactggagattgaattgtgatatatatatatatatatatatatatatatgaaaaactgacccatagtgaccatccttgaatattacaagtttaatttcacgattataaaaaataaagagaagaaatgagtacagagacagcccgcctgccctttacttctgttgattctaattttctctcactatgtctcccttcctctctctctgttctcctcccatttgaaggtaagccataatcaccatagttgtctggcctaaatattccagggcagatttcttaagatgggggctgggcaccatgttaacctcagtagatacattacatggatgaacatgatagatggaatctatgctttagagcatcctattaactgatcaagaaatgcttttccaaacagtgcccgcccctccttgagaaccagatgcagtctagagtcccagatcgagtcatatttctttagctttctagtaattttttaaaaatattttgtttgacttttttgtttgtttgtttgtttgtttgtttgtttttcgagacagggtttctctgtatagctctggctgtcctggaactcactctgtagaccaggctggcctcgaactcagaaatctgcctgcctctgcctcccgagtgctgggattaaaggcacgcgccaccacgcctggcttgtttgactttttaattgagtctcatttggcccaggatggcctccagcttgtagtgtcactggggtgacctcgaggccccctgcctccatcacccaagtgctgtagctgtgctggcaagatctgctaccctagctttctttaatcccaccatctttatctcaatttatttttatttgaaactttctaattaaaaagattcatatattatatgtgtatgggtgtttgactacatgtatatctctatccatatcatacatgggcctgatgcccacagaggtcagaagcgggcatcaagtcccctggtgctggcattactgatggttgtgtgggtgctgggaatgaagcctgctctttattctccctcctttggaaaccatcggatgctttctcaagattagatcactgtatgctgctgaggcggtgtgtttgtcttaggctctggggcctcgggtgtctctctgggtatgtggctctctgtggcctggcctggtgctgatttcccactgtgtattgctttgcatgcttcctcttggggttaaagccatgctctgggcccatgcaaatgtgctgctcctcagaatgtctccctcacctagcacctgtggtgtgtcttccctgatctgccaggatgcggcaaatggtctccagcttatgtctgactggcctgagggagccttcctacctacaccccactcttgaagtcacagtggggtgccaattctgagcgacacacgcagatctgtgagcacactgggctttgtcgacccaggctttccctggagctcaccctgcctctggtcctttggttccgtgtgtctatcacggagaacattctggagggaggaagaagccattccttggctgttttgttgaactcccactgctgggccacagtctccctgtgccatgggtgtatgtgtaagtctgaggttaatttggggtatcaatccttaggacttttcaccttgttcttcgagacaggggccccctcatactggctatgctggctgtccagcaagctctacctccctggcactggggaacacgttcatgcctggtttcttttgtggatactgaggatcaaactcaggtccttgtgcccaggcagcaccgctttgcaaactgagccatgctcccagcctatcctgcacggacttctgagattcatcctttttattctcccttcagaagtcataggagcctcagagccattgagtaaatgagaatgtgcaggggacatcaaaagagcaagcagggcaggggaaatggaagtggaatttacccagctagctgtgcgtcaggccacaccctgcctgctggggaccttccttgctgtctccagggactgcctatgctgggagggtcggtgtctctagatcaacaaggctcagcatgttagagcatcagaacataggaaagctgtgggcaggcgtggcttgtccctgcagtaccagcactgaggaggctggagtgggcggatcgtgagttcagggtctgtttgaactatgtaataagaccttatctcaagtaaacaaaacaaaatgaaaattatcagaaaacaaaagcatgatgaatatggttcagaacaaaatgttttgcagagatttggtttttttttttaatttttttttgttttttgctttgttttgagttgaattagattaaattaatgagctgtacccttcccacaactgacacatttgccggctctagtgtgatattttgatccagtactctgacctcactagggcgatgaacagtgccccctccttattgtgcctgtgtatttggagccattaagcccttctcttcttgagtccttcctgtgctatggatttattacatccacgtgtgtttaagtacctgctatccagcctgccactactgccccccctccccaatcaaactactagtaatcactcttatacattccggtctctttttttccaaagatgaccttgaactccaaatcccctgcacgtacctcccaagtgatgggattacaggtctgtaccaccatattagtttctgtggtgctagggatcaaacttagggctactagcatgttgccctctgagcctatcttcacaatcaatttaaaagattattttagatgtatgtgtgtgtacatgcgtgtgcacgcatacacacacacacacacacacacacacacacacacacacacactcacactacctgtatacaaagcctatggagacaaaaagagggtgccacagcgcctggaactggagctatgagaaattgttaaccatcatgtggtgcttagaaaccgaacccaggtcctctgcagaatcagcaagggttcttagctgatgagtcatctccccagcctcccaccacgatggctgagcacccacatatgaaagggagtattcatgatttgtctgcatctgtttcatttaacatagtattccctaggtgtatctgtttggtgccatgatagaatattaatcttcatggctgaataacatttcattaatataacctaacactccagaatgtatatatatatatatctcacatttaattatgcattcacctatgggtaggtacctaggtggattgcatgcttagctgttgttaacaagaacaggcaagtgtgtcttttacacgctgctattttttttggggatatatacctggaaacatgacatgcctgggtcctacggcagatctggttttagtttcttgaggaacctccatatggctctccaaaaaaagcagccctgatttttcattccaatggtcttggcttggcatagatgattccagagcttttagtgtttaatcaccaagatagccgtgagcttcccttttcttaggcagtagatagtatgatataatcctttatggttgttttagcgcttgaccaagtcttgagaactttctgtagaattatattattttgtggcagaatttcatagcacagatgtgctgtgctgtatctatgcagtttagcagtctcgggtggtggactgctgggttgcttttgtgctttgttcttacaaacagtgaatcagtaagactcaatgtttttaaacaacattgtttccattttttcacatttcattagcataaacttagcccccgcccccccccccccccccttcgccttcacacacactgctcaaacccagcttggaggctcccactcggcatctgtctgacagggcactgacactcatgggtgaattagggaataaactctttcttcctgggggagatgtgtgtctgtcaaatctcagctgctctccttccccatgcccatcttgccttctctttctctgggatggccgagcctctttcagcccccacacttctactcccatgtaacagtgtttctgaaacaatgaagctaagagaactggccagagagggaaggctggagggcctgtgctgtaaaggtggggccaggcccacagggccgcttctggtgctactgactaggtaggctctgccacaccctgctggcttccacagccttggcccttgcagggttccaggtccctccttgactcactggagtcttgttgatgccacagggcacctgtcagaccaccgattggtgcccatagaaccttgcttagcagacacctggccctagagcttttatttcggtgtctgtcttcagatgggacagaccagggtttgggctttcaagattgggtcccttgaataaagttacagggaaatggaatttggggaggggctttaatgtcctatttcctttacagattgaaatggatgaatttgtggttttctccacaacctgtgatggagcctcagacctcattaacctccataagtctctgcaacttgccccttcccgctgggctatgcttttacatcactcgtgcagatgggaggctctgtctctttgactcgtcaccacagcctcccacttgggtctttggacaggtggcctccagcccttcttcctcaggatataggacaacctggtaccttggagagactagtccctgttcctcagggggtacatttgatggcccccaagggggtatcagggaggaaatagcagtcactcctaggcagctctgggggcagccggaagggctagggctggcagaggtggagccggcatttccttctgcatttcctgccattgttcaccaccccacttcctggaattctccctgctgtctgggaggactttgccagcaagccaggctcaggtggtccacctttaccctgggcctctggccacggctcctaagaccagcttcagccacacggagctatggagctagactgctgtttgttgctacctgactgctgctgggcctggcctttttgctgccaaggccagaagcctcaactgtagatagacactgtccacatctgcaggctcgctggggcaggttgcttggtcagatcactctggtctgctgccaaggattcccgtaaaggacagagtgactctgatttcttatgtcacagagaatcttgctctgaggacactctggtcacaatgctggggacaagcgctattcccgtgatggtccttaggttacacctaacaagagcccctgtttaggaagccatagcgcaaagcttcctgtaggtgccagggaacagagaaacccacagtctagacgtctggacctttgtgggacttaaaaatcctataataacctccctttattctttctttaaagaaataaatgctaagctatgtgtggcaatgcactcctttaatcccggaacttgggagggagaagcagtaggatctctgtgagttcgaggccagcttggtctacagggttatgcagtaagaccctgtctcaaaaaaaaaaaaaaaaaaaaaaaaaaaaaaagccaaaccaaacaaccaaccaaaccccaaaataaagaaatgtaagaggagggctgagggatggctcagtgataaaaacgtgtcctgtgttagtgtgaggacccaagttcaattgagcttctgtgatcccagtttgcctacaggaacatgggagggagaggcaagagatcccacaggagtatgaaaggcagttggcatagagtatggaacagaaaaacagtgaagagaccctgcctcaaatgaggtaggaggtgagaaccaacaacacagctgtcctctgtaacacacaggcacacacacatgttcacacccacaaacatgtatatacatacacacaaacatgcatacacatcaacataaacacacacacatacacatacacccacatacacacaaacatgcacacacaaatacacatataaacatacttacacaaccatacaaacacacacacatacatacttatacaaacatacaaacacacacacagtgtttgtatttctagcaaaggaaattgtaaggtggctcagaacctgcctgcctcagagggtataaacacatgtatttcattgccagagagtttaataattatttatcacataggtttacaagttacttatttttaattaatttgcttagtgtatatgtgggaaggataagcatgcacacatgtgctcttctgtgtgggatatggaagtccaccgtgatatcactctcaggaggaacactagattttaacaagtttaaatgcacagttctgtgcaacctttgcacccatccacctatagacctctttcatcttccaagcagaaaacctgaacccattaaatacaattttcttctttccttcccaacagctcctgacaaccaccattctattttctgtgcttgtgagtctgactaggtgctttgtacaagaaggatcacatggtatttgtccttctgtgtctttagtctaattcttctttattatttatggacagtcctggggactgagcctcgtaaatgcaaggcaagtgctctaccatggagctgctgtccagctgtgccaagacttgtcccaggagaagtgtcacaaattcctgaatgctgactaacagtccatgtacatgcacatttcatcttgtttgtccatctgcctacctggcctggttgctcctattatttatttatttatttatttatttatttattttaaaggttaatttcttgttttatatgttatgtaaattttgcttgcattcaaaataccacttgcataccttggcccccagaggccagaagagaacattggaacctctggagttgtagttacagacagttgtaaacttccatgtgggtgcttggaatcgaattcaggcctcccagtagagcaaccagagctcttaattcctgagctatctctagctccacccctactccactgtctttaacctttttttttttttttggtttttgagacagggtttctctgtatagccctggctgtcctggaactcactttgtagaccaggctggcctcgaactcagaaatctgccggcctctgcctcccgagtgctggtgtctttaaccttttaaagacaatgtcttgtgtctcaacttcattatgtaactgagtataaccttgaactcctgatcctcctgaactctgattactggggttataagtatgaacaaccttgcctggcttatgtgatgctagggatgaaacccagggctttgtgcacgctaggcaggtactctgccaatggacatggagcaggtctcattttctgatgtttgaggatttgctgcttgaatgtgttgtatagatgtctggagtcagaagtggggctagagattgggttgcctgtctacgtttaatgttccgtagcatccccctccattcttctcaccagcagcatgctgctcacattgcatccacagtcaggaagcagagagacatcaacgatgttgctcagcccactttttcctttttgggcagcaggcccccaacccttatagcggctctccccctctcaatgaactcaatctagaaatgtcctcacagatctattcagaagtatgtctactggatgactctggatgctgtcaagttgacagtcaacactaaccattgcaagtccatccctgccaacctgacacctacacatatcccttttaagacagagccttctaccttgtccctataggctcaggatcttctcataatgcattcagcccgacttccgaagtacacatagtttctagcaccatcctaatggagatgagatggtgtcttactggagtagcgtttgtaaacctagctcattaggtcaagattcaaatttcactccatgggtctatttaaacccacatgcagactactgttacagagaccagggcaaggatggtctctgatactgggctagctttattcattaggagaaataagaaaaagcaatgccggatatgtccccatagctgtccccaggactgatgaggatttgtgccctgatggctatccgtagtttggctcccagggagcaagcagaggctgaagcagactctgatgacaggtttttggtgacacaggccacttgctgccaccgcagaggcacagagtgaatcgtgtgtggtttaggacccacagaacaggacttattcctctagattctttgaaaggccttcctcggccagccagccagtgggccactttcccaagacctcgtctcttgccggtgacaagtgtggtctcatgtatgtgtgctggacgtctggtgaaggggtctgtctcctagaccaacacgttttctccctgggtatgaagacaggaaggtgtcttgcttctgatttgttaattggggctgtgcttcctgggaaactggcgtagacagactgggtggtgggttcagccagctgaggcatgggggcatcaaaggtgtgaactgggaaaactgcctctgtcccatggtgatgctggcccggttcattaagatctgatggcagcactaggggtgtggctcagttgagagagtgctttgcaaagcatgcgtgaagccctgggcttgatcgccagcactgtataaacagggtgtggtggggagcacctgcaatcccagcacttgggagataaaggcaggagagtcagaagatcaggatcattctcagctacagagccagtttgaggtcagcctgggctacatgtgatcctgtctctaagtaagtaagtaaacaaataagtaaataagtaatctgtctggtgagaatctgcccctacccacggcaatagcatggctaggcttctaaggccagacagaaagaggttaaggttgagcttggggaagggaagggcaggcgtctctgatctctctcttctccttaagatggtaccataggaactatcttacatgggtatatgctaccaagggaccatctcacatgagtacatgttaccatgggaaccatcttacatgggtacatgctatcatgagagcatctcacatgggtacatgttaccacaggaaccatcttacatgctacatggcactcatggtaccgtgggtacagagaaaccttaaaggactccgaaagaactaggcggtggaggaggtaagagacgagccaggcacattaggctggttctcacccttggacttctttgtcttcccaggttcctgggggaagccaagatcccactccaggaggtccttgccacccccagcctctctgccagcttcaacgcacctctgctagacgccaagcagcaacccacgggggtaaatgtctgcatgtctctgtccatagccagcttttgtttggggccctgtgtcttatgccagaggccagctcctgggagccaagcatggctctccttggctataggttagggtgctagaaaagattcatggttgggacctgcaaggctcaacgaagcctgccacgcccctacttggctacttctgagtctagcctactccgtcacctcctgtcctgtgttctagtcagccttgagtggcttccttagcctgcctggcagactgcccagaatcattgccagctccattctccagatagggaatatctgagtcatctgggtcacaggtcaccaggggagggaggcagacaactctcccctgcccacctggggccagtcaagaccccttccttttcctctcttgtcggtctagcccctcccccagctttcccattctctcctagtctgcacaaaccattcccagtcctccttgctggcctcctgttatttttagtggtctaaatatacccttcagggttctttcttcctgttcactaggattctgggtctgtctacatgacaggatgctactgctgaacccgacatacttcccagtgaagcctgcagggttgtgggctgtcagtcctcatagacaggctgtgcgtgcgtgcatgtgtgtgtgtgtgtgtgtgtgtgtgtgtgtgtgtgtgtgtgtgtgtgtgtgtgcatgcgtgcgtgcatgtatgtatgtatttgaacctttgactggttaggaaagtcgagttgggactaatttgggctgggctgaatgagaccatactgggttcttactgggaaaagagagccactggggttgctttcacgcagtgttttctgaaacggtctcagtcacttccggtgtcacctgttgccttctctttgagctctgcagtcagctacattagtctaggaagcctccagtggcatttgaagctgactcttcttggaccctgaggagactcctagctgtttctgcagcctggtgcaccgagcagctagagatatcaaggtttctgtcaagagcagcccttggagtcaagagacctgtctggtgctttcctgttaccctctaggttgaagcagcttcctccctgtagccttcaaccaaaggctcttaccttcctgccaagatctccgctcctttactccaaacctaagacactgatgttttccacacttactccctccaaactcactgtgctctgggatggaacctttcagcctggtttctgcaaactgcatactgaggaaggctggaaatgatctgcaatccctgcccttggcctggctttcatattctgtttgcacttcatactcaagctgagaacctgcagcctcctctccattgtccccagaccccaggctgcctgtggagcctgaccatccttcacaatgactctaagttgaatacatgaaagccaggatgtggtgaatgggagagaagggctgggccctgctcagtgagccacctgctaagtctgcacagaggtggggagaggcacgagtggtaaggagaggttagcagctcaccttgcggcctgggatgcagtcctcactccctggagaaggtccaggagcagacttccacctctcttacttgtatccccctgccgtcctggtacagcacaggcaggtgggaagaacctctgagctgggggttcctgctaggacctgtgctgctgagcagaagccctttgcttctgggggacaccactggctgactcagatcttttattttgaagtggtttaagtgtctggctcagatcttttattttgaaatggtttaagtgtagaagcagggctggggagctgccacagtcagcttgccttgcaatctcgaggtcctgagttccaatccccaaaccaactttgaatgagataggtgtggtgggacagtaatttcagcctggggaaggtggagccaggtggatccctggagctcactgagcagttggctgagcctaatgggtgaaccccaggccaatgagagaaacaagattgatggatcctgagggaggcatggtaccttagaatgactttgaccttcacacacacacacacacacacatacacacacacacacacacaccaccaccaccaccaccaccaccaccaccaccaccagcaccaaagaagctggtttgatggtttatgcctgtaattccagcactgggaagcctgaagcaggatgactctatgaattggaggccagcctagaagacttagtgaaaccaaggccagcacagaatacagaggagcatagtgagagattctgtcagagagtgggagagagaaccttctaagaggagtccaaaccactctgtgtcctgggtcacttgagaccacgtcaccaccgcctagccatctcccttgatgccggagtgtgtattttgagtgaaaggccttctccgtagcatctctttcaaagagatgaaagccatatcgacgtagagctcatccgacgcacagacctcctcgaggctcgtcagttgtgtgtgttattcttatgtgtgtgcacacagcaatggaggccaaaggttgaggtccttcactctctatctgatctttcgagtcagggtctctggctgaatctggagatcatggatgtggctggctgacgaatgggcttcaggggtttgttgcctccaccccaccgatgcagtggtaatataggtgtgtgcaccagacctgctttacgtgatgctgggattgaacccagggtttcatgcatgttattgggacctggaccttagtcttctggaagaccagcaagggctcttaacctctgagccactttccccagctccttactgtcccttcgatgtgtttctgtagtttattgagaccttcctggaacaaaaagatagtctaggattatcttgtacaattacttatttctccaaagagccccagtggttcatcagtcataggaaggagggcactggggtctattaatactcgctgctcacgtggcgacacctggtggtagcttctaaccatgcagggccagttacatccaagccttgaatgtggtattaaaggggtgctggggtcgcctctgggttcctttctcagtgttctgagcctgaattgttgctggtcctgcctttgttagtctgttttccctccttggtccccagtctggaggatgcaagcctgagatacagtggtagctggcatcttctcaacctcagggcagggtttgccctgggagtctgcgtgtcctccttattactaatgtctctgctattatggctagtattccctgctaggttgctcagatgaagattacggtggcaaatatttgtaaaggatttgtcaaaattgtggaaaatgctttctgtctaatacagagctgactacttgtttaaaagatggaggtggggggggggctggaaagatggccaagtggttaagagcactgtctgctcttccagggaacctaggtttgattcccactactgacatggcaactcacaactatcagtaactccagtcccagggagttacagtcccagtgtgagcactgaacatccagagtgcacagacacacacacaggcaaaacagctgtatatataaaaattttaaaaaggaacaacaaaggagacaaccgagaagagcagctggtttctatggacaccaccgaccccagcgtgctccctttccccagctttgcttgggacctgcagggtcttggtcttgtgctggaagctcggttcccactgtggcactgaggtgtgtgtgtgtgtgtgtgtgtgtgtgtgtgtgtgtgtacctttcttaggaagatagaggggattatatccacatagaagaacggaaggacactgacaacttctgttgcattattttccctcctagagttgtcttagtttctttttctggtgctgtgataaaagactctgacaaaagcaatttaagggcagaagggtttgcttgagctcacagttaaagatgcagtccctcatggcaagaaggtcaaggctgcaggagctccaagctgctggtcacacctaacccacaacagcaagcagagatggatgaatacaggtctcagctagcttttttctttctttcttggacccagccccagggaatggtgcagtccacttctcgtgtgcatctttgcacctgaatcaacccaatcagcagagtccctctcagacacgccctgagtggtaaaggccactcccaggaacgcttaaggcttgtctcctaggtgatgccttggagagaggttttacatgttcttaagttgagcacttattgtttggatctggggtgggtggaaggtgagagatacgttcttgtatatacaggctgggcttgaactccttgtataggcgaggatgaccctgaactccctggctctccagctccacctcccaagtcctggtactgcaggtgtctaaccaccacaccctgcttttacctgggcttttccaaaaaagttttcctttgaccctgggagagactcagacgggcctctgatggcctcaagctgccagggtggagtcctgtgagcgtctggcttcccttggactcagatccaccttttgctctggaaagtggagttgccagggaggaggtgaagtgtgaccccaggcagccttacctggctgtgcttacaggttcctgggtggcttccctacaacctcctgcagtcccgaccctgtcagagccaatggcttagagaggatgggagactagaaaggacaccggagggagggtgtcgtttctcctttatacttacctgttgccgactcatctcttctaggcctctctggtcctgcaggtgtcctacacgccacccccaggagctgtgcccctgttcccaccacctgcttctctagcaccctccccgacactgcctgacatggatctggtgcctggtgaggagcccacccaccctttcatagggcatggtccttggaagatggccagcatggagacagaggttgtgggtgggtaggaaaggagaggtggagatggctcccattaggttccccaaatcccagatatttgggaagggcagggtccaacctctattctccatttcctagctctggagattagcatgagacctgaggcttggtgcttccctaagtggtgatacaatgttacaaaagagctactcaccataccccacctccaacccctgaaaagaattttgagccaaagttagggaatgggagtttatctcttgcctttgacactgaatagctgtgtggctttgggctggtcattctgggcacagggatgatcatacatgaagtgtgcagacaggctaagtaggctatgtcctgtgcccgctttaagcttctgctaggcttatcaagtaaagatgcaggccaaggaggctgatttgctggtggtgcttgggaaagttggcctgaccactaggcggtgtgggtagaaagcagctgagacggggcagctcatttgcttgggggaaaattctagagtttatcttctggtgaaggaggtgtggcgggggcggggtgggtagggggagaagcaagttataaaatcctgagaaggctttgccctccctgggtatgcctgtcttgttggccagctctgtgtgggtttctgtggagagggaggctgagggaagtttcgttggcttagcacatccagccctgggaatcctgagctggggagagatagctaagctaggctcagggaggaaagggggtgctggggagggcaggtgggcaggtgtccccagatgctctgggcttgatcaacaaaaggaggctcccagctctgcctggttgggcaagggaccgtcacctctgagcatggtacccaggctgagtggataagcttaggagaggtgagggtgggcctggggaaggtgggcctctctcatcccagctccctcccaaccctcccctcttgggctacgccctgatgcatgccaggtgggggacagagccgggctgagacttggtccctgctcagtgacagcaccatggacacgagatactctgggaagaagtggccggtccccacgggtgagacgcagccagaccctaccacctgtaactgtctcacctggcaaggtggccagaagggcctgtctgttagggctggggtgggtgggtcagggccatcctccttcttcttcttgctgactaactatttattgactgttttccagggccagctatggcagctgcccttctttgatttcatccatcttgggtatgggtgggcttagggtgtggtattgaagcatgcacactctttggtcctccccctgttggactgagacctcaggtcaggaccaaaggtgcacagtgctcaagagggtcctgtgcccacagacacaggaggggaggaagacaccgaggaccagggcctgactggagatgaagctgagccgttcctggaccagagtgctgctgtgggcccagggggaccgaccacacccaggaagccaccttcccaccctcctccccactatccaggggcaaaaagaaaaagaagctctgccccacctagaaagctgctgtcagacaagccacaggacttccaggtgatagtgggggaactgtctctataattcatcagcaatcactagtgttctgtgcctggctgggttgtctagcctcaggacaatgcgctggtgttccggaggcctcccatgaagaagctaggctgccctggaccctgacagctgaattgaaagtttgtgttttgggagctcacagcatgcctctgcccagtcccaaggagttggatgtataaaagattagcctagcctacatctcctttgttgtggtaactggcctttgtcctaggaccagcttcttgctctttagggtccacatgccccaccaacagcagcagtggagtcctctgaaccttcccaaaaatcagtgactgtttaattatttattgagtgtgttagcatggagtgaactagtgccactgtgagagatcactgtgtggaagacagaggaaaacttgtgggagttggttcttttttttccaccgaatagatcctggggtataaattcagactatcgaactcggcagcaagtgccttttcccatagagtcaccttgctggcctattggttttttttttgttttgtttgtttgtttgtttgtttgttttgttttttcgagatagggtttctctgtgtagccctggctgtcctggagctcactttgtagaccaggctggcctcgaactcagaaatctgcctgcctctgcctcccgagtgctgggattaaaggtgtgcgccaccacacccggcttggcctattgtttaaaattttttaaattacatttatattcgtatgcgatgtttctgtgtgtatgcacacatgtgtgccatagcacgtgtgccacagcatgtgttggaggctggagggcaactttctgctcactctcttctaccatctctctggccctgtttgagaccgggtcttgtgttactcaggctggcctcgaactcaccgtatagctaggatgtcattgaactcctgatcctcctgctctgtttccaaggtgctggaattagacccgaatggccatcacgtccagccaaggtccttagacaagtagacctctgcccctactcagagctgctcaatcagctgcctgagtctgaggaactgtgtccaacagtggagaaagaaagattacccaagtttgaggccagcctgggctacctagtgaatgacagggcaatctagctagagagtgacttacttagaaaaacagcaacaataacaagagtgggtgttaagggagtctcagatggggtctgttctgaaggaaggcagagctggattggtccttttcccaggtgattttatgcagatgaaacagttctggaaagctctggaattttctagatgcaagggaaagcttggtgggaagtgtggatttttttttttttttttttttttttttttttttttttgagacagggtttctctgtgtagccctggctgtcctggaactcactctgtagaccaggctggcctcgaaactcagaaatccacctgcctctgcctcacgagtgctggggttagaggtgtgtgccaccatgcccggtatgtggatgtttttgtagtgctctttctagaatctttgcatagctctccctaaagttgtcagtgagctggtcttggggtttctaaggttttgttgttgttgtttgtttgttttttgagacagggtttctctgtatatccctggctgtgctggaactcactctgtagactaggctagcctcgaactcagaaatctacttgcctctgcctcctgagtgctgggattaaaggcgtgcgccaccactgcctgactgggtttctgagtcttggggccagcaagtggtctcttttctctctctcatttgcttatcccttttcctggctttcagatcagagtccaggtgatagaggggcgtcagctgcctggggtgaatattaagcctgtggtcaaggtcacagctgctgggcagaccaagcgaactcggatccagaagggaaatagcccactcttcaatgaggtaagtgacctcaggcatcaggcaggacattgacagcccatgagaatggttctcaggagaacaaataccagggcattcatccaaggatgtgctcctggggcaccaacttggcgtgtgagagccaagaccagtgtagatgatcagagaacatggagagccccactccccacaatctcagaatccttgtccttgaaatgctaagctctgcaaggaagagatgggacagcccagcttgtgagagtcctagtctttggcaccgggcagctgagctccaccagtctcctcaactcaggctccaacactggtgggtggccacgcccctccacctggtctgagcgtcagagacattgattatccctcttctctgttctggaccaacagactcttttcttcaacgtatttgactctcccttggagctgtttgatgagcccatcttcatcacggtaggtctcagatgttctccgtgggtggtggtgggtaacacaacagtaggatgtgatcgccagagacatgtctgtcattgtgcctgaaagcctgtgtctgtgtctgggagagagaggtgggttgaagcttgagtctgggtgattgaaggactcacaaaagctctgccagtggcaggggaaatgcccaggtgcctcaggccagaagcctgaagtgcctggttttaggtcgctttctctgtctatgctgtggcttcagattccgctctgctgctgaggatgggtgtgcactagatgtgtgggtcccacctctgctgtgtgcccacatgattctgcacatgctgtgtgatttccctgtgccgttgtccccttacttgtgaggtgggggccatgttagtgtctattcacagggttctgcgaagtgaaacattgcttagtaccatctctggaatggagacggtgccagctgttggctgttgtcggctgggagggacctggccagagccgcactctcacgggaagatgatctttcctttcaggtggtggactcacgctcccttaggacagatgccctccttggcgagttccgggtaattgtttgtctacttggaagtagttagttcgcacttccccttcaggggcaggctgtgctggaaaacctagtttcagaccacctccctaaaaactccgtaaaatctcccaactcaggaaacctctcaccaaaggtagaactataaagcacttactatctaccggagacagaattcttatcttacagttcaggctgacctcaaatttacgatggtcctgctgcctcagccccctgcatgctggaagtaccatgggctgggctcatgtctgcgctcacttttacgattgagtttgccaggaggggatgtgtgtcataggcaatctctgggactagacagacagaaggaagccaaagtgggtggggcacacatttcctatcacatgcctatagttagggcagaggctggagagcaagcaagcttcccaacccgcaacccccaaccccagcacagagtctctcctgggttcctgtggtcatctatgtgagttagttttctttattcagaggaaaaaagcctcaaaactttggcctctatgacaggttgtttgacatcctggagcttggaaccccccaaggtcagactcctacatctttggttttcctccataaccaacttttggaggtggagcctgggtccttgaatggcaccccacagctccatgcttacggctcaatgagctggagaaagttcttatacttttccattttcctgaggtcggggtatgacagaaagagagggagtgaacttacccttgtctccacgagagtgaattaccacctcccccccccccctttaaatttccctctgtccctgcaccctggaacagaagcagccctcactcatttttggctatcttgtgtgtcttggttactttctattgctgtgataagacagtgttaccaaggcaacctgtaaaagaaagcatttcatttggggctcacggttccaaagggctgcttcatgaccttcatggtggggagcatggcagcaggcgggcagccatggtgatggtcatgaccatcatggcagggagcatggcagcaggcgggcagccatggtgatgatcatgaccatcatggcggggagcatggcagcaggcgggcaggtatggtgatggagcagtagctgagagcttacctgtgattcatgagcatgaggcagagagagctaacggggatggcctgagcttttgaaacctcaaattccaccccagtgacacacctccttcaacaaagccatgccttcccaagcaattccaccaactgtggaccaaagtattcaaatatctgcacctgaggggctgttctcattcaaaccaccacacgatatgcgatggtgttttgccccctgatcccgtcttctctgtgggtctggagtggagttctcatatgcacttgagagaggtgctctcgcctgtttacctggtggccagaagtgggcagtgggctgtccacttctaaattactgagccctggagactactccagggtggatttaacagatcttacaaactgtaaactcggggctagagagatggctcagtggttaagaacacttgttgatcttgcagaagatctgggtttagtttccagcatctacatggcggcgcacagctgtctatagtgccagttccaggggatctgagactttattttgagctccacaggcacaaggcacatatgtggggcacaggcatacatgtaagcaaaacatttatgctcatataagaaaagcaaataaatctttaaaaaaaattaagtggcgttatgtggctatccattcagctacttggtagatttcttagtcccttgaagatttatttatttttattttatgtatatggatattttacctgtatgtagtctgtacttgttggtatgtatgttttgttttgctttcttatttatttattcatttattttagtagttgaagaaaggtgtttttatcgggagtaagggaacacacacatagaacaggcacacaagaaaagaaccctctgcagagtagaggagggtctcggaaagccaaatgtcctttgtttactctgtctcctctttgtttcagatggatgtgggcaccgtgtacagagagccccgtgagttcttgttcccttggccaagtcctgatgttctagaagcttcttggaggcgctcattttttttggggggggggctccttttttcttcttgatgctttacaacttggaggtggggtctgcccttggaagggaaggcagggctttctctcccatgcaaagcaagcccccaggcatgtctgtcctccggcttcattattctggaaggtgtggccagggcagctggagctgggctccactctgagtcactttacgagtcaagtgctcttccttgctctggactgggtgatttatgaaggaagtggaaaaatgggcccgagttagacttttatcacctcttttagacatttctgctaacctttctctgacgcataaatcttcaaagtactttttactcattgtccaatatcagtagtcatggttggtcatgtcgaatatcagtagtcaaggccagtcttccatatttcaggaaagctggctctgctaaggaaccgtggagcccagtgggcagttcttggtttcacatatccatgaagtgtgaaacctggtccctaggtcttctatctcaccttaaatggtccaccctatgctcctggctgtctgcagactctaacgggtccaccctacctacgctcctgcctgtctgcagacctgaccttccactctgtcctgcaggacacgcttatctccggaagtggctgctgctctccgaccctgatgacttctctgcgggggccagaggctacctcaaagccagcctgtgtgtgctagggcctggagatgaagctcccgtgagtaccctccttgcagtacctagtatagcaccagagaaaaccactagcttggtgttttcttgtcttaaaggggcatgtagtaatcatgagaactgcataacacgcagaaaatataaacaacaaataaagcactcgaaataccactgctgggatggtgggactgcagtctctggccttccttgcaaaagatattaatatcaaggatattagggttttgttttgttgtttttgttccagacagggtctctctatgtaaccctggctgtcctcaaactccgagagatccacctgcctctgcctcccaactgctgggactaaagaggaacacctccacagttgggtagcacacaccgaccaccacatcacggtgttgactccttgtggttagaccatttttgtcaaaacgctctgtagctataacccaagaggcagcctgagggccaggcaggagttgcaggtaggcaggtcaggagtggcaggaggcagaagtgaagtggtcaagcattctgacactgaggaagggagggaagaaggaagggagacgagcagagggcagcccagcctcttgaaggctgctgaagctggggctagagtagctgggccagtctggaaacgctcatggagatggagatagcagaggacaccccacattaggaagaggtgcctcaggacaccccagtctctcttgcactgttgtaaatggccttgtacctctctcttccaccacgttcagccatcccttcttcatcgccctttttttgtcttcctcgttccttctccattccctggaaccacacagccagccctcctcttttaggaggtttcctccttcctcacactctcatctccttgtggacacggaattagaggtgatgaagggtttctgactctctcatggacacttgctcctgagtgtgctgggattgaatgttttcctgcagatgctgaagtggggttcctcatggggtacaggctaagtaagcattaggctgcggctctttccgttagcttgctaaggagtaggctgctggaccagcctcacctcattctctcctgacctcccactgctctcctgccccacaaagccactagaaggcttgtgtgttcctgtggtgtcagacgctgtgtttattattacacagtgttactgcttttatttgcaaagaggcttgttctttctggaagagtgagctctgtggatcagagcctcagtctaccttgccaggcaggggtgcctctcacccattagcaccatgctaactctgaccctgtggtcactatattaataatcgtgtgcagggaacgtgtccctaaagatggagcttctagctttgattccttcaactactgagctagtttttaacggggagggcaggggaggggtgcaggcggttgggacttgtgggagaggggactccgtcagattggttagatgcctgctgtgtgccggctgcattttctttttaaactgttggaggtggtcctccacgtagctagggagcatgtgtgtccttgtccacactgctctgtagagagcttaaccaagtgaaggaccaagtggctgcaggtgccagagctcaggacacacccttccgatgagggactggtgaggaatcctgtgcgttttctttgcagctggacaagaaggacccttctgaagacaaagaggacattgaaggcaacctgcttaggcccaccggtgtggcccttcgaggagcccacttctgcctgaagctcttccgggctgaggacttaccacagagtgagtgtggcgcccccttctggatgcttacaagagtctcccgccaggctgttaaaagcatggaccctgggccttgggctactctaggcgggcagtgggggagggtgtggggaggtaggaggagagggtgtgcagagaagaggcctggaccttttctcagtgcttttgttcccagggacacgcacttgctcattcccttcctctttttgatccagtttcctcccagatggccagttagtgttgtcagtggtacccactttctgctgtctggcttatcatgaaaatctttatttgacacctcccctcccctgaaacagcagaaaaacaaccagagacttttttttcctttttcgggtggtttgaactcagagcctcatgctcacactccagtgagtgccactctcagcagagcaatcagatttttaatggaaagcaacacacggaggtggacttaggaagatgagggagacttgagagcaatggctcccctccagcttcccctcgcctggtctgctggtcttatggaaatggaaaatcttagactatacgctgggcctctcttattttctatttaaagcaaaactggcctatgggataacctacaggtggatcactgtggccatggtgttaagggaatgccaccaggcacccagagtacgcccatccttttctgggttgcttactgctcttaatggtgtggagtttgaatcagtcccacatgtggagaggccctgaagcttggggtgtgagggacagtgacggatggatgaatttgggaaggaacaatgactcttagctgctgatctgagtcccttcatggagctcctgtgctgactccctcatgagggaccacagcatgtcacttttgtagtcatgacactgcctggagatgcaggggtagttgggtctggagagccacgggggctggcagtgtggggcagaggggtctggagggtttaggaggagatcagagatgggcaagacacaaggcagctgattctgaacgagagacagcagacaggcaacgaccagtgtgtatcatgggtatagtcaggtgcagaggggacattggcaaacagtgacaggcatgtcccttccccagtggacgatgctgtgatggacaacgtcaagcagatctttggctttgacagcaacaagaagaacttggtggatccctttgtggaagtcagctttgctgggaaaatggtgaggaacaggcatgggggggggggaaaggcctggggcgaagggtccaggcagagcaggacacccctggcagaagtgcacatagaggggcctttggaagcaacatacccaggctggctctctggggtgctacacttgaaaatggacaggtgtacccaggtgtctggaagtagttgtgactgaacagagacgaggggcgggtgatgggtagtgggggaggattggggaggattaagcaatggtgtggggcaagaggtaaaatgcataaagccagaaacaagagattaagctaatttatttctgtgtatgtgttgctagagtgggtacagccatggtgtacatgtggaggtcacaggataactatgggagctggttctcttttgttcccagaggagcgcaggttgtcagggttggcaacaagcacttttacctactgagctgtctgctggcctgtaaaaaaaatatttgtgtatatgatttgtgtctgtgggggcaggcatgccatggagtgtgtgtgtatgtgtgtgtgtgtgaaaccagaggacatctttgtggagttggctctctccttccactgtgggttctgaggattgaaaaagtttaccannnnnnnnnnnnnnnnnnnnnnnnnnnnnnnnnnnnnnnnnnnnnnnnnnnnnnnnnnnnnnnnnnnnnnnnnnnnnnnnnnnnnnnnnnnnnnnnnnnnnnnnnnnnnnnnnnnncacacacacacacttatttttaagcttgaaagcaacacatggattgactttctgagtgagtcctgctatttcacctaattgcacacccccatttccttttgaatgctatgatttcactttctttaaagctgcatagagctccagtatatacacaccatattctctttttcatttatctgttaagacaggggaaccattttcttcaaagtgtgaggaagcataataattatttttacacaattgtggcagaaggcagagaaagagagagagagagagagagagagagagagagagagagagagagagagagagagagagctggtggtcatctaaggggtcacttggtcatccctccctccttgcatctcaccttcctgcccagggtagagtagggcagtgattcctgtccatgttgattctgccccacagccccagcatttttttttttgtttgtatgcatcacaggccatggccacacccaggctccagccacctagctgcaagggcctccacacagctctctttggctctgactcttctctttcctgccagacttcctcatgcctctcatctgctctacatgtggcccttttgagcaacgttctccccaggtaccaccctcagaggagcctccatcttaaggatgctattgttcaaggaggagtatgtgggcctgcctctactctttcctcattcacatccaacatgctgagtctgccctcaacctcaaacatgccccaaggaccagcccttcctaactactgtgcccctttcccagccactgccatttcctcccaaggtcacacagtcgtctcttcaccacctttctccatctcaggacagggactttttggagaacctaggtcatttgtccaaattcctgagttctctggttgtttcctctggtatttccttactcttttggctcctgtatttcctgggcaccaaaggagggctgttacattcagaggattttgcctggagcttaccacaggccatgttccctatattgtgttgcaacatgacacagcatcacgtgtcccattcccccttggttgattctctatcttctgctctaactgttatgcctcccccgacccctgcaattggccactactccttgggtgacatcttgattctttgaggatgataagtgtaccttatcacccaatacactgagtgtccacctacttctgcctgaatacatcactgcttggggttatccagggctcattttctcatttctactcctccattttacttgaaaaattttattttttgaatgtacgtgtcttagggttttactgctgtgaacagataccatgaccaaggcaactcttacaaggacaacatttaattgtggctggcttacaggttcagaggttcagttcataatcatcaaggcaagaacatgtcagcatccaggcaggcatggtgcaggcagagctgagagtttaaaatcttcatctgaagactgctggtgggaagactgacttccaggtagccagggtgaaggtcttaagtccacacccgcagtgacacacctactcctagtccacacctcctaatagtgctactctctgggccaagcatatacaaaccatcacagtatgaataagtctgtgtgtgtctgcgtgcatgtgtgcgtgagtgcgtgcatgtgtgtgggttgcctatccctaaacatgcacagaggctgaaggaagatgctgggtattttcttcctgaaattggagctaggctgtcatctgtgagcccagtgagcctcctgtttctgtcctgcagggttataggtgcttacagccatgcctacctttttacgagtgctagggatttgaacttggttcttacgattgttcagagagccttcttttctctctgagccatctttccagttctctttggacttaaaatatttttaaacattttaggattgtattatttttaaaaagatttatttatttttatgtctgagtacaattacagctgtcttcagacacaccagaagagggcgtcagatcccattacagatggttgtgagccaccatgtggttgctgggaattgaactcaggatctttggaagagcagtcagtgctcttaactgctgaggcatctctccagcccttaggattgtattataattacatacttttctctcttttcttttcccttcccaaaacctccccttactcctctttcaaatttatggccttgatttcagataacaaatctacggtctttcttccctgggggagactattaatcctgattgcagagttccttagctgcctgcagttctttgcctagggttgaggactcacgggctttctcctttccatgctagcatgtccagtggtgttacccctcttcaggtcatgttcagacagccatattggtgaggtttcatgggtgtggcttctgaccttcctagaagacacaatctcacagcaaaatccccgttcttctgcctcttaatctttccacctcttctgcagtgatccctgagccctggaagttgtattgtagatgcatcagttaggactggactccacaactctgcactttgattggttgtggttttctgtaatggtccccatctgttgcacagagaagttcccttgatgagggttgggtttggttggactgaaacttgctttagtgaggatggactttgaatcctcctgtctccacccctgacgttctaggtctatgtggtgctagggaatgaaccctgggcctcatgtgtgctaggcaaacacttcactaagtgagctacagtgtcagcctgccctgccctgttggcagtaggagccccctcctccactccccgagcctaacacagaatctcagggaaagtatcatgggcccagtcactcactcagcttgccagccagcttgatccctctgaggtgacaacgttctctatagacccttgccagccccaggcaagtgttggtttggacttggggtctgtgagtgcggcttcagtgttgacttcccaagtttcaggatgcatgaaggcaggaaggaatccaagttttcctggacatttgtcctctgaaactgaggattaggcttccctgttgacagctgggaaagatggcgccaactaggtttggttgtttttatccacagttctagcatgtcattagtggcttcatcatctcaccttcaggtcacttacttgccttggagcccaggtcgagcgcactgtgggccctgtcccctgcatcccaccagcacccacccatgcctgagattgctctgggtcttcactttgctgatgctcttctctggccttggagattttcctagagtaccggggtctaggggaggtgacttgggagattggataaagcctaagctaccccttggtcctgcttgagagggtgaggctgaggagtgagctgggaaggagggtggccggctgctttcatggtccttaggctctgtcttcttttttgtcctgaaccctgttctcaacctgtctcccctaaccccaccccattctacccgtccctctccctggctctagctctaagcttttgtttattttattttattttattttattttattttattttattttattttattttatctttacacctacttacatctggagaccccctaggacctttccagtgtctgcctagccacacttggatgtttctgcagttttgcttatggacacttgggggcactgttagtcaagttctatcctactacacagtgactacacatagtgtgtatgtgtgcattgtatacaggacaaggaaaggggtgtgcttcaggacaggacagatatcttagactttatggatctaagaatgagacctatttattgcaaaatttaaagaataaaaaaatcagagagagaataaaataaaaggaagaaaaagagaaaagagaaaagtgtccatgcgcctgtggtaaagcttgttcggtctgttctctgtggatctcatttcccttcacagctctgtgactggaatctggctaaagggtggggcagcgctgagccttggcatctcagttcctgtgttctcttccaggcctttccttgatcaatttttgtggggaggggtacttcctgctttttgttggggggctctgtttcagcaacttcagagtgtagtgctgacaggctgtctattccccgagtgtgagatggtgctgtgtgagctgaagtcatgtgctgtgggtgtcgagcctggtgtcagagagtcagtgatgtgtgttaaaccaggggtgctgcagcagagccgtgcagaagcaggttccgtgaggatctcagaggaaaaacgtgatgggctgacggtaataaccttgcccatttcctttagatgatgagtcggtagtcctgattcattgttcagcgtgactctgtagaggccatgagtaaatgagactcagttctctgtgagcagctcggacagcttggattatccagcgtttcctcaggttaatgctcagcccagctcgctgctctattagacagatacacagcaaagtgaatcatatgtatggatgggtgagagttcagctttttcctttctaactcggtcagcatacagagatctttgtccgtgagctgcttcccatagaaaagcttctagaaccaaccgggattatggacttatagatagaggttgaagcaagaagctgggagagccttcccctttgtatattctagaacgatttctttcattttataataagatttgtatttatttttaggtatgatactgcatgcatctgctatctatggttgatctatctatctatctatctatctatctatctatctatctatcatctatctatctatctatctatctatcatctatctatcatctatctatctatctatctatctatctatctatccattcacctatctatcatctgtctattatctatctatctatcatctatctatctatctatctatctatctatctatctatcatctacctactttcctacctacctatcatctatctccatccatccatccatccatccatccatccatccatnnnnnnnnnnnnnnnnnnnnnnnnnnnnnnnnnnnnnnnnnnnnnnnnnnnnnnnnnnnnnnnnnnnnnnnnnnnnnnnnnnnntccatccatctctccatccatccatccatctctccatccacccatctctccatccatccatccatccatccatccatccatctctccatccatccatctatccatccatccatccatccatccatccatccatccatccatctctccatccatccatgctctccatccatccatccatccatccacccatccatccatccatctctccatccatccatctatccatccatccatccatccatccatccatctatccatccatccatccatctctctacccatccatctctccatccacccatccatccatctctccatccatccatccatccatccatccatccatccatccatccacccatcatctttctctgctctgctctccatgtaaccatcttcttctgtcctcccttgcaagtgcatttcctttacaaggttttggcctccttacgtatgtgtcagcaagtgtgactgtgggttctcaacgtctaccactccagtccaagcatttgcatactgtgctcactgctccatccttacttttctaccccgtggcagagcttgcttcacttctgtgcacacagagtctcctctttttcagagttgcatagtactatggctggaaccatactttctttctttaacccaccctctattggtggatacccagctcgttccagatccctgctagctcgagccatgctgtggtaaacaatgcactctgatcataggtatttctgtagagagtatctggggaaggactgacaggtagaaggaacccgattttctaagtttggtagccccagctccctccccataggagtcatttcactttcctccactggcaaaatcaagcgtgtggtttccctccagcctggctgacagtggtgccaggctatagaggcatttatggatctgggtgggagtagaaactctttggcctacttctgctccagcccttcacatgctcccaaacaatggtggctacacccctgcaatgctggccctttgcctgctgctccccccaccctttctctgctaacacctcttctgccccaccctaccaggctttggctgggctctttctacagggaggaggagaaatggcaataggatttgaaactggatggttgggagcagagacaaagcccttgtccctgggaacccaaagctctggatctaattcaaatgctcattattaaaataatgcgggctgtcgagatggctcagtgggtaagaacaatgactgctcttctgaaggtcccgagttcaaatcccaacaaccacatggtggctcacaaccacctgtaatgagatctgatgccctcttctgctgtgtctgaagacagctatagtgtacttatgtatgataataaataattctttgggcctgagcgagtggagctgactggagtgagcagaggtcctaaaaattcaattcctaacaaccacaaaggctcacaagtatctgtacagctacagtgtactcacatacataaaataaataaataaatatttaaaaaaataaaataatgcactttaataaaactcttgtttagcacatgacaggcctgtaggagaaacctgttcactattgttagcggtggactcatctgccttccagaaactatataatcaagactgagtctcttaaattttatttgtttctctctctttctctctctctctctctctctctctctctgtatgtgtgtgtgtgtgtgtgtgtgtgcatgcatgtctaagcacttgcatatgtacatgtgtgctcgatgtcatgttttttaatgtttttttaattggacattttatttgtttacatttcaaatgttatcccctttcctggttttcctctgcaacccccctatcccatctccccttaccctacttctatgagggtgctcccccaccaacccacccactcctgtctccctgccctagcatttgtctacactggggcatcaagccttcacaggaccaagggcctccccatccattgatgccagataaggccccttcagctccttcagtccttcccccaacttctctattggagtccctgtgctcagtccaaaggttggctgctgtattggtcgggatctggcagagcctcttaggagacagctgtatcaggctcctgtcagcaagcacttcttggcatctgcaatagtgtctgggtttggtgtctgcatgtgggatggatttcccctggtgggcagtctctggatggcctttccttcagtctctgttctgctctttgtccctgtatttccttcagacaggagcaattctgggttaaaattttggaaatgggtgggtggccccatccctcaattgggggagccatacctaacctctggatatggtcttgacaggttctccctccctgttgtggggtattttagctaaagtcatccccgtggagtcctgggaacctcttgcttttctggcatctgggactttctagttgctaaccccagttctccattccccattgctatacacctctgttcaatttcctgaccctctgtatatctcctccatctcctcccacaccttctatgtcatgttaatgtgtgaatatatacatatatttgtgtgtgcatgctggtgtcattatccgtagctctttaccttatttgaatgtgtgtgtgtgtattatgtatgtatgtatgtatgtatgtatgtatgtatttttgagacagagtctttattatgtagctctgactgtcatgagcttgttatgtagaccaagctggcctagaacttacagagctctgcctgcctctgcctctgggattaaaggtgtgtgccaccacagctcccagcctttcaccttattttttgagacaggatctctcattgaacctagaactggttggactgcctggccagggaactctagggatcctcctgtcgctgccttctgggagccatgattacaagtgtgtgccaccatgcctggcttctacatgggtttctggccatagaacttgagtcttcatgcttttgtggcaaggatttactcatgaagacatctccccagcccttgaaactgagtctttgtcttcttcctcatttgcgggtgcaggctgtcctggggcttcatggacacagcacggaacccttgccttagaacactttccattcttggtctgtttcttgtttgtagcacaaacaagctttcagacagcacttctctgaggcaagctgtggcttccttgttggcttgcttgcttgcttgcttgcttgcttgcttgcttgcttccttccttccttccttccttccttacttacttannnnnnnnnnnnnnnnnnnnnnnnnnnnnnnnnnnnnnnnnnnnnnnnnnnnnnnnnnnnnnnnnnnnnnnnnnnnnnnnnnnnnnnnnnnnnnnnnnnnnnnnnnnnnnnnnnnnnnnnnnnnnnnnnnnnnnnnnnnnnnnnnnnnnnnnnnnnnnnnnnnnnnnnnnnnnnnnnnnnnnnnnnnnnnnnnnnnnnnnnnnnnnnnnnnnnnnnnnnnnnnnnnnnnnnnnnnnnnnnnnnnnnnnnnnnnnnnnnnnnnnnnnnnnnnnnnnnnnnnnnnnnnnnnnnnnnnnnnnnnnnnnnnnnnnnnnnccctccctccctcccatccattcttttgacctactgggaattgaatgtagggtcttgttcacattgggtgagtggtctactgatgtgtacctcccctcccagtgccatgtggggtttgtatctccactgaattttacatgggtgctggtttgtgggcctgggcctcaatgggaggtagggttggcatgtctctgtctagagctgtggatttagggtaatggggctgtggcatttgcaccagctaccccattctgaatcttattttccattgagccttgtctctgcagagactccctgcacctgagcttgccctgcatggccaagagacctagggtttcagggccagctctaagagcagccagtgtgacagagggatgacttctgggttgccacaaagctcggattccacatagagttccatgccccaatcctttgtgtctcctagctctgcagcaagatcctggagaagacagctaaccctcagtggaaccagaacatcaccttgcctgcgatggtgagtggtcctttggaggactcagcaagtcgaggtccctgagtcctgctggcaccccgacttccgcttagcaagggcgtggctttcttctaagattctgttctcacctagctcccttttcttccccagtttccctctatgtgtgaaaaaatgaggattcgtgtcatggactggtgagttctgggtccttgaaggggtgtcttcaggggtcctcgggcctgttgttttgtgcaccggggctgccgctgtgacagagggtgcatgtatcaaggcaggatatgagggctgtgggcagttatggggcaacctggagctgggttgctgtactggcagaagatgaagaggccacagccaggggcagtgaggagcccatctctggaggcttcctgaggagttgctctgataagtcattggtaagggtaaatgcagggtattgaagctaagccagctgctgtgtcccgtgggacagaatggaagagatcccctccaccagctggaaatgggggttatatttcccgaacagaagttaccattgcaggtgtcaagcaggtcaggacagtagcctgtgggtgtcttagactcttaccacctggtgaacaccaacttgtaggccagggctgtgtccaatgagcactttccacatgtatgggtttatctgacccttgacaaggtggcatggtactacttcacagaggagacaggaaagagcaaatgacctgccctcagtgacagttcagaggaccaacgtgaatggcagctggagctggtactctctgcctggccttgctgtctctcacagcagcagtgatgtggcggcctttctcacacttgaggggacaacagggcccaagctctgtgagctccgaaatgctaggctttccacagagagcaagttgtccttttcctgcccccagaagcgctggtcatgtggctcctggccattctcctttggttgcaggcccacggcacccccaactaggaggataatgagagaccaggggaaaaaccccaggccacagagccattaaagtgtgtgccagttccccgggcctaaagaaaacagattgagagaattagagggagagaagtgtgggcaggggccagggagaggtcccgaggtctgccacggctggtatgagcctcagagaaggggaagcggtttcgtggaaaggtacactttacattccctgagccgtctctgcatgtcagctggaaatgactgtgctgtgtggacggggacatcccggtgtgcatgtgtgtgcgtgcatacatctgtgtggatgtgtgtgggtgcggttagccccatggattgtggctgtgcctggcctgactcccttggagctgtgtcaaagctatcagcatactgtacaatccaaacacattacggaatctggtggctgcatctctggcttgggttgaagtggcacttttattgtgagtctattttgagactcactgttttccaaaagccttaaaacccccaaacccagctcttggccagaaagcatgccactgctggaagtttctatccagaaagtccttcttctgagaacacacaaatgagcgtctcctgtcacctgaatcttagaaatatgacacggtccatgtggctctgtaacttaagctttcattcaagcctttaagaattcctttttcactaaaaaacaaaatttcctcagggcagaagagatggctccgtggttaagagtgcttactgctcctgccaaggattagggttcaggtcccagtactgtgtgccactcatgattgtctgtaactccattccagaagattcaacaccttttttgtttgtttgttttttgtttttgcttttgcctctatgggcaactacatcataaacttgttcatgcaaacatacatagatgttttaaaaaacaaaaaaacagaaaaacaaacaaactttccaaatccctcctcaatagaagctacctccatggaaacaacaaaccccacccactcttcctctcctttctatttagacaaggccagaagtcagaagccaggttccctttaagggagcgagcttaacaatgttttaaaaatacctccagcgctcttgcctttgaggcactgggttcgattcctgtcattgtaagaggcaaccaagagaagggtgtgcgatgtcagacgtgggatgtcaggcttcggtaccgctccctcaggaagctttctcatgacacggcttaccagaaaccatgacttggacatgggctgccaggctactcattcttcccaggggaaatgtcaaacgttaagcttgctccctttcctgggaaatccaaagaggaaggaagagatagagactggggtgtctcagggggttagggttaatggaatatgaaatcagcatgccttgtctttgggaatggtgctgaatgcttctgtcatggctgaagtgctcacagtggggaggaagcccccccggggagaccaagagaagggtttggggagtatgctggagaacctgcctgaggggcccagggccccgcccaagcggacactgctgacctctgtacagtaattcttgtctgtggctctggtccttgaatccatagttgttcagtgcctgaggcacttccctctggaagtctggaaccttcttgtctcatacaaaaacgtctcctagctgggtgtggtggcacacgcctttaatcccagcactcaggagacagaggcaggcggatttctgagttcgaggccagcctggtctacaaagtgagttccaggacaaccagggctacacagagaaaccctgtctcgaaaaaaaaaatgtctcctgacatggccatatatgatctggggttagaaccattaggtggggaatcctgggtccattgtccagaggaaggagcaggtagtggtggttagggccctggattccacactaggagtactaggagtaccttggctcagagctgtctatgagatgctctgtgtgtgtgtgtgtgtgtgtgtgtgtgtgtgtgtgtgtgtgatatgtgtgatgcgtgtatttgggcatgaatgtaatggcatacgtatggacgtcagaggacaattttgtggaatctgttgtctcctctcttcttttacctctatttggggtcccagggatggacctctggttgccaggctttcagggaagctgccttgctgacacatctcaccagccctctgataactaattgcctcaataccagaaccatcacctaagggtgggactcattgtacaatataccagctaaggtttatactatggatcccgagagtgtgcctttattgactggtttgattgatgtgtgtgtgtgtggcacatgcatgcatatgtgtatacctgcatgtggaggccagatgtcaaatcctcaactttatttttgagatgaggtctcttattactcctgcagtttgtgatataagctatgaaccgccacccccggctctgctcttccttccctggctgacagggcctgcatgcttctgtggccaagtttcctcagtccatggaggatgttaaagggtccttggtctctaactagttgtgcagctcccctgtgggataagggttggacacactttgccacagctaaagtctctgtacaaggcatggcacaccagcacgtggcctcggagatggcttcctgaaactcctctggatctaggcatttcttgggttccaagaaccttctgggtctgaaaactgctctttgtcagcaacctcctgctcctcatcctgcctgcctctggcctcctccctgtcagcctgggatgatggccccatgtaggcccacagatacggagtacaaggccatcaagatgaacaggttgccccatgaggtgtcttgagcatgctcacttcctttctagtctcttctcacaggcttcccaggcctccgcagaagaatggacggacctctggcaaatctgtcactaaggtcacttccttcttgagtagactgtgttccatgtctgcctctcatgttcatgtcctctttccatccttgttctagggaccgcctcactcacaatgacactgtggccaccacctacttgggtatgtcgaaaatctctgctactggaggagaaatagaaggtatgtctcacctgttcccggcttgctccatctctcctcactcggtcttatacctcaagatctgggagcctgaagggagattccagtgagagctcactaacagacacctagagtgctacacactgaatggagggtggatagtcctgggggtagagggtatggcactacatgctgggctccactctggccctgaatatctcagtgattcctattttgcaatgggttttattggcctagtaaaaatgtaacccattgtcagtttgtaaaaaaattaactagtgatctaaaagaagactatgacatttacctatgagctacctttaagtccataactgcaggcaagaacagcatcctgagctatctggggacacacacacagacacacacacacacacacacacacacacacacacacacacacacacacacacacacacaatacctacctatatacactaaaatgagttgtttggtcattgcttctggtcacttggcaatattagacttaggtcttggtttcttgtgattaagtattcttctagaacacattattattcttttggtggtactcgggattgaacccagggccttgtccactcaagctgagtctaagaacttagtttcacccttatctttgaggatacaactgtgataagtatatatttcatcgtaagtgtacataattgaccgaccttctgactttcttccttataaataactttgcaatgaatgtttttttatagctgactttcatgttgtgcatagtttcaaaaacaacaacaacaacaacaacaacaacaataacaacaacacaggtctggaacaattgcatagatgctaagagaatctcgtgctcttgcagagggccagggttcagttcccagcacccacattagaattctcacagctgcctgcaactccggctccaggggacctgacacctccttccagcctttgagcatacctgcctgcatctggtgtacatacatacatgcaggaaaacccacaaaataaaataaaataaataaatacaataaaaataaaagtaaaaaatagttttgttttttttttttttttttttttttttttgctgttgggaataaaactcagtgcctcagacactaggcaagtaggcaagtgctctacccggaagctgcacccccagctcttgagtgccctctcacatctatgtctaacatcaaagccagccaaggattctagcactttcaagcccttctgtcagttctgaagttgcccatcaagaagtctgaactaagttatgctcagcgacttccgtacacttgacgtgacactgtttccacatggctaagacagtactggaggtgagagtggtgctgcacccgtaagcccagcactggggatgtgtgtagatgcaggaagagcatcctcagtgactaggggaattagagggcaacctgggctgcaataggccctcacccaaagatcaaaccaaactacaacaaaactctgaaaacagtaacagagaattttgtatacataggtgtgtttgttatatgatatatatatataaaataaatatatataaaatatgatatatatatatatataaaatatgcaatatataatacgtaacacacaatatacaatataatatatactatacaatataatatatgatatgtaacataacatataatatataacatagttattctgctataaatacacacttctaggatgtatttctgatgctgtgtttgtgtttttcttactgttctctatgattgtgggcactgactttgagcttgctggtaatgtgtcagttatatttgaatactttctgagagatggaaattaaatttacatgccgctcaaactaattaatctctttcttagtgagtaagacactgtgccaccatcacctcctcaagactgtttttcagtcatatcagcagtgcgtcccagctgatctgtttctgacatctctgaatgccgtctttctcacttcgggaactctgcagcgtctcttgagctcagcccttggttttctgtcttcttggccttcttgttagtgcttgcgtttggtatctgggttatgccagctctgtaaaattaatcggaaagatttaaagtcttttaacatctgggaacagtttatataacatagaatatagtcttttgagggtttgaaacaattcacccataaaaccacatgggcctggtgccctttctgagcgggtgtactgatggctctttataaactttgcagtttctcttgtgatcattgctatttttaggttgctatttttgcttttgtcaattttgataatttatattttcttagaaaaacatcccttatgtggaggctttaaaatatgtgtacagtgtttctcacggtgacttctaggatttagggactttcttctacctgtgctcgctctttctttctttctttctttctttctttctttctttctttctttctttctttctttctctctctctctctctctctctctctctctctctttcttcttcttcttcttcttcttcttcttcttcttcttcttcttcttcttcttcttcttcttcttcttcttcttcttcctctttttttttttttttttggtttttttcgagacagggtttctctgtatagcccaggctgtcctggaactcactttgtagaccaggctggcctcgaactcagaaatccacctgcctgcctcccaagtgctgggattaaaggcatgcgccaccactgcctggctgtttctttcttctttattgtgtttgtattttcttcttttcccctcagttagcctctcagcctttaaaccaaaaacaaaaacaaaaaacaaaatccaaaaccaaaccaaaacaaaaaaatctttattggagatttccgttctggattccttaactgtgtttaggcttatttttactatttccttctcaaattttctaactagcttatgttttttaaaaaaatttcttatccaataacaaaaatatggcttctgctttataggctatgtataaatatttggcaaacatctaggttttatttaagcttttttcttttggagttgggggtcttctgtagtccagactggccttgaacttgttatttgcaaagatggccttgaactccaaatcccagagctttgtgcgtagggatctgtatatctctgccactctgcagatttggtcattcacgtgccactttctcagtggtctctgcctctgacaccaccttttaagtgctgaagtgctgggacacaagtgtgcactattgtcttagatagggttttactgctgtgaacagacaccatgaccaagacaactcttaccaggacatttatttggggctggcttacaggttcagaggttcagtccagtatcatcaaggcgagaacatagcaacatccaggcaggcatggtacagagggagctgagagttgtacatctttatctgaaggctgctagcagaatactgtcttccacgcaactaggatgagggtcttaaagcccacacccacagtgacacgcttactccaacaaggccacacctacttgaacagggccacatcttctaatcttgccacttcctgggccaaccgtatacaaaccatcacaaccatcatgcctggtttatgtgatacccgtgaaagcacccagagctttgtgtatgctgggcacgcactctgccaaatgaactatacacctccagcctttagttttaggttgatttttaaaacccatttctccctttaatatgtaacacactttgaattggtttggtgtgtttgctgagaacagtccggtcggtttcctgtgtgggaatctgactagattctgaatgactctagaagatgctgatcatacagaatttctctgtaacttccaagaaacagcttgttgggtgttcctgttgtgtgtacatcgctgagtgtgctcactcaaactgagtcactgtgatagcgcagggtggccactcttgtgctggaagcctatggctagccaggacaccttctgtcgattcttgcttcaatttatctgagataagcgtcttgagttgaatgactcttattctcgcctctgcccgggacagctgaaggcaggatggggtagccttgagaaccctggctctgcagcctgttggggctcaagttctttctactcaggggagacactcaatctcctctctacaaagtggggcttctcatcatctttctcttagggacccagtggattatcccagccccgctggtgtctgagattcagtggtcagaggcagcgggtattcatgcacttcaccttcagcattatccactgatcttttttttttgttttgtttttcctgcatcaattctggtcctctttgctctggtccatctccccacagaagttatccctaaccttgcctgaacttgagaactccacaaactgtttcttgtagcattcagatggaggttctcctgagccttacgaaaatgtgtccccctctaagatggaggctttcgagcttagcatagcctgcttgatagtcccctccctctctcaatgccatgcactttctattgaggcaagctctgtagaggtgtttgcacaggcagggcggggcgtccctgccctctgcccctccgcagatttgctggttcatgagttgtctctcatcccctctttttaactcctccgaaacatttttcaaaataaaaaaaatttttttttgagatggagtcacactacgtagccttgactggcctagagcttgcagcatttccggtgtctggtgtacagaggttggaaggaagctagtttggccttgaactcatagagctctgtctgcctctggctcaagtgcctggattaaaggtatatactgcactcttggtgtattttaaggtagggtctcttgtgatctcaaactggccttgattttactgtgtgagatnnnnnnnnnnnnnnnnnnnnaatgaccttttatttctgatcctccctctcccctcccccaagtgctgagattacaggcatatgccaccatgcctgatttatgtagtatgggaaattgaacacagggtttcatgcatgctaggcaggtactctaccagctgagttataccctcagtcccaaaggctagttacagaaaatctcaaatacacaccaaggttgagtcttatccagtgatctcggtactctcctctcagcacctagcattgatctggactttgaacaatccaacacatacggacatgcttctggaaggtatccctcccaggtgtgaggactctgtcccagagtgtaccccgtctacacaatgagctgctcagagggtttggtgaactggtgctttgcacgtacacgtagcagcgtgaggttggggacagcgttcatgtgggtcaaaatgaggcagttctgactaacccgcatgtcacagtctgcttcagttttcagactgggtactgtctctgtctctgaatacaggaacgaatgacagtcaaggcacaatatggcattttgagtgttttttgggggaagtttctgatatgatacagccgtgcttctgtgttcggccatctgatgagagtttaggctttcccccagccacatcatcgtttatttttgatgtattctttttgttacatagatacttctttttttattgtataatttatttatttattcacttaattattatactgggaaataaatttagggcctcggcatgcttgctaagcacccaccactgtgccatagagtcagcctctcatcaccctggttttaatgaggtgagaaagttgtctccatggtcactagatggcactcaagtcacgagcaacccagtgtgctcagggatggcgtcaagggctggaccacagcttgttcttgtaaccagctgatgacttctggaatgtgcagcaaagtagccagatcaatatgacaacagagctaaatttattgatcaaatttggttattctttgggacttcccgggttctctgagggcccttcctgtagagatgggtccctttctcaggtggacgcagctgtctggcctgaaggttgtcacttcctttgcctatggctacatttctttccctagcctggaaagtacactgccttgttttcttgtttctcccaaaacacaacacaaactgtactgtatgttggtagagtgcttgcccagcgtgcaggagccctgggttccacttccagcaccatatggtagcccagcacttgcatgggggaggcaaagggatcaggagtgtgaggccatcctggctacatagtgagtaaaagacccacggggctaactcattgagactgtatctcaaaacaatgacgatgacaacaacagcaacagcagcaaaccaaccaatcaaacccgcttctttctgccttgagctccctgatgatttgattcagcctggagttttgtttttgtgatcttgtttttgtccccagtaaggacaagacctaacacgaacctcttaagcacttctgcccgcagtttgcctagcctgaagtttgaagtactctttggaccctgtgcaccaacgtatgaagggaagactttgttgttattattattattattatttttaaaggagtatgccctcttagatgtggctattcttttgaaaggcagtaagctcacgggacctgtgatacttgcaggcatctttgacgccgccacccctatggacagtgtgctccagaacggcactgggaaaaccaaagttgtctttggattttggatgacagtgaatttcccagtagtctccccttttccctcttgcctggaccaggcgggtgtcaggcagccaaagccgtgggcttggggctctgccgagccttgggagctggcaagactgactgaaggcaatggcttggcttctccagggtacacgcgtgtccccagggaccgcctgctgagctgtgacttgtggctggcagcctgttctgtcccttccagttcttccaggtgaggaaactgggcttcactctcacagtaaaaagctaggcgtgttcatttgggacttggggcttccttggacccaactctccaggctcagggaaaacacagcgaaacacttgtgttttggcagaaagacgaccaggactaaatagcggctttgtgttggtggcttctttgctctcccgcccttgactttatgagctgtctgcagacacaggggcgagaacctggggtgaacctcaacatcggagacctgtgacctgttctcaagttgggaagcactggcccaagacgtcagcaaggctgagccaatgcccacagtcctatctgcttatggctcctaaatctacaaacgaacaaggaggcctgtgcagttccagccaccaccagtaggtggctagcttgccggtgggactggtagataactatcactgactggctaccaggataaaagccagtctctagcaagaacacaggggtcccatctctgactctgctttcattagtccaagataacaggctcctcccgctaaagcatcatttgggatgagattaaagtagactctggggaccacagctgtgcctgtgtatgtcactcttccaggctgagaactctcctatgccagggcccagctcagttcctgtagataagaaaatcttcacaagatacacactctgccacactgattcttgccactaaccttgggggccgagacctggctgcagaaatcagaaggccagctcaggaccttgccctctttaggtctctggcttcagttctccatccctgcttttacctctagaccaccatatatttgtgctttacactcctttctgtgagccttccagagccgtccaacctgggttctctgggccacaatggatgaagaattgtcctaggacacattaaatccaagatgtccaagccacatcctgagagttataagagagtacacatacttattttgagtgacactggagcatgacaggccattatcggctacatgtgactgttcgttggatatcctctggcagttcctagcaactgtcatgaatctgtgggaatataaaacggttagaatattcttattacatttattttaatggctgtgcatggacatgctcctgtgcatatgctatcatttgtctcttatcttcacctgaagtggctggtggtaggagccagacccaggcggttcacgttgagaaaataatatgttgctgtctgtggcaatactagaaataaccactaggtggagatgttgtgccttaaatggccttggctcagtgtgctgggcccaagtgtcagtttcatgcttgggtttggagcccagggtattctcttgtccacaatggctctttagcgtttcccttttcacgtttctttctctgcaccattcctcctaatctacctgtatataatgaagaaaaagcacgttttctcctgtgcgttgtttcttgagtatattggatggaggttcaggtcacagaggtgcggagggctgcctggttggagttgggggggggcagggtgtgtgctttcctttgttgtacattcacagagcccgtcccccagctctccatccagactcctgttcatgtaaccattctccacccagccacacccatcctaactcctcttccatttctttatgcttcagaggagcctgcaggtgtactcaagagtccacaagccactgaccgtacgttgctgtcacctagggatccacgaggggatgggacattggggtttttgctggaggggaattttctgacttgcatgaaggggactgagtcacagtcaggtctctgagttgaccgctggcaagtcgcagccactgggtaactgatatgaattacgtgggatgctttaaggccagtttcctttacatctcccagaccctccctaagcttgttgcatcaaccatgcttccaacatgggggtcagagtaggccagggggattgtgaggcatcttggggatctggaggtggccaggggaatgagaagcgcttgaagcataattcatgagataaatcatgatcgtgatgactgacaagcagttggtagcagtcccctgcggctgatcattccaagcttccccctttgctttgcaaagccaagccctgtctgcactggggtctggaggaggaagtatgtggaacaatgataggcagggtagctctggctgcccctgcctcccccaggcccctgcactgcctcagcagcatggcttagggtggacagcctcatgtctcagctctgtgtggaggctgttttctccgtgcttgccctggcttagccttgtgtggacggagacactacggatggtcctggtgatggctctgccttgagcatcctgaatgtcctgcctttgcagggtcagagggtagcctgtgaggtcctgtcccaggaagggcagctgtggcattgtcaagagaacatgtgtcatagagggggtgataataatctctccattttccatcttctctgggacatggcttctctggtcacctggctctgaacccacctctgtcccccctcccccatggtctgagccgcagcttgtgtgtggccagctgagtgtgctgcatctttgctatcctgtgctcagtcacatctctgagactcagtttcctcatctgtcaaataggactaatgagatagtaggaatagtctcatttcggcagatcaaggacccaagggacagattatagggagttgataatagtcattactagtgtagtattagttatacatgttcaggggccacttatggtgcatatggggggaaactgagggctagagatgggacccccatctgaaggtggatcagctgaaccctaaaaggatccacagggccacttctctgataccttcttgtatcttccagtggacgacaacctgggcttcctccccacttttgggccctgctatgtgaacctctatggcagtccccgagagttcacgggcttcccagatccttatgcagagctcaacacaggaaaggtgagcagccaagcacagcctctaagggtcctcagcccagcctggcactgtgtgggcccagatgatatgccactggcctcacgaggcctgaacaaaccctcagtgcacctccttctgtttgggcttctttctccgggccaattggacctgctcactgccttcattcccggacacccaggcccatccccctcagccttcatgcccttggacagggcccgaggattgattggtttatccccatctataggggtgaactatagtatgctgtcatgcgttgtgttttcctgctcccttacccctttgctcgtgactgtgactttctcttgcagggagaaggtgtggcttatcgaggcagggttctgttgtccctggagaccaaactggtggaacacagtgagcagaaggtggaagaccttcctgctgatgatatcctgcgtgtggaggtgagggtgtgctctgggacagagctggcttgggaacaggaacaaggtggctaagtaccgtggtacagggccttcttcagttctgacctgcattcactgtaagggcacttctcaggcccctgtgtctcagggataaggggagaatagtgtgatattccgtccccatcctcacccccagggatgctttgaggcttaagggagagagatgaaagtattactggaactcagaacttgatacagctcatgatgaggtcagtggacaccatttgccactgatgtcttcaaatccagcatgctgcagtgtggctgttgttagccctttttatacttgaagactctgaggtcccagaaagatcagagccacgcatggtcttcaggacactgtggttagctacctcaggagtccatgctggccctcccatctgccagatacttcactttccctgtctgtagtcacatttaccttaggatgataagatgagatgatatatacacacacacacagtaggcactcaataagtgttatctatcattacagttcacatggtccaaaacttatctgatccatttcctttcccccagctttccaaagaggtgactataataaaattgtgttgtttcatgtcaagacacatgagtgttttaaactgtctctgccctgtgccttgggcttggaatggccaatgtgagctatacgttatgagcatatgactgaggctgcctgtgcagactgcagggctgcctgatgtgtgtgcatgtgtgtgtgtgtgggcagggcatgatcactgagagttttcagcccctttaaggggcagatgaggtgtaggatgccctgagggacactgcaggagaccctgctctgtggacatggtggtgccactaatgctggtttggattaaggagcggccacctgaccttggaggagcagattgtattaggaaacatgagcaaacgtgcacagacctggaaagggtttgttcattcagtaaccaagtttggaggctgcacctttggaccatctgtcactttctgcccagccagaaggagtttctgagtcctgccgtctatgggatccatgctgggggtgggggtggggcaggtcttgtttgtctccccctgtgatctctggcctgctcactctgcctgcagaagtacctgcggaggcgcaaatattccctctttgctgccttctactcagccacaatgctgcaggatgtggatgacgccatccagttcgaggtcagcattgggaactacgggaacaagttcgacaccacctgcctgcccttggcctccaccacccagtacagccgggcggtctttgatggtgggtgaggctggaggggacgtgggtcatagggcaaatgccaatccttgcctcctgtggaaaccacagcaaacctagcggtgtgttcctctcctgtaattcttgtgttgtccctcatacccctcttgggggcaggggcactgcacccacagtttgaatccctgcaggcttgatcaccacggttctgtggttgccctggtcctgagctattgccgtcatcacatggggcctgggggcttggcttggagaccttgaccgatgtgagcttgggtcttccagagaccttctatcagccctcttgttttgatgtgagagtcagagcactcggtcccacccactccgtcccccaggtgtgctcaggcaccgtgcttggatcctgggaactaccggccacagcacaagcattaaaggagaaagcagagctggtcctctctcctatcttgagtcctgtctcaagcagggccagctctgaaagctctgtgacctgagctctgtgctctgcagaatggcgtttcacagccctgggcctgcagtgctcaggtccctccctctccctgtaggatgccactactattacttgccttggggcaacgtgaagcccgtggtggtgctgtcctcatactgggaagacatcagccatcgaattgagatccaaaaccagctcctcagggtcgctgaccgcctggtgagtgggatcctgtccagacacggtgcctggtcgctagccctgccagaaggatgtgcaggcagacttgtagagatggggtatcaaggtgctggggatgcccgaggtggatgttggagatgactgaaagatggagggttgagagataactgaagtgtcgggatatgcctggtgttctctagttgtgccagaaacttccagccagcagctagaagccagaagctaggggatccaaacttagatggaggtggccttcatggctgctgagggagaggtgtggagtatggcggagagaccaactaaggagcatcaagaggatgccatagggacaatgggaggaagtgagagatgaggaccgaggaccatatctagcatatcatggcaaggactcagggagggtgagacggtcctgggaggccaatggctttcttgggagctcctggaactcaggctgctgggccttggtacatttgtcttggggagatgaggtgctttgagagaaatgatctggggtccaaagctgggaatctggggagaggggcagagtgtttgaatgtgagagatattctgtgtgggagtgaggagaggcttcagggaacccctctgcccttttaggctgccttatgtttcatcggggcatgcaggagaatctcgagagggcacagatgtgaaggccaagggaggggtgaaggatgctgggaagccgctggctgggttaggcagtggctccaggctcccttccagggagcatcacccaactggggaaagtgagtgtggctgcatggtagggatgaggggcagcatggggaaggtcgggctgatgagcacagtaggaagggaggcagaaaggcaaggaaggggcagtgtccctgaaattggcagctgctggtggtgggcagctaacgccagcgggggaacttggagttgagactgcagagtcactgtcctgctgtcctctggactcctcattattctaccagaagaccacagttccccgacagcaggagctgagtcttcttcctagggtttgtcccccagggtggaacacatatcacatgccctgacgtgtggagagggctacttaggagactgaggcagctttgggctgacaggtattttggagttggccttccagcccaggaccttgccctaggaaaaatgcccagagaaggggatcagatgaaatgcaagagagtcagctctgggagtctgctctttatgtctattggtggctgcatgactgctggggaaactgaccagtgttgtctcagagagatccactcccctgtggggactcaggcctggtgttgaggtggcaggtgggaggggatgcattcaggctgtgaaaaatttctatttagcaaaggaccgcctcgtgtccatccatgtgtgagactggggatctggcttgagaattgagccatggggatgcgtggggcattctggaaggttctggagccagattgagtctggctttgccttgtcctgctcctactatctattcctttctggctaggtaacagggcctgggggttgggtcctgctccatggtgatactcctaacctagggatgcttgttcccaggaagctaacctggagcaggtccacttggctctgaaggcacagtgttcctccgaggatgtggacgccctggtggctcagttgacagatgagctccttgcagactgcaggtagggggtccttggcaccttcagatgcctctcctggctcagccaaggctgtctcctcaggagtgttcgtgtgtggtggtgagcagaagcacgtctcccagccacgcttggccagcagtctggccggtgctgagcccagaggtgctggagcctgcaccgggagttgaaaaggtgacgttcagaacaggtcataaatctccccgcagcagcagcagcagctgtgggccgggcgggcgaccggctcacctgaatgggacgcattgtgtgtctgatccccgacctcatagctccctgatggaatctccaggagaagctggggtgggggcacccctccttcccccaaggccatgttgtcggggaccagggtttctgtttaggctttcgctgcacacagatgattgtcagcttcaggaaagggggggtctgggagtgaggaggaaagggactgcgggtcagcggcgggggctcccctcaacatctcctccactcccaggagggctagcggtagtgtttccatgggagctttgaagttgaacttggcgtgaagaacgactccttaataatatctaatcaacaaaggagtggtaccgtgaggaggctcgagtaaaaggaaccgtgattaccacaatgacaaatgcaaggaaccaggaaacctgcccctcgccacagtcggctggttttcagtagccctgcctctgagggtcctggtttctcagttatgcaacagacttggtcagaaccactctcctgaactctctggggttccgagtgaagatagccatctccctcaccctatctttttctttctcaggctagcttagctggagaacacagttgaagggcatcagagaaatgctttcactatgagatatgtgaaactggtggctaggtgtttgcataccctggttaggaagtgatcccaaggaaatgcccctgccccaccctaaacagatcattcctccattctccataccttcctgaaaccaggctcagccctagctctgttgataacttgagccctctaggtaggatgtgaagcgagaggcatggcctgtgggagctcagagcagattcagacagtggaactcaggcaatcttcccaaagagattccttgtggaaatgcaaaggtcggacgtggagaagacactccccagaccaaggcatgtagccctaaaatgcctgccatcttcagggctaccaaggatggttgatttctagcaaggtgggctttaggggctctgccaaggagagctcaggcttgggtacgctgaggaagaaggagactcctgggccagatgcttgctgtgccttcaggacgacaagagaggagacatagggctgcaaagtgacctaaggtacaggcacctaaggcaggagctggggagggtgggtgtggagggagcagagagtagcgcagagtttgcaacaggcactgtgtgggaagtttgtgtttattctagtcaccaagcaaaaacctctgatcatacaattctctgagggacaaataaggaaaccgaggcacacagagattgagtgacacacccagacccacatgtcgagtaagtggaagaatatccctctgctcctttgttgtagataggacatggggccctggagaggcaccctagctatggccacagcagctgggtgggctttggggccattctctgagaggcttagcaggaggggagcagagtgggggccaggtgatgaggcatcaggaagtggccttggtctgggggaggagggaatgtggtgctggagggggtcacacagggcacaatcatgggggtagcatcttctctccctgtgccttgggtgtgcctacagaatggccgctgtgcctagtgcccagtgatgccacttctggacagtggctggcagaatatgggtttctgcgtactgttcatggtaattgtggggtggaacaggcaagtctgtggggctggtgggatccaatccctagtcaatctgaggtgctgggacattggagtctgtgggacttgctcccaggctgtcttcagtaccctcttagggaggatgtatctggaactctgtcaagccaggctcttctgccactgtcctgaggcaggaggatgcccaggcctctgtggggcatcagtcccgggacaggaacctggagtgggaatgggctctcatcttctcaggatatttgtcaggaccacggggatccatgacatgatttgacatggatcaggaagggactccagatccatccctccaagcaccacttgaggctgaaaccatgcttcctgaggcttgggcataagcaggtgtcatggctgacctgggctgactccctgctatcagccttattgtctctaggtagaatccttccctagctcactctgagcctcccccaacccctgtcaccccctgcaccaatgtaccaaagctttcttctctgaactctgggctcactgggtctcttctgcatgcccatccttctggtctgggccaggctgtgtctaaggccacacatgcccccccccccccccagactccatcaccatctcctgtccactcttggatctatgggtttaccactttcagagatcacagcagctcttacagccttcatttcttctcctgtccacagcccagcctccctccttctttcactccctcttccctccaagcttagatgaccagcgtcagcatcatggagtaggctattggggtggagggggaggagtaacannnnnnnnnnnnnnnnnnnnnnnnnnnnnnnnnnnnnnnnnnnnnnnnnnnnnnnnnnnnnnnnnnnnnnnnnnnnnnnnnnnnnnnnnnnnnnnnnnnnnnnnnnnnnnnnnnnnnnnnnnnnnnnnnnnnnnnnnnnnnnnnnnnnnnnnnnnnnnnnnnnnnnnnnnnnnnnnnnnnnnnnnnnnnnnnnnnnnnnnnnnnnnnnnnnnnnnnnnnnnnnnnnnnnnnnnnnnnnnnnnnnnnnnnnnnnnnnnnnnnnnnnnnnnnnnnnnnnnnnnnnnnnnnnnnnnnnnnnnnnnnnnnnnnnnnnnnnnnnnnnnnnnnnnnnnnnnnnnnnnnnnnnnnnnnnnnnnnnnnnnnnnnnnnnnnnnnnnnnnnnnntccctccctccctctctctctcccttctttacctggaaaggattgttttccccacagggtacctaataaccctcatcccttctgagtgtgctggcttgctggaccctccccatcccatactgcaccccttgcctctgtgcattactttatgccaccatgccgttccagcagctacaagcccttcctagcatcctgcacaggaatagttcctgccagccctgcaggtgcagatcagggccactttccccccccccccctgggaaacattccaaggctgctcctgtggggaacagcaggctgcctcagttttccctcatgagagggcaaaattgggggatggtcatctgtttggactcaagaatgagaccagctcattctccaaggaatggccctgataaaatcaccgacttggtcctcagggacaggtggtgacttggtgagcagccggctctgctccctggtgttaatgagccctgctatggcccaccttccatttgtaggcaggactaagggtgcagttttctcctcagactccctttctgtaccccagtattggacctttctggggggttgagaaagagccaggacatctttgagtggtgagaacttgtcttggggagtcttggttgggtggtctgctggagggtcccctgtagcttctccagccctctgctctactgtgcgccagggcccctcacccaccacgcacgcacggcctccgcctgctgctgccgccggcccggggctgccgtccgcggcaccctcggggcagtaaatattatattaccacagggtgtgcagtacgtgacctgagacgggccccggggcttaagtttccccgagatggagctcgcgcacccgctccccccaccctaaaaattcaattaaaaaaaataacaggaaagacgcagcgcgccgagggcctgccagagcggtgccgcggcgctccggcggtaattggttctgcatagctcggggaaattggcagaaaaaataaatcagccgggagcccggagtccagacgctgcggggagggggcgggggctgcagcgcagagcaggcctggctcagcgttgacgaatgtcctgtttgagggcaagggctgggccagctggagggtcctgctggggagggagaactggagttcgcctattcttttctagcatttcccttgggtgtgcacatccagtcctgggatgctgaggagtttccgtctgtggggcatttagagagcgccccgtgtaatgagtccgggatcagagatctttgcccccacacacgatggagtttaacttaactcctcacttgggcttcagcactgttatttgagggccgcggtaccctagctgtgctcagaaggctttccaaagctcaggattctgggagggccgactccggggcagccagagtggatgcttctgtattcatggctgctggcctccccacagcgtctgcagtagctagtcaggggtccataaatttccttcgtggaagagagtgtgcgcccaacacagaagggatttatttcagtgtgggacaacttagcctctgccctctgccctagactacacaagggggcaggaaagagaccctctaggtcctctgagagcttgcagtcagtggggtaggatagggtggggtggggtggggtggggtggggagtactcatacaaaagaacccactagactggaggttgagggttatcccaaaaaggcttatgcctgggaataaggaggtatgtttcagagtagaaggaccaggttgtataaggaaggcttcctggagcaggcaggtccgcgatgaggtgagtacccagtaggctggcagtgggtaaggacttatgtatacaagcacctgcctctgtggtgtgtatagatagctctggtgaacaagcgcattccacctgtctctcacagccagcccctgtgtgacatccacgagataccttctgccacccaccttgatcagtacctgctccggctacgcacccgtcacctgagccagatcaaagaagctgctctggccttgaagcttggccatagtgagctctccactgccctggagcaggccgaggactggcttctgcatctccgtgccctggccgaggaggtagtgaatcttgtgggggcctttcttcagccttcctgcctcctggaatgtagaccaaatatttactctgtggtacattcctgggtctgttgctaggtgaccttggagcaggtcgcttaaccttctgagctctagtatgcccatttgcaggacacaacagcgtacttactgggcattacggtgtccgactcagagtctaacacacagtagatactcaataggtaggccctagcctattgagggatgctagaataaggctggtaccagaacccagggtgtctggctctaggtctcatgatgaagtctgtttccccggagacccgactccttctgggctactagttcctgtttgtaggaaatacgggaggtgagacaggatggtatctgggcacgtacagggagatggtgtctgaaacagagggctgtaaaagggaagtggcaaaagctgcttggagagggatgatgaaccttttagagtttccctgggcagggtggtaggcatatggccagttctctggatgtatcttcataatggttgggatggtcccccagactgctgactggcagcctctgaaccctcgctcctgatcctaccctcttcgctgaatttataccgtggctgagagaggccaagggcaagttctcctcaatatcctttcagttcctacccccaagtctgggacctccgtgtctctgaagagccctgagaaggtggtgaggagcccctgttgggtggtatctactcctctaagcctacagaacttagggtcctagagtcagcaggaggaagaaggaggaacatctagcagaccacatcttccctgctctgtgtaggaacatcttcccagaaaggcatgggcatctcagagacatttgtgggagctctcctctaagctaagggccaaaggcagggccccgagtgagcagtgtgggatgggagctaagtgagtgaggcaagacctttgtggcctttgagtcagagatcaggcatgactccgtccgtacatgtcaccatccccaccttgactgccaccccctctccagccccagaacagcctgccggacatcatcatctggatgctgcagggtgacaagcgtgtggcctaccagcgggtgcctgcccatgaagtcctcttctcccggcggggccccagctactgcggcaggaactgtgggaagctgcagaccatctttctgaaagtgagtattctctctgctggggtcactataggattttcttaacacaaggcctttcttcagctttctctgattcccccaccatccagtcctattctggaaggagtatttgagtaaaataactttctttttcttcaattccttccaaactctccagattccatacagtgagtctaggaggcttgctggtgggtgctggaatgtggggttggaataaaatagaaaaacaaagtgtggtggcacttgcctgtaattctagcacttgggaggtagaggcaggaggaccaggagtttaagactatccttggctacacaatgagtttgagaacatcaagaagaagaacaacagaaggaggaggaggaggaggaggaggaggaggaggaggaggaggaggaggagaagaagaagaagaagaagaagaagaagaagaagaagaagaagaagaagaagaagaagaagagaaggaggaggaggaagaggaagaagagggagaagaagaagaagaggaagaagagggagaggaggaggaagtagaggaggaggggggagaggaggaggaagaggaggaagaagaggaggaggaggaggaggagggatgagtagcagcaaattaagggccatgtgtgtgtgtgtgtgtgtgtgtgtgtgtgtgtgcgcgcgcttgtgtatgtttatgtgtatattcaagactttattgcttactggggctggtctctttcaagaatccttcctggcttctaaaatggcctccagctcttccccagtggcctcagctactgctgatgaagggaaagtgagtggctgcttgtggaggtgctcccatccttttctctgggcagatgttaggtcacagagcccagatggctttggtcatggctgtggccagaggatcaggacacagtgtgcacctcataagatgcctgtatgcagctactcttagtggccaggaagtcacctattttcttctaattgttcctaatgcctctgccttcagtgcctcctcagccttgcctctctcccagcccatttccccaaagcctctcttgcagctgctcccttctctacctcatacctccgagcttccaggagatcaccattgaccacatctcagccgtgactcttctgaactgagccgtctgctggctgctcccctatctgtttttgtttttatttttgttgttgttgttggctagcattcttcttgccccttggggtaggaagagagggctggtttcagctgcagtttgtgtgaatggcttgtcagtgtgctggttgcagttctatctagccttgggtagctcaccaatgctctctgaatagcctattttcttcctgactattaaatgagaatgaggctgtccacctaattcagctgaggactgacttagacagtgctggtagtacttggtgagctaggtggtcagtgtatgcttggttctctcttcccctgccctccacttccttttggggctgtcccttgttccagcacttggagatccatcctaggctagtgtgctggatagtttcatgtcaacttgacccaaactaaagtcatctgagaggagtaagcattagttttaaaaatgcctccataagattgggttgtaggcaagcctatagtgcattttcttacttagtgattgaagggggagggcccagcccattgtgagtggtgccacccatgagctggtggtcctgggtactataagaaggcaggctgagtaagccatgaggagcaaacccgtaagtagcactcctctatggcctcggtatgagcgtctgccttcaggttcctgccctgtttgagtttctgaccttcttcagtgatgaacaacaatttggaaggcaataaaccctttcctctccaagttgcctttggtcatagtgtttcatcacagcaactaactctaactaagagagctaagactgagataattgatgcactgggagattggtcttttggaggggaagggttttgtgtgtgtgtgtgtgtgtgtgcttggcaggaaccatgacctcatgaccttcccacctgctcccggaccatctgaggacattctttgtttgtccctaacctcaagttccatcttccctattgctctcacaggctgcccctctcctgtctatgtggcttgaggagggggacacagtgtagaaatggctggtagactctggaacacttttacctccattctgacctcttggtcctgaagcctccaagagaatgtgagctgaaaatgttccctgattccaagtgaaggggggaaagaaggatatagaattgtttctcgaagtcttccccacggagttcatgagcctgccagtagctcctgagcaagcgctacaaaaatgttggcagcgggcagagaccaagcaaacactggtgttccttaacttaaacccaagctggaaaaagtgagcaccagcagaggagaggagccccaaactagacatttctttatttgctgttgctattttgggttgggaaggctggccccgtctgggggaggctagtggtggggagctcgaggtggaggaggaaaaggggggggggcaggaattcctgcagtgtcccaagggctggtggcttggagggaaaaggacagctagccaccctgagggaggagacggctgaagtgaagaccacagggagttccggggtaagaaatgtctccacacttctccagggacaactgagaggaggtggacatgaggaataggagagagtcagccaataatggtctgctccacttcccaagccttctctcagcataggctctaccttctgggggggggggggtccaggcctttccaccagcttgggaaccctcaccctgtcttctcagcctcttctgaattcacccagactccccctctgctctctcattctgtgaggtatctctcaccacgctgtctctgctaggggacagggtgtcattttcagagggaggaactctgctccccaaggctgaatctgacctttggtttcagtcaaacggtgaagtaatcgtagggaacatatatgtgtttttaaatgttgggttgttgtggttattccacttggcagagcttctgaagccttcgggataaaaaccagctgaacagcgaagagtggttaacatgctgataagcacttgaagttgtggggacattggatgcgatgctcgcgtctcgccagagcatgaagtactgaaaatgaaacgaagtggctttcattgctcctctggtggagctctgctgtttctaggatggtgctgtccagcgcagcagccacacagagccatttgaattacttaatggccaatcatgaaaactccatttccctggttacacgagtcacttttcagatggcttgtgggtgccctactggaccttgtagagatgagccttttccactgtaatggaaagttacctcaaatgatagatgtaagaaggtggcgggggaggggatattagagaccctattgtagatatgaccccatctgtagggagctcctacatggttgctattgtctttttttgataaataggactcttggggagaagaacttctatgacatttggtgtagtcccccaacagagtacacatgactgggtgttgagttgttgtgctcagacctgaggggctgtgcgtatttgtgtttctttgatcccagtatcctatggaaggtatgcctggggcccgaatgcccgtgcagattcggatcaagctctggttcgggctctctgtggatgagaaggaattcaatcagtttgctgagggaaagctctctgtctttgccgaaacggtgagtgcctgctagcctactggcccctgggttctgaagatgtatgacccttcacctctcttcttttcttggtctacagtatgagaaccagacaaagctggcactggtcgggaactggggcacaacgggcctcacctaccccaagttttctgatgtcacaggcaagatcaaactaccaaaggatagcttccgcccctcagctggctgggcctgggcaggagattggttcgtgtgtccagagaagacgtgagtggtagtcccagggtgtggagggccaggctaggatactcaaccattcttcccaagtcctgagccctgtgaatctttctgccttgctggtcacagagactgttgtttggaccctcatggggctggggcttagcaggaatagctcactcagaaataaagtgtgatgtatctggggatggctcaggtggcaaagcacttgtcacacaaaagggaggacttgggaagctcagtcccttggaacccatgataaagctcagtgtggggcctgtccataaccctcctatgaggagacaggattgggaacaggagaatcccctgggaccttcaggccaactggcctggcttactcagcagtaaacaatcaagagaccttgcctcaaacagatggtgaggactgacatccaagattgtcctctgacctccacatgcacgccatagtatgtttgcatagcctgccccccacaaaccagttcctgccgtgtgtacacatgcacacacacatatattcatacatatacacagagccctttattattaagcataccttggagttagcacccagccatgtgccctgtcctccgtgatacaacagtgtcctgccattgcacatacatgacgcttcctgttccagatcacttgagtagccccactttgttcagtccttctatgcttcctcagtcactctgtcctctcttttatagttgtgtgacacccagtaactttttcttaagcttgaagtataacacagaatcaagcattaaatcttcaatgtagagcttgatgacattttcctagagctacccattggtctttggtgcctccttttggtccctcttttcttcttgtatctcaggtgacacattctttggcttgggaccatctcttcctgtcccgggcctccttctcactctctgttccagtttctttgcactacccctccatctgtgtcgaagtgaggttgacagtgcaggcaggctggggtatgtgccatcctggaggcaggagatagtggggtgacactgttactcctccccctccaccccaatagcctactccatgatgctgacgctggtcatctgagcttcgtggaggaggtgttcgagaaccagacccggctccctgggggccagtggatttacatgagtgataactacacagatgtggtaaggggttgctgcaggtgggcagtgcgtgctttttctggggtcccgggtgttgggtcccacaaagagcctgtgactcagaaagatggttgttttctcaactgcccctacttgctgagatgactgctctgtgctccagaggaatggtgatatgtggctgcccagtctatctcctcacacttgcctgttgtgtctctagaatggggagaaggtacttccgaaggatgatattgaatgcccgctgggctggaagtgggaagatgaagaatggtccacagacctcaatcgggctgttgatgaacaaggtgggaacacatacagcttggggtcccaccccagccagctccaagtatgccagtgagacagccgaagattccaggcacttgtcagtggctaattagttcagtgggctaatccacctaggaaacttcttgaaaatacctctacttcaagctatcatttaggacaagagtttttagcttttcagggtctaagcaggcgctacaaagagagagatagcttaggagagatggagatttgctgacaatgactaacaggtttcaccccacgtcctaggctgggagtacagcatcaccatacccccagaccgaaagccaaaacactgggtccctgttgagaagatgtattacactcacaggcgtcgacgctgggtccgactgcgcaggagggacctcagccagatggaagcactgaagagggtgagccagcgggaggtgggtgggagtggagcttctgaatggagatggccggtggacatcgggtagacccttatgcattaacaatcatgcgagtgagcttgtagcattcactatagacctgtactagttatagttatatagatatattgctgtgatgacacgtcatgaccaaggtggcttatagaaaaggagtccatttgggcttatagttccagagggctagagtctaccatatttgagaagcaggcatagccgctggaaggaagcccagagctcacaccttgaaccatgagcatgaagcagggagggaaggggaagtggcgggggtggggcacggatttaaatttcaaagcccacacccagagacacagtttctctagcaaggctagaccacctaaacctccccatacagtgccatcagttggggaccaagtattcaaatccccaagggacattcttattcaaagcaccacaaggcccagtgaattcagtgacaggtcacacccagatcaatttagcatactgaaaatataggccacactctgcacacaggtcccaaccccccaccacaacgcagaccacacactcaaaacatgtatgtcagaccaggctccacagatcacacctggtactcacggatgcccacaaatacatagagtagatatgagtcaggtggacttttctggtagcattcacttacagtcccaggatgctccaggatgtcagagaagtgccttgtttttggcttcctagaggaagactccataacatggaggctatgctgtggcaggcaaggcttggcttggcagggcccttgaaccccacagataggaggttcaaggcaggggatggggtgtacactctctgagttgtctgccattggctactgcctagcaggacgtcctgtgacacacatgtcttcacagggaggtggtttactagtggtgggctgtgtcctgagcccacacttctggctgccggtgataggccacagtgtgaatgtgtcggcttgtgaagggccaaatgagagccatcactgtttacctggaacatgccgtggaacacaggacaggcccacagtacttccttgtgagcacacatgaccgcatatgcttgtcccagagtctggggatgcctatgcttaacccagcctcagtacctgccttcctttgatcctcttggcatctactctccattcctaaggacacatttgggttttggtagcagaaccaggcctctcccactgtaagtgcagtctttaggggagccggctttcttcttcctttgagcagaggctctagagagggatgtctggggtctgaggagaggtaagtgttttggacaagctgctgtgaaccaagctgacacttctttctctctatggaggatatccagttgctagaggtgtgggctttgtttagggggctcagactgagttgatatctaacagcagtgctatgtcactctctcacagggcccagggccgggcatttccaggcttcctgtgggaaaggatccctttaggggagaggcaggtgcccctcacagttggcttaggtccatatcctggtgagaagtagtctgggctagggaagcggtctctatattttgcctctgaactgtagacccatttctgtgtttagaacctgggatgtgaaggataaaaaggaaacaagagggaaagcttggatttgggcagtccacccctagtttaaataaacagccctgaagaagccagtgtctagcccagctgctctctaccttctccactggcctcctcagctaccttgtgtactaggagtgtcctttccctcctcagtttcctattcaaggctgctcaaagccaccttcttccaggtggctcttccaggcttacctcttggaatcctgccctgtctctccctcttagctgcctcctctctcctgcagcacaggcaggcagaggccgagggcgagggctgggagtatgcctctctcttcggctggaagttccacctggagtaccgcaagacagatgccttccgccgccgccgctggcgccgccgcatggagccgctggagaagacgggacctgcagctgtgtttgccctcgagggggccctggtacattgggttgcatctggctgggcatgggtggggtacagcatgcctttccaagactgatgtgggaaaggcacggagcccccagggtcatggcttttagatggaacattggccagtcatcctggctttggtcccggtggggtggcatgtggggagagtgaacagcgttctgggtgtcttcctaaaataagacagcttctttcttgacactggaagacccactgcttctctgagtgtgaagatgagagcagagagggaggcagcctgggcctctgagtggctcaccagacagcaaagccaagggacttgagcttcctgcagagatgggctgggatagatgggaaaagtctgggagtgactggagaggtctggtgacgctggcatatccctggctggacatagttttccccaggcagagacttgctagggtttaggggagatatgcacctgcgaaggggaatttttgaatggctacctgtcccctgcggcttttccatagttagtagttctgaggttggctcaagttactcaagatctgggtgatgagtcccaggaagagatgatggcatacagcctgttctctgccctctgttctgctggactagagactcttggagacaagatgaaaggcctgaatgaaaccaccacttctgacatgaagccggcgttacgtgtgcattctttgtgggtgctctggggtatgaacctgggaagcaggccctatgattagcctgtatacacaagggtatctgtattagtgtctatgtgcaaatcagtgggtcagggcagcttaaggcctgggagagtctagtggtccaggggtgggtccaggagtgatgaacggaagcagagaaggaggtggcagacagtggtggcccctaaaagctgaccagagaggcccttcatctcagcagtacaggagaggagaccctctggaggccaggtgacagcctgtcacagactcatagagagaacctttcagtcctagacaaagcctgggagagaagaagattcatcagagagctgtcagtcaggacaggagcagatgagatagatctgtggtttttatgaggcagggctatgggtggctgactttgtcctgtggtggcctggtttgggcacttggcagggtctcaggatagtcctgtggctgaggttggaagtgggggaggaagaacttcaggaaggcctggcaagcactgaagggagtagactcattccaattaggctggggagatgagtagtgtggatattacagagagactccactcttatgggctggtgagcaaaggggctttgggctttacttagctggaaagtgctggagaggagccaggtattaggtggcaagaaattgagattttcagggctggctttcttcttggaagcagcggtgatgccggtggcagaagatatgccacgtcctgatagccacagctagacaaagtcacgctgtccccctcccatatggagagcccagagtggctcagttctgggaggaaaatggccccagctgattgggtgcctgcaccaggccctgtgcctgcggtggcaggtgggaggtttggggtgaccacacttggactctgtgattgacagcatcactagctttgatagaggacgttctgaaaagcaaaagaaactgaaaatagtggtaagcagagagttctggaagggcaggtctgggactcttacaggcaccagggagctggggctatgttgagcctaggtgaggtctggctggagcagggactggggaccatgagtaaagtagctatggaaagtaactgagggagatgtcagannnnnnnnnnnnnnnnnnnnnnnnnnnnnnnnnnnnnnnnnnnnnnnnnnnnnnnnnnnnnnnnnnnnnnnnnnnnnnnnnnnnnnnnnnnngtggtatttggaatggcagaaggcagacacaggggtgttagaggctcagtaatgttagatgggaagggagctgagagtgcgaaactacagggtgagcccagtgttactatgagttcactgctggctctgataagtctgacattcagtgcagctgtgtgaggagagcagatctagtggctgccccgcagaccaccagggcaaggaagcaactggggttgggtgtcagctgggaggggtgggacacatggccccacatactcatgagatgtgagtactcagactcatgatcacaccctacatggccccataccacactccctttctactgccaccttcacatggtactcagagacacacgcatgaaggcaggttccttggagaaggaagtcaagcaagactgggagatgtgggcccaagcttcttgaagtaatgactggaggaatggggcagggtggtcatgagctttctcagaagcagagacactgactactcttgtttatggaggggcatgtcgtgggagaatcactgaagtcacacgtcacactgacagacatggaagggttggtggattttgattcatttgtgattagcttatgacacatggaaggaaccagccccaggaacccctctgcatctctggggaacatgactgccagagaatctgagggagatagtctgattgctacggtggatcacacatagttctgcagtctccttaggggttcagtgtctggacagagccattatcctctttggtagtaactgcctggatcactttgtaactgagcgcatggaatcctttcagccccacatactcatgagacatgagtactcagactcatgatcacaccctacatggccccataccatactccctttctactgccaccttcacatgtttctagtctggtctaagcttcctggccttgccctggaacattctgatgtcttggcccagggaccagaactcacgcccatgctgcatctcagaacagattgcctggtgctctgttaccaggacaccactgctggtcctgatgtctgctgatgcctgccctgacctaggtgtatgtgtgatagggtgacaggcttcaggggtgctccggatcctgctgcatttgcctccaatgcctctgggactctgttatatcattcatagaagagattatatctcagcagccctggaagattagcagtgactgtgcaggctaatgagcagaagtcaactaaggactggttacaatgccggctctgatgcagcgtctgagtcaggtaccaagagtctctacatctaacaaggtcccaagggctgctgctgctgctgctggctccagggccatctttgagtaacaaggacagaagatagcatgcattgacttccacttagatgcttttctgagagctgctgggtgtatgaccagcgtcatggatggtggggcaagatcagattgcttgtactgctgctctttggtggattcggtgctagtagcttggtccatgaggagctcctctgtgatttgagtctgggaaagagatacttatgtgcgagtgtgaataaacctgttgccttctgtatcgtagctgttctatagttattccagggtgaccatgctgagggggagggtggttggaggaggttatagagatcttgaaagagccagggaaggactgtgggtggggttaagggaacctcctgggaatctgatgggtttgactgtctgggccgccgcaccaggcctggttatgccttgccttccagtacccctcccctggcctgtgcatccttggcagggctgggcctggtctgccagttccctctggaaatcgtctctttggaaggcaggccctgtctgctcgttagcaccagcagcaggggccaagcctggctccctcctcagagcgggaggccctggctcagtctgctaagcgtctgctgtctccatcccgcgcattattttattttcgtattattctttttccagctaatatcctggcattcccaaagacaccgggtttcataatcttcctggcgttcccagggagctgggaatcggagtacaaagccgctattatagcgtgttccatcagcctcctccttaccccacaccccttactgccgccacaaccaccaccgcccggctcccacccagttacccccctcctgacgccaccagcctctctgggaactctggtgacggctgctgcagattagctcacggaatctgtcctgttgcccttgccctaggcctgccctccaggcacaaggatttttccaagccctgcctctgcacttggcctttcgagaggggcaaagcttcttgagcttcagagtagtctcgctgggagggaggagacaggcctgaagcacgtgctggtggccttggtgccttctagaactgagaaagacttccacgctcaaaggtgacatgtgaaccttggagctgcaggagaattgggaagttggatgcatctccccctcccctgtgtgtgtgtgtgtgtgtgtgtgtgtgtgtatgtgtgtgttctcctgacccttgtcagatctaatgcttgcatatgtgtctgtatgatggctaaattctagtgtcaggccctggcattatctactcctctaggacatccaagtttctaagaaagatttactgtatcttttttaaccacatatcacggatcatgcagataggtttacatgttgccttgtaggctgatattagcccattttacagttggggacaactagcctagctcctgtccacacatggctctttaaattcttttctaaagtaaccagaataaggaagtgcacttcccgtcacactgggtggtgcagctagggtgtagtgatgtcatagatgggtcttcaggtcctgcgtgttactacagaagaaacagatctgcgtctgtctgagcacctgcctagggttccttccccctcctcaggcactttctgactcttggccaggccaccaactgctatttccaccttcattctcactggtgtaccttttcccccacccagggtgctttggggtggctgtaggaagagaggatctgaagcctcagaaggctgcacttggccaggctagcatccttggttatcctcgctccctacaaggatgctaagctgggtacaaagtcaaacgggcagctcagttccttggggcagccaggtgtggattccatctcgccacccagggaagctgccactcaggaagcctgcagttggctgagaccaaagttgtgagaacccttggagacaggtgtcaccaccttgggccattgtcagggaagggcagctgtgagttgtaagggctgggaagacggtcaaggaaaggccagtgccagtgtgaagtaactcaagacttgagctggctggaaatgaggtatcatctggtttggccagggtggggctatctctggatctggatgaagccacactgtgtgcctggcacctccagcccagttcctatatctgttcctcctctgcgaggcacccttcaaagatttgcctcctgagtagctatggctggaggtggctgacttcttggaggactgctttgtatatgggcccccaggttcctttcttgagacaaggtttcatgtatcctggattactggtcttgatctcactatgtagcctagggtgacctagaacttgtgattttccccacctcttcgatggggactacagatgtgcactacccattataactttacatagtgctgcagactgaacccagggccttgctcatgctagctaagcattctacccattgagccccatccccagatcctaggggctcttgaccatctgaaacaagcactcgcaccctacctggcattgtgctagctgggacttgagggctggtaccccattcaaaccgaggtctcccatccctcctgtttgcctgctagagaggacagtttgataatgtcccctaaatatatgggccctgtatctgccttgctctaacttgggttttaaattgttgaggccctgagtgtgtgtgcctgcacagttggagccctgagtatgatgtcacacgcgagggtctatgttcttctattcctaattttttaaaaatctggcctggggtattattaacagtcattctaagaaaacagatgtgaagaatcagggcacttccaggcaaagtgggacagacacttgttgaaattcttgaggcagctggcacaggaaagaacctgtcctggatgtctccgcagcctgcgcacagagggaggagaccttgggaggacactgggcccggatcagcccacacgtggcactgtgcactcttcaggttgcctggtgccttcccaactccttgaagctctcaggcagtagttttgcaaagattttagtgaagactttagcggctgagtccaaaccctggttccagctgcaaattaaatggggttgcacccttgcctgttattctacttaaaacctgattgggaagggaggtctccagttcactccctcttttaaagggctttcttcccttggtctggcctgctgtcttgtgtggggcttgtgtggtggcagccaggagagtgccctgggttctgggtgtgacttcaggccccagcctggccctcagccctctgcagttatctggaacgttgcttagatgctccgaactgatggattctgggaaagaaaccttggtcttgttagagaatccactgtttaacttcaggggagagatgagccgctcttgaaccttagttttctcacccattagacgacggggaagataatggcatagcaaaacaagaatagaccagggttaacacactgcagaccaccagcccatggcctgttttggcaaatacacctctgttggcacagaaccaatgtcagtcctggatggcctgtcaccacgttgtgccccgatgggcactgcatctgtgacagatccagcatagcccacagtgtgaaggtgtaaacggcctggctgcttgtggaggtccctcatgtcctgtcctaggtcatgcaccacaggcgcctgtggctactgactttgtttatagatgatgtctaaccagccctaggaggcaggctccattaggaacccaatttgaagacaatttgttgattcagttgatgggaaccaggggaagcagtccatctctatgttatcccaatgttcccgcagagctgctgatgaggtcacagtgaagacagtggagatctggagggtcatctgagggtttgccagccaatgcccaactgccagctctccagacaaggcccagcgaggacccccagttcaggcttggagcacatggggcatttcccagacatgtgtggattttcttttcttttttgttttctttgacttttttagatagagtctcatgataacctaggctgtcccagacctcactgtgtaactcaggcagccctagaacttcttgctctctcatgccatgggatcccacgagccacctctgatttgaaatatagtttcattttttaaaaaaattatttatttattttatgtatatgagtacaatgtagccgtacagatggttgtgggccatcatgtggttgctgagaattgaactcaggatctctgctcgctctggccccgctcactccagcccaaagatgtatttattgttaaatgtaggcacattgtagctgtcttcagacacaccagaagagggtgtcagatctcattatggagggttgtgagctaccatgtggttgctgggatttgaactcaggacctttagaagagcagtcagtgctcttaaccacggagccatctcttcagcttgaaatatagttttgaaagttgtaagtgtagacagtttccttgtctgtctagtaaatggccttgcagagccccaagtctataatctaccccatggctacggagtagcgtcagcacttatcaccctggggtctctagccctatgtgcgggaacagacagatgggtgatgcttaatttctgctagtagggtccttcccaatggcccagacaccaggctcttcttgcttcttcttcctgtcctgtgatgggagtagtctttcctggaagaaggaagagggcacccgctttgctaggttatggctccctgcttgacctggccagtgcagggaaaattccaggagtctcccagatggtcccaactttcctctgaggccttgctgattcctcccccagtcatggtgtggcatctgagacactgtccccagccttctaagcttgtgattgctctgcccaccttttcctcactttctccctccttcctccccacgtgggtgctgatagggtcccccagaatttgggtcattcagaactcccctttgagactagagcagccttcctggtgggtagtatatagctctcaaagaaccccaagcatgctcttggaccttctctaagtccccatctcatctggataagagaggggggccccttttttaaggcacccagaacctgcccacctccctttggttgaaggacttggaggtcagtactggacaggcccaaccaggcttggcttcagctttggggacatttgggggcactccatagcatctctgaggcctactttctattccttactgcctcaggctccttcagggatccatggcctcctgccgggcagcagtgggttggaggccgcccagtcccccgccgagggagccacaggatcccatatacagcttgccctaggacacagtgtgtggccacagacggcatggctgccagccccagcctgggagtctccgcatgagctatggagtgaagaatgtgactgtgggaaacccaatgccctaggccaacaaggctgggtaggagtgggtgaggggcggatggcagtgaccccagcagcggcatcccatgacacctggcgttcacagagtcccactaggcatccccactccagtttcctcacctgccacctcagccctcctttgctccccctacccacgattacaccacacctattgcaggaaaccttcccaaaagggaagctccaaaaatcctgctctgcccttctgataatacagagcagcctgttggttaccaagacatcctgggggttcctcctatggcagagtcagacctcctgaggcgaggggaacactgttagtcacacagttaacttcctcctgtctgggatctttggtcccttgaactgcccatgttgcccaaggtcaggcaggctgagttttccatcactggagccaactctgggtcagggatatgaccaggatgtgtggtataaaggttgtttccgcatgcctttcctgcttccttcagaagacaaactggagaggtagcaagctgctgaaagtgggcagccaaaaaaaaaaaaaatgcttatgctttgcaatgacctagctgaaggaggatctaaagttcggagagcagaaagggcatgccgagtgggaaggacagcatgtgcaaaggccctgtggcagaaggaggaaggtgagcttaagcctttaaaaaaaagctaaaggggaataagtggagctttcggggaggaattgcttaacacaggactggagaaatgacataattaagtagagaccctgaatggcagggtctgagggcagggagtttgttatcccttttttaatgaatgtttctaaatgaagggtactgctcttcccttaggtgacatctgacagtgtctggagacatctcggcagtcataactaagtgggatgctactgatcgctaactaggcgaccagggatacttcaaacctgcttagggtaccagtggcctcgccatggggagtatcccagggcagagtgttcacaagcccacagatgagaaccagggtttcaggaacttgccatcggccatgctggccacctttcctttatccactctgagagcttcaggcacatggccggtcctcctgctttactgtaactgcacatggcctggggtggtcctcagagagcatcatctacccagaacgtgaaactttgccctggttgcctctgcttaggacaggtggcttcacactttgttctttgttctctgagggatgtcttcccttgtctgaacctgggcttctgttctctattttgaaagttccaaggtccagctctggggatggtccctggatttgattactacgtagtgatgatggagaaggtagagagttgccaattgactgactggtaccagtatcactagccctctgttcacatgctgacttgggtggtgtctctctgggctcttttcctcagcttgtctctgagaattgctttagccctcatcttccttctggagaaagatgctttcagacaaggcaggccttgtcctgggttagatccaccaactcagtgatattcttaaggccttgttgcgctaagcacttttggaggtgcctggctattgtggtaccttcctggagcccacattagccacgatcagaatagttggtatattaaccagcatattacacattaacgtcacggaaaggagcaaaaccgtatagtgtctgtgaggtccctttggggtacatgagggtgctggaaggctgggttttagagtggatttccctggcccctttgagaggtgatatctctgaggtgacaaaggggtctcagggtatccctggtgtttgaatgtaagtgaagtgctggtgttaggacgtccctaccctgaagccccagttcagggtctacagatgtccagtagggagggatttctctgcctgctctgagacattaatggggtctgtttagggtgatgttcagaccccccgggaaagtcagtctctgcctctctatctctgtctctctctgtgtgtatgtgtttgtgtctctctctgtctccctctctgtctctctgtctctgtgtctctgtctgcctgccccccacccccatccccctgtatacccaacaggtaagtcagagacaggctaggctccaagttgtccctctgcctagctctaggagtatatctgtcctgcctcccaaagtgcctttcccaaataatccctggccccagatcagatggggatggctagaggactctgtggaccatatagggtggctgggccttctttgggaggcaggtcaggtcaggaaacctaggcctcatgaattctcaagaggaattctaataggccctgagccaagcctggaatatctggcgcagcccctgtgtaaatcccagggagaatacctcctctaatcgcgggctgaaggcacagcacctgcatatggatccagaaaatactgccagcagctcagagagaggcactgtgaggggaggtaggaggggaggtgcagtgtgtgtgtgtgtatctatgtatatatgtatgtatgtatgtatgtatgtatatgtatgcatgtgtgcttgtgtgtgtgtgcgtatgtgtgcatttgtgtgtatatgtatggtgtgtgtgtgcatgcatgtgtgctcatgtgtggtgtatgtgtatgtgtgtgtgcatgcatttgtgtgtgtatgtgagtgtagtgaactgttacatctaggggtcatgaagccccactttcagtgccctcgcctgctttccatgtgtccttgtgacttataccccctaaggcttgtccacacttgatctgccaaagcccagagactctaactgggagaggagccctacgggcatcagatgcctattcttgaggcagggtactagtgtggcagggcacaggccaagtggtttgcttttcgtgagggaaccccagaacttctggggtccatacctgcctgggagacaggatcttaggtgtgactggagtcctaatctgtctgtgtataataccctctgtgttgttctctctctctctctctctctctctctctctctctctctctcaggcaggcagacagacagacagacagacagagtgagagatgtgatacagaaggagcacatgcgcaataggatacatttctcaaaggcaccaggaagacactgatctggagctcactatgtagatcagactgtccttgatctcagagatccacccgtctctgctttccaagtgctgaaaataaaagagtgtgactccatgtccagctgaaataactttcttaatatgtgtgtatgcatatgtgtatgtgactgtatgggagtcatatgtgtgttggggtggtatgtgtatgatgtgttgggtagtgtatgtgtgttagtgatatgtatgtggtgcgtgtggtatttgttgaggtggtgtgtgtatgtgtgggagtggtgtgtgtgtgtgtgtgtgtgtgttgtatgcagtgtatatatagtgtgtgtgtgtgtgtgtatgtgtgtgttgtatgcagtgtatatatagagtgtgtgtgtgtgtgtgtgtgtgtgtgtgtgtgtgtgtgtgtactctggaaacctcagggggaggattccacagaagccatctatcttgcttttaaagacagagttttttcattggcctgggcttgcaattaggctaggctgcctgtctttgtctccctagcattggggttacaggtgtgggctaccacatctggcatttttacatgggttctgatgattaaattcacatcttcatgcgtgtgaggcaagcattttactgactaaatcacatctgtagccactcccggaataattcctaacacataggaatgtgtgtgtgtgtgtgtgtgtgtgtgtgaacgtgtgtagtgcatagtcactgacatccatcccctcagccctatccctgtgccttattcccttaagactgggattgttaacctttgagcatgtactgcgtgccaggcagtttcctaagaactactcatctatctttaataggcacagcaactttctgagctggatactatataattatctctgatatacaaaaaacgattcagagaggttaaacaacttgtctgaagtcacagggacagttagtgacaggcagcatcagaactcaagtcatccagttccagagccgtgttgagactgtggccaaaggatgtggcagggcaccactgtacccctctcctatctgcaggggggagccctgtgtgggagccggggcccatgcagctgcagcaggaccttggtgcatagcagaggagcatgtcccttctgcatgtgtagcttggtccctttgcaaggacaggagaggagaagaccttgttctagggactgttaagggcagttgtggggaccatggcctgcctgaagcccaggcctgggttaagggcagcaatccttgatgtcaagtgggagagatgggacaaatcactgggtctgagcagaggcaccctgcccctcaggtataagagcctctgaaggattcagacccacagctggttctggcttgaagccatgtatgtccagattaggactaacatcatggtttgctgggagcagggttccagggtcagttttctattgttccctgataagctttgtgtctccagggcggcatggtggatgacaagagcgaagactccatgtctgtttctaccctgagctttggcgttaacagacccacaatctcctgcatctttgactgtaagtgatgttcggtggcatctgtgtatgcatgacctcatacttggggtgaagttccacagtcaggagtatgtgtgcgtgcgtgggtgtatgtgcgcgtgcgtgcgtgcgtgtgtgcgtgcgtgtgtgtgtgtgtgtgtgtgtgtgtgtgtgtgtgtgtgtgttgaggctctagagaactaaatgtgtgtgctttcaagccagttgggtcttttggtatgtgtgcccatatgcatgtgggcattcatatctgtgtgttagagatgagatgtgtgcattcaagttcctgtaatcatgagtttggtcttgccctctctccttctctgtctctctccctgggattgggtagcctcaaaggatgccaagtgctgcttctgagctaggatctgtcttcctaaccaaaagaggctcactctgtatgatggctgttgtcctttgcatattcagctagagtctgctgcccttcctggggcaaaccctcctcttcttgtagctccagcccttagcaaccctattcaccacatgacatctctgtttcctcctgagtgaagatgggaaccgctaccatctgcgctgctacctgtaccaggcccgagacctgccagccatggacaaggactccttctctggtaggtgggagaaggagaggacccaggactcccagtgggagggtggagagtgtttgcagcctctagcaggatccttgagtggatcatcttctgtgagtgctggatattccaggtccccatgtctcctggtctcagggcagctgctcctcatatgagattgtagcaggatttggcttggccgactgtcctttccttcccagaggtcattctttgtggaatcgctagtgatgtccctctctgttcagatccagctttcttaggtccctaccctcccagacccatcttagacccagctcccaggccctgatactcagctcttgggatgcctgcctggcctggggtcttttatggaagatttcactacacagctacacacactttggcttcagcagtgtattggccctgttccttcttggttccctgctctccttccacactgcccaaagcataactggacttctcgctctctagttttgaagcatagattctgacagatgaatctgccatatttgcccctgtccgacaagcctttgagatgtggtgactgtcttatctctgtaccttctacccaggagctttgccctcaccagttttgatccataattgcaaggcccctgcatgtgcatttcatgttttctcagtctggaatgcatttcttcctcagacccagatcacatgtcctttgactcccctaagctgcgctgatcactttgttcccagcacttgacactctgagcccttatccactgtggcattcagttgaggtttgtcttctataatctccccatctgctgggagctcactcagggaggtgcctggtttccctgttatgagccttcagtactgcacattgaaagaaaagacatttaccaagcatcttgggatgtgtgcttaggcagatactgacagctaggtgtcctaactcccttcttctatgggtaaagaaatacagacccaggtgggctctgttaatcgctggagttgaaataggtgatagagttgggaaataagtccaagggtgttcccctgcaagaacgtacccgtgtggctttgaaggactgggttctctgagagtggccttctggtcacagagtggctgcattgcttgtagccatgtgcccatccttccaagtcttcactttctttcttcccggcagctgcagttcacatccaggttcctgtgctcccaatgacctgttctccagccccactcagctaagcaccatggctggagtacttcccttctgggctttggggccaggtcctgacagccctctgtacaatgacattgacaggatggggggcagttagacagctacagtggccgtgcctaggattctgacatggactcttatttccagcctagcctttttccttttagtgggggtttgtgggtgagggtggaaggccggttgtcctctatgaactgagctggctaaggactctgaagggtaggtcctcccaccccaggatggtagcccagggaaccagagcccagcatgcggatcatgcagtggctcagtaggcgctggtctgggagacgtcatactttccacccagataaacgtcccttgagctttgagggtgctgcccagggcttcctcagaggcttctgaatgaaaggcccgattgagcagcagctggaaaggaaaacagcagccagcatgggggaacctataaaactcgaagtgtttattttcactcccaaaccctaaaccaaagcgatttctccccgggaactgaccttgagacggccggctgctcagtgctatgcccagcctctggctggcattctggaggaaactggcgtttgaaggcagaatgtctgaggccagggtagggtccagctgtgactgcttctgctgagagcatcttccagctgcctagtgctgtccagggcctgtccctaccgacagcctgtggatgtggagtttggaggaggcactggtgggctgttgctattcagacagcctgggtaaggactattcctcagtggggcttgcccttgtggtcacatccactctctagacccatgggaggtgtctgcggtgtgtgcttgagttgtgtgtgtgtgtgcaggagagatcagacagaaagcgtataagacacatccaatctccgttgacttccctgatattgctacatgctttgctctgagctgaaagctttgactccaaaggactgagacatcacctaccatcagttctgttcctggctccatctggccagatttcgtcaccctttaaagtgacagcatcatgtcatctcccaacacagtccaagcccacatgttcctggttccgtgtacaccaatgctattgaaggatagatgctgtctgctttgccccatctccactgagaacttctgtgttggatgaagccacagctctgctgacaactgctactccacacagagggtctttgggaaaggttgtcttacaacatattgggagcccagatatgtttattatatagtctttgaggacctcacaggtcagtgggatcaaaggggtagtccttggctaacccagttaaagagagcttatcaataggccagatgctacatgctgtagtgacctatgacctgagggatctacttatgaagtcccacatctctctgctggcctgtggtctagtgaagctgaaatgatgtggttctgagagacgttcctgttagggcaggtcacagtggggtctgttgaacctcagctcacctgtgccataaggacccctgggtttggatgtcattagggactccctgctcttggacttctgatgtctggatgctgtttggccttccctcttctaagccagactctttgttcaggttggctctggtggggtggggtggggcgtggaggcaaggcatctacccgacaggcatgggaaggggttttccagactgcattggaggctcgtgaaacgcttcacttagaaagggttcctgggaaagagactgggaaaaggattcgggctttacaatgcacagcggagctgctgagctgccaccgggagggtgtagggaggagctgtctaacctgtttcagcattcctcaaggccttcccaagaactggggagcacaagggactcgtgccagatttctcagcaccagaccaggcccctttgctatctgcccaccatccccccctactgcagctccctggctctggtgctagctttactctgtcacccaggtcagcttgctgctttccctgtgcatggctggcatctgtaggaagctgattggatgtagccaggtgacactgacccaccctcttcaatgtcccttgcttaaattgtattgctttgcttcttgacttgggtagtgaccgtcctcacccaggagtcacattcaaaagcttggttggtgtctccttcatctgcatcctgggcactgagctatcctacctatccctaccatgtcgtagccagtcagtacatgagtagcgaatgaggggtgtattactagagccactgtagtgacgtctttggacctagagtctggctaacttagttgatgctcggggatgtgaggagaaggttacgttttaatgttttcagggcatcttgcccagttgctttctgatgggtcactgcatagctccaataagaaagaacactcactctacccactgcttgccaacaacactgagttcgataattttaaacattttaaatttaattttaattttctttttaaatttcattttactttgtgatagggattcctgttgcccaggctggtctggaactcactatgtagctaaagatgaccccgaactcccagttcttctgtctgcagtaccctggtaccagggtcacaggcaggtatcatcttcgcacctgtccttcctgattttgtagtagcaatattgctatggcaaaattgaactggcattgtcttgatttctggcgtacatcccccttcctttcctatgggcatggcatagagtacctgactaggactcaggccaactctagccacctgggatctcaggctactgttctagatgcagcatcctctctggcagaggagtactgccgtccatcactcacatcctctgctctggtactctggctggttgatgggatgcaagtgtcaactgcttcaggaaggtctgaccagcaggactcatacaaaaaactgtcctgattggggcttggtgacaggttcctgtgagggaaaccggtggtactctcaagtggcctatgtctggagtctttcaaaggcagcacacggtcctcagagagatctgttcaaacatgtcccccatgggggggggttgctggagcttttgggtcctgaagccctcagactggctggactatgaacatggggacctggctcttaccnnnnnnnnnnnnnnnnnnnnnnnnnnnnnnnnnnnnnnnnnnnnnnnnnnnnnnnnnnnnnnnnnnnnnnnnnnnnnnnnnnnnnnnnnnnnnnnnnnnnnnnnnnnnnnnnnnnnnnnnnnnnnnnnnnnnnnnnnnnnnnnnnnnnnnnnnnnnnnnnnnnnnnnnnnnnnnnnnnnnnnnnnnnnnnnnnnnnnnnnnnnnnnnnnnnnnnnnnnnnnnnnnnnnnnnnnnnnnnnnnnnnnnnnnnnnnnnnnnnnnnnnnnnnnnnnnnnnnnnnnnnnnnnnnnnnnnnnnnnnnnnnnnnnnnnnnnnnnnnnnnnnnnnnnnnnnnnnnnnnnnnnnnnnnnnnnnnnnnnnnnnnnnnnnnnnnnnnnnnnnnnnnnnnnnnnnnnnnnnnnnnnnnnnnnnnnnnnnnnnnnnnnnnnnnnnnnnnnnnnnnnnnnnnnnnnnnnnnnnnnnnnnnnnnnnnnnnnnnnnncctccagcgctgagctcattgcctgagctgctggggctgcctgagagccagcctgctcggaggccggcgtggggggtgctgccaacagcaatacaacgtgcatggccgctacaatgtgcaattgtgacctttgtgtaaacgcagtcggtctggggcccgcacgcttataaaaataaagcgttgggaagcatagggggggtggggggtgggaacaaaagaggccttttcgccggctctctaatatggttttatttatcggaacgcgccctccttcccttactggaactgggagaggttctctgccgagcttagagctgatggtatcacagccagacggtttcattaaacgcacagacgccgccaggccttgccaggggcagaaggaagagggcttggggccagcctgccaggacctgtgtgtgggtgtgggagtcctgtgccagggaggcactcccccggggaagtctctctctctctgctaaggacatcccattgccctcttccaaccacagagtcaggttcaaagccagcatcccagggaatgccctccacgattcctctactgcccctcagctcctgagctagcaggctgggctcaggttcagtgcccgttggcacccagtgcggttcagtgcccgttggcacccagtgcggttcagtgcccgttggcacccagtgcggttcagtgcccgttggcacccagtgcggttcagtgcccgttggcacccagtgcggttcagtgcccgttggcacccagtgcggttcagtgcccgttggcacccagtgcggttcagtgcccgttggcacccagtgcggttcagtgcccgttggcacccagtgcggttcagtgcccgttggcacccagtgcggttcagtgcccgttggcacccagtgtggttctgccacaggtgctttagtgtttcccactgtgatctggataccctccccctacagccagctcctgggaggcagtctcagtgtcggaccttgctgtctaccctaactggaagcccaaatctcgcttcaccttcccgcatcttctatagtcactcggtgccagcccccctctctgtcaccacctgtgcagaggttttggtttgtctcttagtttccttatggccagagagcctggcccagatcccagcctccccatcctggcatgggattgcttggacagttctgagccttttgagaccactggagctctctttggtcacttgggaagttaatgaccgtgttggggctgtctggcctgggggcttgacattttggatagggctggggctgagttagggcctgtgcttggtcttctcagacatccatctcacactccctgttcatatgccctaagcaacgaacaggaccctacccctaaactcataccctcaaaccctcggtccttttcccaatgctcgcatacctcatagacctcatgctggtttctcacaatattgcctgggacttgctagaaagacaaggaccctacccaattctgccacatcacgtgtgcaagagaactgtgaaaacattctaggtgattccacggtacctgcatatttgagggccaccattctagaatctgctccaactataccaacttgccttaggacaaggcagagaaaatgactggctggatcccgggcccttggggctggcaggctgctcgggaatccttggccaatgaggagctcgcactgtgcatgctgagcagctctagattctgcatccaccgaagagagtgtcaactctgcctctaacaatgccgtcgcctcataactggttcacactatcacgtgtgcatctcctgtcttttcactgtgtggcaaccgtggtgaactgctgaagaaactgctcctggccgactgatggtgtcttaggtgggagggctttctgtgggtgccactgtgtggccaccgtggtaaactgctgaagaaacccagatctacctcgaacatactccctgccctttgtatttatccttccatgttctcattcaaattgccattggtttgggaaggtatttttatgttttgctccaattgtgtccccagtccctagtgtgttgtgcagaaggcactctgaaaggcttgttggataagtgaatgggctaccaggaacccactttctctggtacacctcacccaggtggccaggtaggaatgggaaagggaaggtttgaagtttcaggctatctccgtctccacatagccagcctcagaagtggcatctggcctgtgtgttattattccagaatgacggccacaaccatgctctggctttgtggctgtggaactcctgaaccaccacagctgagtcttgcctccttcctcatctgccccatccagatccctacgccatcgtctccttcctgcatcaaagccagaagacagtggtggagaagaacaccctgaatcccacctgggatcaaaccctcatcttctatgagattgagatcttcggcgagccagccagtatcgccgagcatccgccctgcatcgtggtggagctctatgaccacgacacctatgtgagtatgctcacctccccaggactctggggaaagctatgctctgagttttgggtctccaagtcttggacctgtggctgctcagtgaaatgattatagaggaattgaaaatagatggctggcccgtgtcccatgacccttggaagacatgactaatcaaagagagaggggagagggagggatcagatcctgaaagcacacagagttgtagatcagtagctggtattccttcggctctatcttgtccctcctccccacaactactaatcggacattttgctgaactggcctgagtggccccttgcctgaggtttgctgtctaggtgggacctgagacactctagtgtgaagaatcctctaggtgaggtggagtatctggaacaccacatggccctgccgtacaggcagagccttcccatggtgttctggcgttgctgtctgggagccaccagccttgtgtttctgagttttaaattctgtttaagttactgcaacgggtgtgttctatgtttgggacataactggtggtggttgcttagcatggacgaagccctggattggatccctagaactgcataaactaggcatagtggtacaggcctgtaatcccagcatttgggaggtagaggcaggagggtcataagttcaaggtcctttttggctacctatcaaatttgaggctaacctgggctacttgagacctcgcctgaaaacaagacaaaacaaggtggtttatgctgcagtgtgagacagtgctgtgcaaaataccagggcaagctgtggcgaagaccaaatcctgaaaccatgcaggcatcctagcaagtgtggatgctgctggaggaggaagaggaagagtgaggcaagctgggggattcgggtcaaaatgctgctttcagtaagggaggccatgtggtaccagaaaaagagggctaggtagagaggtcaggtctggcaggcggtgtggtggcaaggaggagtggttagaagaggttaccataatgatgcatcagaggtcctgagaaggcatggcagccaggggtgagggggaaggtgatgctgtataaggtggccctcaaatgattccagaggctggcaatgggcagtgcaggtctgattcagggattcttacctgggagctcttgagaacgctgagctcaaggacagagagtgactggatggagtgtagtccctggggaatgacttcccccataagggaaaggatgagtgtaggtcctggtgcttgtgggggcaggagggggagaatgggggctgggaggcactggtctggtacaaggcaagctggtaggttcccaggctgagccagagctctttggagatcttctcacccataccatgccacagcaacgttttctagaaatgtgttccgaactctccatctcactgccactctccaatcaggcagggtcccctttgctctgtccctggctggccacaaacttccttgagaagaatcttctggaaatgttgctccaagctgcccttctcgtgcttgataggctgaggaaggcaagggagaaccacggtctatcctggggtagtatcatggtctatcttggtgtttccagagataggatggagttgcgcccactgtgaatctagaattaccatcaccctggtctctgttgccttgccagccccacccctctgcagtgaagggggccacatctggccctgagaagccccaggcccttcccagtgcttggcttctctcttcttctgatctggactgtcattagcatggcgtgagtgctggaactggtgcctattccaggatggctcatggagaagttgaggccgtcttgtattgaagcacgagaacagtcagggctgtttcccagctcctctccttggccagggctgagggcttgtgatgcccatagcaccatctgtctgaggcttggttctgtcgactgccccatgagctatgggtagtctgtctactgtgcctgaggtggggagaggtgggcaccaccacaaaggcatgggagcaagagttggggcgacgctgaggggctacaggggagggggagtgggtatggaggtaggtcaggaagaacagatatgcagtgactgaggggggttgaaatctatcttatgggcagctgaagtgaaggagggatccaggttcaaaccttaggaggtaaagacatcatttcagtaagattcactttggtaagcaagatcacatttttttttttaaatctgaaaaattgagaagttaggggtgaaacaccgtttagtgatatgagaacccctgacatgtcaaacgaggctgttaaagaagtgcaggcagcttgtttcttcttggtctctgatgacctcagagatggattaagcaaaagcatgggggatactactagttggatatacagaaggacttcccaactcttgcagaaatctcaccctagtgctgcagctcgaggctgctaacatcttgtcctcacagttcccaccaagaggaactcgccattccacacaagaggctgccctgacttgtggggccctctctagcccaggaggtagcacgcaggcctactttctcaggtggctgaaggaagacacagactcttcttttcctacaccggtctagggtgctgacgagttcatgggtcgctgtatttgtcagccaagcctggaacggatgccccgcctggcctggttcccactgacccggggcagccagcctgccggcgagctgctggcagcgttcgagcttatccagagagagaaggtaaggctggccactctccaggcctgggaggcccagctagggcacaggccaagggtggcgggcctgtccacacgctgcactcagtaggaactgaagtgagacctcacactgacacgtacactggtcatcctttctgacttcaagtcaggacacaacccatctgagggtaggctgttgacttctgggatgactgcaggttttcttcctgggtcactccctgtgtgttttccttgagcctggccagtttggggcaaggggcttcaggtactgggagcaggtaagggtgggatcctggcccccaggcttgccataggttccacatgaacctcgtttgtaagctgctctgggtgtctgcaggatacagcctattgcccctttagcttgggacaccccatagcccttggcttgttcactacttgacacaggctgtgggtatggaaatgagggtgaagatgagggactgggatgggcgaacatgactgacaccttcttctctcttctctagccagccatccatcacatccctggctttgaggtaagtcttgtttgtatgtctccagtctccctgtgtttgcagatccatctacgtttaggggcccagttatcaggtcctgctttagcccaccagaggctccttcaggtagaagatggcttagtgtgatcccagggcaggtggagttgtgcctattgtgcatctagaattcacatcttagaagtcccatcttactcaatggctccatgaccagcatgggtaccacctgcctggaggtagctgagtattgtgagttccagactgcagagagctcagagccccctcactaggggctctggcctgggatgggcattaaactcaccatgatggatttaacattcatcagagtgcaagtgtcatcacaacctctgggggtgtggcccaggcccagggccttccaacactacctaagacctttaatatgcagctgaggctgaggaccgtggcaaaaaaagtgagagcagcctaggattgttataaatgcaaatttctgggtcctcttccatccatctgagggtagaggccaagcacctcacactccacccagccccatgaaatttctgatgcacagggaatttcagttagccccgttggcctagctcgtgtgaccctgtcctttcctctgctggcaatgtccccttggttctctttctacctctggaagtcccagtagaaaaacctgtgttgagtctcagtggtattagctcccgagttccagattagaccaggtgagtctcaggggtattggcttccttgttccaggttagaccaggctcagatggagttgcctgggctgttgggacacagggtctggatggttgtaaccacaaaagcccctcccacactcttgcttctccctatcttccgccttgttttgtcagagctgggcactcagctctgctactcctggggattccgtttggctttccatggctccccaagtccacaatacaattccacaactttgtctgagactcttccaggggctgctacatagaatcccaggtccctcccaccttccgtctgatgttctccctcctgtcacttccggagagcatccgactttctcatggtcccttcttcatttgggagggtgtggtgaggtagccagcctgctcacccttggtgggagggctttctgtgggtgccatctctgtctcagtgagtgcttcaggatactaatggagaccctttgctcccctggccctcccactgtctcctggatgtggcccatcacagatgcatgaaacttcaaggattttggatgaggtaagctgaccctaaggatggggggaggtgggggcggtggtaaacctggaagtagggagataaaggccagcctctgagctcgtgttgtagggtgattgatctagattttagtccttttgcttggcatggagccacagctacttagtgtacatcccgtgaggcgattctagcccccacagtcttgataccctcttagtagtccagacatacacagatcacttgaatggcaatctctaagttttgtctggttgagtagcagatggcgtgtcttcaagagtaaaatgttgggtgagcaccagagtagcccaggaaagctttctggtggtggaggcagagttaggagactttaacagagaaggcgggaggcacacatctttggtacagggggcctaggtgcagtgtgaagatgggtgggaaggagagctttgggtggaggctcaagcaagaaaaggctgtccatgtcctccatcagggagtcagggactccctgggctgggttgagagcggataccacttgacattttcggtgcaatttggacttgaagtacaagatcagtcaggatgtgggattgtagtcccccccccccaaccccaccccattccctcacttcctttcactcccaggcagaggtgggggcctgccagctgctggccctcttcgcgcctgacaggcggcctcctgcttctggcggccatgcggagagactgccgatttggaaggcaacatagaacccaagccaaaacccacaggctgtgctgaagaggacccagcctagggatgagttatgacaaactcagaacccttcatgaccggatgtgccatatggaatagctagggctcagactcggggcaaggatgcgtctgtggcctggctgtcaggaagcaaatcaaaactgcagctagaggccagaccctgaagggctgagcatcatcggggctggcaaggtcccctgctgaggcatcctgtggtcagcagggccatgggaggatgatccttaagagtctgctggacacagacagggctagccaggcagggtcaagggttcaaggcccagggagacccgtcttataagatggttttgtgatactctttaccccagagcaagccagtgtaacccttagccctgagctcaacacacttcccctggcagaggctgagccttctgccaagaacttgggacttattcagtttaaagcctccccagaggctgagaggaggcaggtcactccctctgccattctgctcctgcagaaagcctgctgacccagcagaggttttctgtctttttttgtgtggtggcccatcatctgcctgtgtcccctgttaacttcctccaaccttccagccctatctctgtgcacactggacccactctcctgggagtctgggagcagagcagaagtagagatgtgctagggcatgctggcctgcagggcagagactataaagccaggccttagaagagagactggtggggaggcctctgagacagctgctgttgtgggggcacactggagacaggccaggaggaacagagaggctccagagtggttaagtccaggcgcaccctactgctagcacagtgaggtatgaagagagtcacacatgcccttgagactgaaggacctttaagagaggcacagggctggctgcttctaaagcaacacagaagatgggtccctggaagaggagacactgagctagtatttgaagcaagggaggggcaggaatgttttggaagcagtgccttgggtaggagcagtggtggggtttagggacatggcaggaagagcaatagcccctccctcaggctctctgcaggggatcactgctctgtgagttccaggtggggaagccaggctgccttgtgtgcagagaggcctgagcccttgtgaagagctgatggcccctttggcctttgccgtctccgttcttcctccccatcttgtctcatccttcttctgtgccctccttggcccatcttccctcccacctcttctgagtcttcctctccctccccctcccatcttttttttttttttttttttggtctggagaacaaaggcatttcaggctgccaaggggaatgagttcaaagaaactgcaattttagatttcctgagaattggcagtgcgcatgggcacatgttagcaagaacgcatgcgtgcgtgcacacacatggcaggcgaagtgttggggctccttgctagtgggactcttacaactgggaacctatatagaggaagaccttatccaggggctggggatttgactgtccaaaggacactgctagttgttcctcttctgctgcgaggtaagggatactctggttgagggctgcatatcctttgtggcccccaacaaaatggtggttcaaccagttacccttaggcaccttcccaaatcttggaggcagcagggggatatacagtttacactgagacctagtccagtttcgctcctgtaccccagcatccactagaagggaaacatttggtgttttgcaatcaggaaaataagcccagtgccccccatccctcttctcctcccccaaggccttaatttgaaacactattttcctgggaagtgtaattagaccagcatgttgttcctaatgagcggggtggggccgacggatgatggagcctcctgctgcctggctgcccccttcctgcagctccccaaggaaccagaatggtcccctttgggtgaggtgggaagtctgagggctactggggacaggacagtctagttggctgcagaggtatgtcaacacctgccctgccctggataggaacatctgtctagtgtcaccaatgactaggaatgtatctgggccttcagcaatctgtgctgaattggccatggggctatgtgggttgagaggagtctaaggatggcttctgttggtgggaggagaccctcaactgttcctggatatctgggtctgagttagcttgaccggcaccctgcccacctatgaatccccacttgtaggtggtcccaggtttatgcagtcttcaggacaggcataggagttgggttaatatggctgcctgtgattaggtttgtggtattgacttgtccttggggtctgaactcctcagtcccagtcacccgcgagacagccaatcagacactttggttgcgtttgcagtttggccctcccttcctagtgatctggtgcagttatgtcctgctttgttaagtgtcccagtacccatactgttctggagagacagatttgggccccataggtaggctgaaccaggaggaatacttaagaagggcagtattcctgagatgtagaagctggcaacatggctcaggctcactattacctcttgagtgagatgaacaaaggacggttaggttcattggaactgtgcgagaaattgtgtgtgtgtgtgtgtgtgtgtgtgtgtgtgtgtatttgtgtagggtgtgtgtgtgtgtgtgtgtgtctggatgtgttataggagtcatctaggtataacagatgtcagagaacaaggctataaaaagtttctagagtgtttggagaaattgggggaaaggtgagttttgccctgaaggatgtaccaggttctagaaggtggtatagaaaactgtctcagccatgagcaggcacacctagcaagggctcagagaggacctgatgatgatggcagagcaggtagcagtacagtcaaggagagccacttctttgcctgctcctatctctgctgaatccccttcccttactcctgtatcttctcacagtcattgcttagtaattcagagttgctgggtagctagggacaatgaccaacagagaaatggctcggggtaattggtgtatctttcaatgggttgaaggtcggtggacagaggatatgggggccatggagacactggaacataataagcttaggtcaccaaagaaaatttaaatgatgtatatagtccaagcaggaagtggccatatgaagagggacagattgtattccagacagatggatggcgagtgctgagtcccaaggttaaagagaatacagcgcctctacttaagaagggcagtattccagaggtggctagtcactcttcaggaatcctgaagggaaaagtcatgtggtgagagacgcaacagtggctggaagatgaggggtcttgggggcctcttcagacttttcaagtgtcttgaggacagggtcccttgagtaacatatcctaacctcatgcccacagagtgtcataggctttgttagctgagggtgtgggcagaattggaagcatagagaccacagagtggatcactggacatcaggaaggagaaaggaaacttgtggatgagggggctggagggaaagagaggggagggaggagggagagggaaggggagcaagagagaacacacatgatagagatttagggaaagggtcaacggtgcttggtgaccatagtaaggcaggaagggggagacaagggtggcactggttgtcgtggtgggtgctgggagtgatgtatgagataacattgaagggagcagctttttggggagatggataaaaatgttatcatggacaaggtaagtgtgagaggccaccaggaaggaggcttgggccaattgagtagaaagatgctaggaatggggctgtggggttaggggggacacaagggacagaatgtctctgagcaaagatgacagcttttcagggctcaggaaggaaggggtggaggtggcctggcaggtccatccttgagaggaagagggaattgagtaggtggctttggaagagacactgagatcagctggcaagtgccgacatgtgatgggagaggtgagactctacaagtgaccttgggttgccgatcttgacttgggagagaagtttccagggaagaggtgctgtagcaaaggcagagggcagagaggaggaggctggaggcaggggggaggactcagagaaacagtgtggatggatagagaaccctggggtgggaaggcagatatggaaggaagggcaaaggaccggaaggctggggtgagatggggtcggggacctggagaacaccagggactgggtgcatagtcacagctctgggtagtgtggcacatatgacacagcattgtactggatggtgtcttccaggctgggcagagaaggccatcaggagccggatcctgagcatctgaagccaagtggcatagggcgggaatgttactggaggcccggggacagtatggtgggcagagacagtgttgggatgagagtggtgtcctcacgctaaggaagtggtccctgggtgtcctctaacctctgtctctgcttctctccctcctgcctccacgtggctggctccacagctatgcacgcctgccttcttcctgcagggcttccttcggacgagcacggtactatactaacgcttaacctgcttgggctcccttgccttcatcctgcttgagaagtgggctcccactgtggggagtcgagttctcaggccttacagaggatgccatcactgcagtgctccggggagctagaaaggaaggtggagcctagcccacagctagctgatggttttctgtggtgattgtcaaagaaatgggtgactggtgagggagattgtcctgcctcctcatttggcaaagcttagaggcaaacactttcagttgtcaacccctgccttttggccttagtcccacagtagcttgggcatcagccatagagggttaagaatatactgcacaaagcttagcccttaaaataggccaccctgctgcatagccacctgcaaatgcagctcatggctggtgtcttggtgccgcctggggttctgttagcagcccggcttctattgtggttgtgcagggtctctggggcacctctcttgggttatgtggtgggcacagctctcgtgcaggtgtgcacagaggcagctctgactgtcactcttcctataccatgtcaccttctgtgtgggctaggaggaaactagcccgcttctacctttgccctggtggtttaagggcagctttaaagccaacattgttctgcaagatgctccttaagtgaccctcggaagaacaattggaactcagtggtaaaaaccatggtgccgacagcaatggcagtcataattaccgtcacaccacttaccaagtgctgtctggtgccagatactcctcttgttcatcttctcatttaattctcagagtgactgctcagcatattgttattccctgtctctatgaggacactgagtcactgctgctgactaacctgcccaggctcacacagagttcagggctgtctgctcctggacctgaggtccttattaccatggctctgggtggcgtggaccaccgggcaggaggtggcctgggcttgctgtgaaatttgatgtaggcaggaggaagttggtctttttctctgttcctgcggctcttgtcattcgtgttggcaaatgcctgttgatacagcgttctttccgaaacaaggctgtcggagagtaagccaggtagttgagatgcttattaaagcacagcccgtttggttatagttcacctttgtaacatcaagacctccctgtgttgatgtgctgtatgggcaacgtgcaatgatggtatatcaaggaggaatagattctagtacaacctgtacttgcatttattctgaaggtttcccactaggtggcagtgaagtgtcttgacctaataaacttataaaatacatggagtcaaaagtcttaagaaaagggcattttacgttaatttgcctagtagtgctggtgagcatttgtgtgctccagacgttcttcttgtatggtgcagattctcagctctcgtgctagtggctggctagagattaacctctgctaccgcacatgggaagaggctgagtgacagaaaggaggggtcacctttctcgccttgcgaatggtagagctcgtgttcacacccaaagtcaccatgttctgagatcacacgcctctctattgccttatgtgccatgctccccgcataagctcttggtgattcctgcccagctcattttggaacccctgagcaggccagtattaccatatgcctcacacatcccaggtctgtgctggtagtggagcctcctctggggcactgatggtgctccatgtcatataaggacagtggccacacatcgctgtgtctcatttgccattgctcttttcttcctggcttcctatgaggatgctctgtccttgtggaatacagatgtgacaatagggttgggggttggagagtgtctgggtggaaaccagggtgtgtctcagatggggggggcagggcaggagagccagggttggggggatgtgactgagagactgaaatagatgggccggatggggcaggatggtctgcgtgcttgtatcagcatgaatacatccatgtgagcacacatgtgtgcagaacacacaggtagctcaatggtgagcctgtgtggtgggaggaccgcctagcccttgtgcaaagatgtgctcgtcctgatcctggacaggatggtgtccagctgagaggctactcctgcaccctcatttctactatccatttgtctgcctcaaactctgtcctccattcctgtgtctctcgatgcatgccattgctttttgctggcctgcctgttcttattccactgccttggcctccccccacactgtggtctttttcacttttgctgtctcctgcagacggaggacacagatttgccttacccaccacctcaaagggaggccaacatctacatggttccccagaacattaagccagctctccaacgtactgccattgaggtgagcctggttgtgggtcaggggccaccagcctggtcttcccacttcctgcctcagacgtgctcagcggctctctctccccttcctctgtccttagatcctggcctggggcctgcggaacatgaagagctatcagatggccagcatctcttcccccagcctcgtggtggagtgtggtgggcagacagtgcagtcctgtgtcatcagaaaccttcggaagaaccccaactttgatgtctgtactctcttcatggaagtggtgagccttacctcctcgctgttcccttccagagtcctgaggggtagagtgacctcttgatctcggcacccctggggttcagctccagctcccagaagggcccaggttgtgtgtgtgtgtgtgtgtgtgtgtgtgtgtgtgtgagtcatatcatctttgcactctgctaccctatgaatataggaattacttcttgcctcattgaaggctttgtcctatgtgcagtacacagccttgttgcctgattctgggtcaggagacgcctcaggagccattctcagtatgtctcctttagggaaggctttcactgctaggctcctcccgggacccccagggctggccttcagccattcctcccaggtttccctgcctggttctgtcttagcttgagcccttcagggaaacttcaatctccagtcctcagctccccagttcttgttcctcaagcctctgtcctggccattgggccctcagctgtcagctccatctcacctttcagtttccttttccttagccctggcctccaaagccccagttctcattgctcccctagttctcagctttagcccccaaacctccagaccctggcccctgaatcctgagtcttgtagcctgtggattttcaaccatcacccccctgccccaagcacttagctttctagcttttgattctgcagtcctttatctccagccataagctctcaggccctgcccctgagttttgagtcctctcctccaattccccagcttctgatcccttaatgctcatccccaggtcctcagtgcctggcctctgagctcttacccttgcctccccttcctcagccctggctctcctggtctgaagcctcagctctcagggtcccagcacttgactacccagcttccatcccccatagtcttcaaatctgacccattgtggccttagtccatggtctcccaatccttgctcctgtcctcactggtctcctagcttctgaccgctcaacccccagcatccccaccccagccccaagttctcagccccagtccctgcccccgactactcccagtcccctgccattgacccttgactctcaatctttggcctcccagttttcagacctctagtcctcagccccgcccccagccctaagccctgaaccctgagtttcccaccccttatccctctagtccttaccccccagtcttctccagctccctgggctgctgaggcccagtggccggtgtaagtcaagtctgagagaaggaaaatggtttgcgagatgaaagcacactagaaattccaggcccagtggctgtcaacgggagccttctcttggcgcagccgagacgccactgaaggagtgcatataaattatttcaagttgtgttcaaagtgcttttggggtgggggggagaagaatctaggtctgcaagccaactcccgagtatccacttggggggggactgtctgtaagaaatgttgannnnnnnnnnnnnnnnnnnnnnnnnnnnnnnnnnnnnnnnnnnnnnnnnnnnnnnnnnnnnnnnnnnnnnnnnnnnnnnnnnnnnnnnnnnnnnnnnnnnnnnnnnnnnnnnnnnnnnnnnnnnnnccctcccccctcctcccaggcagtgcaggttcagagaaaatagacttgcttagacttcaggctgacctgggtgtgtttggaagtaaagctatgggaaaacctgccttcacacacagcagctgaggccggacagaaaggtgtgtggcctgtcccattgaccagcacctgggctgctggccaccattttggactttggactcttgtggactctctgtgggttcagagtcactttctgttctttggtcctgtctatgagaactctccctcactccttctcctgggaattcccagaaatgacctggaggccatgtttagagcatccctcttctcctctccagatgttacccagagaggacctctactgtccacctattgtggtcaaggtcattgataatcgccagtttggccgccggccagttgtgggtcagtgtaccattcgctccctggagaacttcctgtgcgacccatactcagcagagagtccatccccacagggtggcccaggtaaggagcctttgctgagctggcccagtcatttttcccttgggttggcacatctggaccaagtgacctcctacttgtgggtgggaagcatggttcaaaatagagggaagaagtagagggaagggaatggatggggaacatgggagatgagagagatagaatcaagaaagagaagggctggggacagaaactcctctgccagtgtgaggggaggtgagattgtggggtctggtgacagtcccctggctgagtccctcatagatgcagacttgcttccctgcagatgatgtgagcttactcagccccggggaagatgtgctgattgacatcgatgacaaggagcctctcattcctgtccaggtaggataaatgagatgtcagcttccttctgccccataccctgtattcctcattctctctagcccctcccctactctttgctatggtatagccactatacacatccctttataccctggtggctgggtgctgcttggtggaaggacatgggtgggaactttcattgtgatgggggaagggttgtgtagtccttagggtaagatctaaccttttttctggaagcatgtgggggaaaaatggaacatctaccttatggctgcattgaaggcctgagatccctcagtgagaagggatacagaagggagtgtctcttctttgaaggaagattagtcgctgatctcatgcttggcagtgccttggaggtatcttagagagagcggcttgcttagtttaggactatagtatatctttcttatcctccacctctaggaccaagaagggaggatttgggggaggggcaggtaatcagtcatccttttgctgggcactctgcaacttagggcctgctggtgagcacatgacacaccaaggcaagtgtcaggaagccttttcctgaagggagcattgttcttgtcttgagctgtggatgtgctctgtctgcatcccattcagtacttgcctcaagaaaggcgaagaagccctactgtgaagactggccttgaacttgtctaggatgtcaccctcctctgtgactgcatgcagactcacacacttaatgccttgggtgctcttagagcttcagactacctgaggcagagcctcccagcctgtatgatggtaccctatcctcagactgcagtggatagataggtggatggttgcatagatggatggagagacaggtgaccttcggcaaggcactgtgctcttcaagtcacctactaaatcttagccttgcacgtgagagcaaagctgagtgctgagacagcctcaagatccccagagcttagctctgaagtttccctggagatactgagaccagtttctgcctctttttcaatctactacttccagggtttgctcctggactcatgctactgtggaggcaggaaatcttgctctgtgttttcacagatgctgagaacgagccagaagccccaattgctatctataggcctctaacacacaccaggtctctgccttgcattctctgtgctgagactgtctttgccccctgttctcttgctcagtccattatttgagactcaatttatcattggccaccacttctctggcatgatcttgcctacagcatcagctctagattctgcatatctctctgggtctcagcatcttctctggattaaatgcaggacagcaaccaggtgccttttttatgtccctaatgtccagcacaagacctgatttagagaaggtattcagtgagaatctgtctagatggccagtgggtggatgaatgaatggatgcatagatagatggctagatagatggaaagatagatggatggatgaatagataggtgaatagagatagacagatgggtagatatattaagggatggatgagtcaatgggaaaagaaacagatggataggtagatggatgatgaatgagcagacgggtaggtagatgggttgataggtgagtggatgagtggatagaaggatggatggatggatggatggatggatggatggatggatgcatgaataggtaagttgatgggtgggtaggttcatggatggacaggtagaaggattgatgaacagatgactggatggatagataggtagatggatagatgtgtgaacagatgggtagatgtatgtatgtatatatgtatgcatgcatgtatgtatatatgtatgaatgtatgtatgcatgcatgtatgtatgaatatatgtgtgtatgtatgtatgcatgtatgtatgtatgtatgtatgtatgtatgtatgaatgaatagacagaaaacttgtccattgtctgcatgagtctgaggaagaatgtctcctagctgagaaagctgagtgaaaatttggagaaggctccgcaacaatgtcagtacaagtctgtgctttgctttccttgttgatgggtatttgtagctaagtgagtcccaacccctggcttgccccactgccctcggctcctatttcctgcccgcttcacaggcctgtataagctacaagtatgtgcagggcttcccaacaagatttctgctctctgtgtgtcacctttagtgtccacaggcttagataaagagggactgttttagtcctgttggctccaagcacaaccagagatagagagtgaagtggtcaaggctagattgcctcctggccctgacataatcagaccaggactaggcttgtgcaagagccagacataggcttgtgctctgtgtgagcacatgggtactctggagaagtggacagagaggtgggtgcctaggagctgggatccaggagatgtgacacataggcaaagctggtcttgcctaggttgggaggtagcaggagaaagatggtggtggtggtggtggaggaggaggagaaagaagaggagggggaggagaaagaggaggaggagtaagaggagaaggaagaagaggaagaggaggaggagatggagggggaggggagaggggggaggggggtccagcttgctttgatggaagaggcctgggccacattcttactgaacataccatctggaaggaacataccatctgggggagatgttatgtgtctttacataataaggttgtgtgtgtgtttgtattccatgcaggttttggattagtagctgaggatgtggtatgtacacacacacatataagatgtgtgtgtgtgtgtgtgtggtaaggtggtttgtgtatatgtatgtgcattaaagaggtgtatatgtgctaaggctctgtgtatctctgtgtgtgtgtgcatgtggtgaagtagcatgcatgtggtaaggtggtgtatgcatgtggtaagatgttgtgtgtgtggtaaagtgtttgcatgtatgaggtgaggtgagggaatatgtgtatatatgtggtatggttggtatgtgtgtgnnnnnnnnnnnnnnnnnnnntgtatgtggtctggtagtatgtatgtctattgtaggtatgtgctgatacgtcagtggtgggtatgtgtgtgtgtctgtgtggtgaagtgtgtgtatgtggtaagatgcaatgtatttgcacttgtgtggtatgtgttttactgaggatacacctggaaggtggcatggggaagccctgagaaggtgttgaggaccttctctcccatggtgggctgaggtgcgggcagctctcaggctcaggctaatttggagctcactgctccacttataggcttcaggctgccatgaaggtggaaacacagtcccagaattggagcagcaaattatggccacagccccaggggaacgtgtaatttctgcagctgcacagggctttggtgctatgtttagccacatgtgtcccttgtgctctggtgacctgcctgtccccctctcaccttctctaaaagggaacgatttcaaaataacacagaggcctctgaagggtcagggcaagaaggggagggacagggccatctttggcaatctgaggtctgctggtggcacgcaccagtctggaaggttctactatacctggtattggccagcagccctggctggtggctggttgccatttcatctgcctgccttcctagacttgggccctgcagctccttggtagtgcttcctgcacagaaggaagagtctaaagcccactgcaggtctcaacaggccctcccctacacttctgccctaagcctttcctcctgtataggaaggaagtctggcctgagattcaccattttcagggtcttcttgaagcctctgaatcactgagagggaggttggtgctggtggctgtgggtcctcaatactccctgccttctctagcctcacctcccatttcccctgttgcagggtgtttctctctctctctctctctctctctctttctctctgccctctgtccagctttatccactagctatcctgctattcggcaggggagctgtttctaggacgggcagcaaggttgtcctgtgagactcctccagcttcctttgtgtaggtttggggagccatgtggtcccctgcttctgggagatggaagctgaaggctttgcccttccttggctaccctgcctcaagtatgggtatgttagggacagaaggagcaattggagggacggtgagggctggaaatgtctctggagcaggcagatttgagaaaggcagaaagtgtctgcgttggtgcagcaaaggctgtaacataaaacagcggcaggagaccaaactaggctggcaaggccttgctcaaattccaaagctgactcaccactcactgttgctctgggtcactgtgatttatggaggttgtggaactgtccaaggtcacataaatggttggaccatggagccaggcatgtcttactggggatagcccattctgcccacagttggtgcagggggtgcctgaggagtgagggagnnnnnnnnnnnnnnnnnnnngaggaaaggagagagggagggaacaaaggagaaccctactccctcagaactgtccaaacttccctctcacaggtcctcagatctcagccccgaatcctgttgctaaccggcatgtttaatttgtagcttacagatgggctgtcaagcttgggccccactaacctgacgccttctccatccagtcctcatgtatgtattgttcactatttgttggctcaattgtctttgcatatttgggaataagaacaaagggtagggaggagaggagcccttcctgatcctggtgtggtcatacaggggtgggagtaagctctggggtgcaaacctagaaatctccggctctgatcagtctcttgccctcctgaacattacttcagccctggttacctgtgtgggctggggttgggtatggctgctagggccagaggaagcaggcaggtccctagcttctactctgtcctctgggaccgggcctaggaaggctcttcaaatggccacaggctagccttccctgttcctcccacaacatgagtatggctatggccaagaactctcagtgagttctgatgtattctgagtccagatggttgggacaatgtcagtactgtggtacctggtagggctactttctgtctgctgatctaccaggttcaggcttctctgagttaccttttgtgaacatacagaaaacagggcggtcagcatctccatccgaatctaaaactgtttaagtgtgtccatgttattttatgttcttgtttagactttgaggtttacaatgttggagtcattgtcctttcttataatatgcactgcaaagcttaaagatacaatgtgaatgctctcccactatttttaaaagtacggttgaatgtagcatgcagcatctcaaagtactacatactcagcactggacacttgatgtattaattcccactgctgtcctttacatcgctagatttagtttgctgtctataggtccagtcatttaatttattcctaggtgttttgtagcctttgttagtgttatcagtggaatacctctatttatgattataattcttaccagaaaatacctcctctcctctccttctcttccctcctctcctctcccctcctctcccttcctctctcttcttctctcctccctgcctcccctcccttcccctcctctactcttctcaccttaaccctctctttctctccccttctccctcttctgtgccagggattaaacgcagggtcttgtgcatgcaagtgctgtaccactgagttacacccctagctcaggaaatggcacttttacatatacattgcaactgtctcattattaagccctctccttaacccttattgattgaagaaaatttctagatggataagacagtttattcctcatagctggagctttattattactcagaatactacttgacagtagaggtgccattgagcaaagttatttggcccttaattaatgagaattatttattgttttcttttaatggtagtgataactagctgttttatactcatagtcttgtctttgtcaagattttgtctttaatcaatagttttctactagcttaaacttgcaacaaggactggagggaatggctcagtgggtaagagtgcttgttgcacaattgcgaggacccaagatcaaatccacagcacccacatacaaatccaggcacagccatgtgagcctataatctgtgtggagggtgtgtaagcagagacatcaggatccctggggctggctggtgaccatcttagctccagcttcagtgagagaacctgtgtggaggtacagagtggcagagcaggatacttgatgtctttcttcagcctccacatgagcgcatggcttgcatacgtacacatacatgtgtgtataaccttccccaccatgcccacacacaaaggaataatagatatgagtttggtctcatcagtgtcatttggcatttctcaagatgacacctttctttacattatctcagagtctataaagcataaccaggccatgttcctggggtaaacccaggtctctcagcctgtcaagggtccataatgtgctaaggccgaaaccctcttctctaacacaagcaggtggtcagccagcggatggggaaggtgggttagactggatcattgatgctcctcactttggatgctgatgtgcaggtcccccactactgtgtgtgctcatctccccagccttggggacagaagccaaacttcctttggatctggatgtgccagctgccctctgttcacttaaaaccacagccagcatgcactatctatgaattttagcctcttgcttattaatgtttgagaagaacggaatggtgtgacaagacctgagtgtagaggccttggaaaattaaggtctgactgccgtctttatgctgctttgtgtgtacttaaaaaatacactagcaagattatgctgaaaggaccctgatatagctgtctcttgtcagagtatgcctgggcctagcaaacatagaagtggatgctcacagtcggctattggatggatcacatggcccccaatgaaggagctagagaaagtaccaaagaagctaaagggnnnnnnnnnnnnnnnnnnnnnnnnnnnnnnnnnnnnnnnnnnnnnnnnnnnnnnnnnnnnnnnnnnnnnnnnnnnnnnnnnnnnnnnnnnnnnnnnnnnnnnnnnnnnnnnnnnnnnnnnnnnnnnnnnnnnnnnnnnnnnnnnnnnnnnnnnnnnnnnnnnnnnnnnnnnnnnnnnnnnnnnnnnnnnnnnnnnnnnnnnnnnnnnnnnnnnnnnnnnnnnnnnnnnnnnnnnnnnnnnnnnnnnnnnnnnnnnnnnnnnnnnnnnnnnnnnnnnnnnnnnnnnnnnnnnnnnnnnnnnnnnnnnnnnnnnnnnnnnnnnnnnnnnnnnnnnnnnnnnnnnnnnnnnnnnnnnnnnnnnnnnnnnnnnnnnnnnnnnnnnnnnnnnnnnnnnnnnnnnnnnnnnnnnnnnnnnnnnnnnnnnnnnnnnnnnnnnnnnnnnnnnnnnnnnnnnnnnnnnnnnnnnnnnnnnnnnnnnnnnnnnnnnnnnnnnnnnnnnnnnnnnnnnnnnnnnnnnnnnnnnnnnnnnnnnnnnnnnnnnnnnnnnnnnnnnnnnnnnnnnnnnnnnnacattgtaggctagatctgcataggaaggagagcatgcaggttttgtttttctaagcctgcttggtatcatatgttttatatctgtccacgttcctgcaagtgttatgattgtggttttctttatagctagctgaataaaatgctactgtgcagaggtaccacattttcattactggttcatccaccgattcatgtctaggcctgctctgttcctagttctttagaggtacatttcccaggtagttgtgacttgtgtgtgaaaagcagccctcatttacgctgctcttattttcaaaacctttcctaggactctttctcaccctactgattcaactttcaggcagtcacgtaacttgtgatcaatcggctctgctgtttcttctttgtcttttcttttcttcttctatttaatctttatgcatttttaacctttattcaattcttctatttttttctttttccaatttttattaggtattttcttcatttacatttcaaatgctatcccgaaagtcccctataccctctccccccctcccctgctctcctacccacccactcccacttcttggccctggtgtccccctgtactgggacataaaaagtttgcaagacctaggggcctctcttcccaatgatggccagctaggccatcttctgctacatatgcaactagagacacgagctctgggagtactggttagttcgtattgttgtggaccctgatatagctgtctcttgtgaggctatgccagtgcctggcaaacacagaagtggctgcttgcagttagttgttggatggaacacagggcccccaatggaggagctagagaaagtacccaaggagctgaaggagtctgcaactctatagatggaattctttgtctttactatctttattgttttcttccttgccttattgtactggctaggcctgtagttgggtgagttatgtgatacatttttgaaagtattatttttgttcctagtttttttaaaaaatgaatatttttggctcatcaaggagtatgaaacctatgaggtaaatgacaacttgatcattaacgtttgttatcaggaacgctgtttcattgaaggcttttcatgtatcccatgaaatggtcatgtgattttcacagtcatgtgacttctctcctttgctctgttactgtgactcactttcgcttgctttcctttcctttcagttcagaaacagcttcgtatgtttcaaacaagccaacatggtcaagacattttttttcgtgcattgccagattccatttgcagagacttagctctgtctgtctgtctttctctttttcttatatagcccaggctgtatctcttacatatcctggaacttacagagatctgcctgcttcttcctcctgagtgctgggacttaaggcacgtgctctgtcccgggatttctttttgtaccagttttggggaatgataacagcttgaaacttctccttctatgtcctccaggtcttagtgtctaggtaacagtcaccgtataaagcctaggtgacaatggtctttctctgtcttctaagaagacaggataagcctggcatcaccatttgtctgtgcttgacaagctcacttgtaaagctgtctagacctggcgttcttctcgggatattttaaattgctgttgtaatttaaagagtctttataggacctctgagattttctccttctaggtgaatcacttttggtgatttatattttataggaatgtatccattccctccacaaatattggcatagcattttttgtaatgccctcttaatttttctactcttttactcctcccactaccctcgtctccttcatttttcaggattttatttttctagtcagactttgtcagattgttttcatcattttcaaggaatcagtttcccagttgaccttctgttttgcttccttatttcgtagctgattagtttattattattattatttccttccttccatttggggggtgtttattatatttttaacctctatgtaaacattgaaggctataaaattctctgttaagtattgtgttatgcttcccacaggatttggcaagtagtatttttgccatttttctgttctgaatattttcttatttctgttatttcattttgatacctgagttgtctaaaaatactttggacgttcctaaattatattttaagttatctttctgttgcttttgttgatactggcttagcttagctgtcctatggtccagagtctgtgtgtaatactacttagaaatgacctttacgacccagaaaaagatccgtttttataagtgtctgtggaagcctgaagaatgtgtattcttcaaatgtgtttcacagcctcagatccacttagaacactttgttaatgtgatattcaaaattagattacttagttttgttttatttttaaaaactgtgtgtgtgtgtgtctctgtgtgtgtgggtatgtgcacacaactgcaggtgcctgtggaggccagcagagggcgtctgatctccagaagctgtagttacaggttgttgtgaaccacctgattttaacttggatcacaagaacagtttacacaaggtttactctgcatagtctacagggctgtaggcctgactggcctggacctggctaagtagaccaggtaggcttcaagctcacagctatgtgcctctgcttcctaaaagctgggattaaagaattgcatcaccataccccttggagtctccatttttgaaacatgtatcatcctttcatttaaaaaaaaaaactaattatttggattgtttgccgtctcactttgtatttctattggctttatcttttctatctctctctttcctctattcatctatctctctctcccctggtattgaggattgaattcaagggcttgagcatgacaaacaggcactctaccaatgagtgacatctccaggacaggcagacaggcagacaggcagacaggcagacaggcagacaggcaggcaggcaggcaggcaggcaggcaggcaggcaggcaggcaggcaggcaggcagacaggcaggcagacagacagacagacagacagacagacagaaagacagaaagacagaaagacacacacacacactcctcctttctctttctctttctctctctctccctcctcaatatttaagaatcttccctcctttcatgccccctctcatttgcccttgtaaagttagttgtgtgccacttttattcctttagtgactggtgtagagttctttctatttgctgtttggggcaggctttcactaggtgactcaggctagccctagcttgagatcttcctgccacagtctcctgaatgtagggattacaagtgtgcaccacacccaccttattttaaccatagcatgcatctctaacacagcgaagcctcaatgtagttcacatacgcgcttctccagagtctggctatgagcttcaacggctctttcaggagtttcacagcttcattggacattttagttccttcttgtaactgtgtttaattttattgagtaacaagctttctcgtagctaagttcacatttactgtccctcagtgcggcagtctctgccctcccatcttactttttctttaagtagaatctgttgaagctcttatgcgggagccagtttattttagtcttttccactttctaattgtctgaagatgcttttattttatttcaccctgttttgcgaactccatttcaccaatgacatttctgtcaacaccgtctctggcgtcagctgtgaccctgtcattttaactctgaagacttttccattttcactggttttgggtagttctcagttgtcatctcttcaaatgctttttctattctattcttcccaacattccatggacacaccatggaccatcttgtccttccatgccaactgaatttgcatgttacatctgacacttcatctgtggcttctgcattcacaggtacaaataacacaggctgaaactatttaaaagatgattgtgcccacggcaaaccacacaagtgcttcccccaatcagtgcagattaataattgtttatgtggactttgcttagcactgagcactacaagtcatctggagatgattgacggtgtgcaggaggatatgtgtaggttatatgcaaattatgcatgatcataggtaagggcctacgcttctccagtttatgatcaccctggggtcctgcagaaacttggccttactctgttaatttcttctttttaaaagttcttaaaaagtacttatgtatgtgcatgtgtgtgaatctgcatgcatgcagttgtccacacaggccagaagagtggccactggagttataggcagttgagagccatctcatgtgggtgctggaaatcaaacttgggtcctcgggaagagcagcaagcatccttaactgctgagcatctcctcagccttgggaatacatttctaaaaattatttattgtatttttaaaatatatgtgcctgtgtgtgttatgtgcatgacagtgctggtgccccaaaagatcagagagatcagatcccctgatttgggaggtctggattattgtgctggagactgaattggggtcctttgttaaaaacagcatcggttcctaaccgctgagccatcttcccagcaccgatgttcgtttcttgatgttatcttgatgctgatttctgaagatacatcttccatttacttaacgttactcatttctgatctgatatttaacccagtttccaaagtttgtcatccaaggcttacattttttttaaattttttttttttatttttggatgttctttcttcttcagtctgtttagttttgaaggtctctgtctgtcttttgtttcctggagagtcctttggttcacatgttatttctgacacttctgctttctgttctcacgggtctgcttctgcagttggttcatcctcgctggctctcgcttgtggtgtctgttcctcatgtgttcactattttttgattgtgaactcatgctctttggaactttatctgagaattctttgaggcctggatggaagtcacattcttccagagacgatgtgtgtttacttttaccagaagtctggagacactacaaacccagattcacttaaaactaaatgttcagccgtggcttttggggtcccatagtcagtctgcatttggctcctcgtctctccagatttttcctttcttgttcgctgtggaagattttccttatgccctcatcatctccagagtgaagcaaagttttaaagatgtctgttggtgtgatggccttgctgggaagatcttgctggttgtctagtttgtcctttagttggaaattgaaatctgtttcaattttgagtctgacagccctgttttccatcaggcaggttatatctccttcaggaccctgcactctgatttcctgtctgtggcatcttctccaatcttcctacgaacatgaacaaagccattggttttcttctggtttagcctcaggtctttggctgggggaaacatttttttttctccctcatattgtttccccctttgttttgacccccaaggccatcttcctgtcatttgcttagccttacagggggccattcttgcttggcaagcactggaagacagaacctaaggaaaattctgcctgtgaatgcacagacctttttttttttttccttttttaacaaaagccatttcagatcaaagaaagatggaaatggtttagagttgctagacttctactttgccagctgggaatctaacagactgggagaaatgaggaggaacccagaaccacaagcacctaccatgggcttttctgtgagccgaagaccactgtgttcactgcggcagccagcagtagctggcaaagtcagagccacaggtccttgctcatgcatccccatggaagagtttcctaagcgaagcaggattgaccttctacactaggccatctgggcagggatattacttgaggaaacttcctacagtgttgcttgagtagactctaaagtttgtggtgttcaagcatctatgtgaatagtgccagcttgcatgtgcagagagagccatggcttttgggtccggagactgtgggtactggtctagctcatgaactccctgtagctcagcaagtagagaggcaacttgtgtttagggataggctagaaacttaatgacagctgaccaagagtgacaggcacatgtctcttcaaacgtggggacagttttattgcttggagccttgcttccctgaccatgcgtgcataaacgggatcagtattcaaagccaacctcttttcccactccttcaggatggctcacgtgtttctctcattttctgtccccacattcttctcacttagcagtgagtcctctacgagaggacattctttcctcctgaggtggtttttcctctccttgtcctgacctagcactcatttacatcaaggtccctttctccatggacagcctgaattnnnnnnnnnnnnnnnnnnnnagcctgaattccctctcttccaaatgtgaggagaatgccttattgtgtgcttcatgagtctcgacagcaatttatcccaagactttgaagtagatgttttttgaccaaagcaatcagttacggggcgtcgctcacaagcaaggagcatttccagaggcagtttgtctccaggctgcaagctacaaggccacgcctctgacaatgagagccaactttaaccatgtttagtgtgtgtgtgtgcacttaggtcacatggaggccataggtccatgacaagtattttctccatcactcttcttttttgagacagagtctctcactgaaccttgtcagcaagccccagagatccttctgtctccaccagcagtaggattacaggaatgctgctatgcccagcttcttacatggcttctagggattggactcagatcttcatgcttgtaagacaagtactttactgattgtccatttccccagccccaatattcatagcttttaccttattctcgtatctctcagcttaggaagatagatgtaagtttcctaaagacatgtactcatgggattggggatgcagggcactacagacatttgaaagttgcagactctcccgccattaaccatatcccctttgtccatggtccagatgcagcctgctctccttactcccatgagttctgtttaggtgtttgatgcctgtccttggtgtcatttgggtcttccttgtgactcattctctcattttctctgagcaaatacaacttgcccatcaaatgacaagtgaaggcatgggtggggtgggggcgaggggagggaagtcggagccgcaatctgttagctatttggagtaattggttatttgctgtgtgtgcgggttgggaagcccagcacatactttacggtctctcctgttacgggggctggagtcacccaccgatattggatcctggttgccggagcccttggctcggggcgcctttcccctgcttggcattcctgtggtctcctcgggggtgcacccctcctccctcagtgcacactgcaggggggacagcctggggtgaaacgtctggcagactccaggcccccatcagggaggaggcggccctggctccctctagccagccctcgctgtgctagcaccctcctcccaaaggggtatttcccctggcatgaaggacctacttgccctcagtagaaaaaggttcttctccttcttagagggatgttcgcacctttccctgacaactaactggccagaaagcatacaccagtatttagcattagcatgatgccttcttatccttcttggtcctacaaatggcctagtccctagcctgggcacttggaaagtatgcagccctctgtgctaaacacaaggttccttgggagctcttggtgaagcttcatccctcacctcttgtctgacacatctctacaggagccaaggcacaggaaatcagaaccgaggaacaagttcgacaaagatttgaaaagttaacgtgattttgtgtatgaaaatgcacacggtaactagaaagtgggttgactttggcacagagcaagttccccccaaatcccttttaaattgaatttaagatggctaatattagtgtctgtagtttgatggatgcttctgcagtcccgggaaggccttcaaaaaatagtttttctcttaagtagattgctggaactcttgttaagcaaaactgtacccataagcagaacgagggttaggtaagctcccatgtcccccaggcccttctggaaccatcacagattccaaattagagatgtcgcattgctttcttcataggattgaagactcatctggaatcttctttctctcagcccactgaatagattccattctctcaggcatgataccctcagggagccaagttgtaggccaaatgcccaatttagtcttctgagtctggaaatggctaacagcccagttccttcagccccctcatccatgtgtccagaaaccttgggttcctcaggcccttcatgcatgtggccagaaacccagcttctcccagatccctcagccatgtgcctggcagcctggtaccctcagctttctcacccacatggctggcagccttgattccttccagctcctcacctatgtagccagaagcctgagtcccatgaaggcccctcacccatgtgggacataagtctcaaaataaaaataagctaaagtgtgtgtgtgtgtgtgtgtgtgtgtgtgtgtgtgtgtagtgagcctgagtttcctaccaagtcatacttatgtgcttggcaagtccagttctctgtaatctcatatggataaggtcagaaatcccgagttccccagagggtccctgttcatgtgggaccatgtctataagagactgacagatggccaggtcctatctctgctgaagctcatgtgtacatatttattgggccttgaaaaacaattcaacacttgatcgagctaaagatttctttctcccaccctctgctgattcagcttaaaggcagggttcatggcatagaaacctttctatagacaagaaggctattatccaggaagtatcaagaagaggctagaagtctagtcttttacttgatatttactgtgcgtatgtagaggtcttctgagtcattggtagcaggatgtgtgagcacctatctgtgtggtttgggcggtattgagtggtttagtattcacggggtgaggtaggtttgaattcttatctaggcttttggcctaagaacatgtatattacatgtgtgtttgtgcttctgtgtcaggagcaaatttcccttgtcttcccccccccccttaggaaattaattgacaccctgccatcatttgagctatgaagatgtcacatcaacattgggggtgttggtattgtcaacagtaacagttaccatggtaaccaacaacagcctcagaatatttctcagacatcaacagagcctgttgtctggttgactggaaaccatttctctatgaggaatagctttctgtgtagtctgggatgttcacttaagcttataaacagtagcccattgcttcacttagaagagggcatgcccttctatatagtgacccctagcttaactttatagccttggtagagaatgagtttggccaatatcttttctttgattcaagtggatttcccagggagagaagctctgtccatgagctgcagcaggaggcacaaacctgtcatcccaaccacttgggagcttgaaataccagtgttgatagttccagagtagcctgggcaacttagtgagaccttgtctcaaaagtaagcaaaaggggtgtgcgtgtgcgtgtggttcagttctagagcccttagcatgtgcaagtctctgggttccaccctcagtatcagggggtccaccctgaccccagttcccacttcctgaccatacaagaagagttaggatttttgccgccacttttgctttccatggtcacgaaaggcgtcaggccctgggatgatgatgaggagtgcgtgtttggaccacgccgtgctgactcaggtcttggaggattagggtgactgttagactgactgtctcccttgcttggctctgtttgctcaacaacggaaggttgactaatagttgagatccaagagacttcagtctatgccttgatcaagctgacttttctggctggtggaaagatgaatggccttgaaccttgggcctgggacaacacagaggccatggccagacttcagcttcaagcttcagctgatgcttaagaaaccagtctttgtgttttcttcctcttcttttctaaggtcccaaggttggtgcttagctgttaccagatggggtcaaggacacacttggcattggaaaccatgggactagttctctccatttgggggaggggcatttctgtcagtgctggggactcagctgctgggggtgtaggggtggggcgtctggctgagacctgcaaggctcaccttaaagatgcattaacttattctggatcttctttggcaggtgaagggagaagtgggcttaggatgatgccaacagaagccaggctggggtaatggcaggaatgatagtttcaagccatatccgtgaatgtgtgttaaaaatatcactttattttctgtaagtcaacttaatcccccttttgagctctcattttttcctaatggcagaaaatccctggtaatcttaggcattttaggtttaaacttagtcactttgggcttactattcccctccacaccctagagtggggggtagtggctaaattctggtttggacttccttaatgttgttatttctcctgggagggtggcctggttcccagtacaagtccaccctggcatctctgggctctgactttgggacacatggatcagattgtgtttgctgacatctactcttagtccccacaatctggtcaggtctctctctctctgtctctctctctgtcttgctctgtctctgtctctctcttccctttctttttctttcccacccttcttccctcctctcctaacctgcaggcttaggtttgtctgtggagtatgtggcactttaatgtcatatgccattctgagatctacaggaattgccaaagactctttctttatttttttttttttctgttcaaaattctttttttttcttttttttttaatatttttttattacgtattttcctcaattacatttccaatgctatcccaaaagtcccccataccctcccccccactcccctacccacccattcccactttttggccctggcgttcccctgtactggggcatataaagtgtgcgtgttcaacgggcctcattcagcgtcctgttcagtgccccagcacagtccctctggcgacatctgcctagctatatattacccaatgctgtagttcgtggaggggagagagttaggacggtttgtctgaaactaccacacctctctagttcttgcttctgtgttcccctccctgtctgtccatcttcttatttgatggaggagagctggcccaacaagatgcttccttaagcctatttttacagttgttttctgagataggtctcatagatcccaggctggcttcaaactcactatggagctgaggacaatcttaagctcctgatcctctttccttggccacgcaactgctgggatttcaggcgcgcagcaccatacctggattggtcagtgcaggggagcaaacctaaaccttcatgcagaactaggccagcgctatttcaattgagccacattccccagacccttaaattataatttgataccacattatctgttcttggggatttgaaaccaaagattgttacttgttcccaccgatgtctgagaattcatatacctatcaaatatttgccgagatccaagctatgaccaggacctgatctaagaatggagctgatcatgtgactacaggttatggggccctgctctcatggagaagacagcccacaataaagaccaagtgagatcttcctaatgtctgatggggattactgctgtgtagacaaaggggtttgaggcgggtagaaactgctgggaggaagctgtagcctgaaacagagaggacagaagagaaagattgcgagtgcactggaggcttgaagggaaggacgtggccatggacccacgtggaagaacacagtccttggagcagaacagaggccatcttcatcagatcagcttcacctgccttcaagaggccatcaggagtggggctgttgactgttgctatttcctcactgaaggaggggctggggaggagccgctggacccccatctaagtccggctgttcctctcagccatttggatgcaattcttccctaatcactcagtttttgggagtcttgggaggtgttagagtatatactttgctgaagttgaaaggcctatgaggccatgaggaagccatcatccacactgggtgaagactttgtagtgtggcttgctttgaggtcacccatgcttctggagtaacctcccactcatgctatgtaagcaatcccagtaacctcccagatccccagggtgaacttagggggaaacatactttggtttgtagttggggtcttctgaggaggtggtaggcattcctctgctcaggttgatagaggttcttcaagagaaggacaagagagcgggaccaggaagacaagtatggctgcaagaggataagctggaaagagggcagaagacaggagaaagctgtaggctctaacctctgagtcctgggaggttcttggaaaggctttatcttatttatcttatatgacaagacatcagaaggctttgcataaagagggccaggatccattcacaggttatagggctgtggtggtcagggtggatatagaaacaagacagcaagaggagaggtgacaccaatatgaggggacaaggctggaccagagtagcagcaatgggatgggagtggggaaatgcagattctaaatatgctctagaggtgggtctgagagatgctgtgggcatgaagagagaagtctaaagctgcctgagcacctggaaggagggcacagctcatttataggaggaaggctacaggaggagccagcagcctactgataactggacatgacagggcactaaagaggctcataagggattcagtggcagacagttaccgggcagctggactttggaggtatgagacccattaatgcccactttatttaaagacgtaggaccagaggagaactccgagagagcacctatggaaagagaagggggctggataactgatgcgagcatacgcagaagacctcagagtgcggaatgagggaccagtgttgaaggctagaagatgtggcagtaagatggcaggaccacactatgatgttctggacaggcaagaagacacgcatcagggacagaggaggaactgccactgagtactgctcctctaggcttgtggaggcatgagtcactgatcttataagcatgcttgagtggattagagaatgttaagaattatagacaaagctggaggtggagcttagcaggtagagcattagcccagcgtgctcagagttctgggttccattctaggcactgtgtgaaccaggtaatgatggcacatagctgtgatcacagcaattgggaagatgcggggaaggaggatcaggggttccaggttaacttctgttccatagcaaatttaagattagcctactagacacggaactctcaagacaacaacaagcagcaacaaaagatggtcttgctgggcctggtagtatatccctttaatcctagctctgggaaggcagaggcaggcagatctctgtgagttcaaggctagcctggcctatatattgagttcaaggacagttagggctacactgagtgttcctgtcccaaacaaaacaaagcaaaatgaacaaaaagttgttcttaagaaaaagatgactatgcagcaagctttagacaactgcttgtctgtttaagaacaaaggaaataatatccattttaattcttttcttataattgtgtgtgtgtgtgtgtagcatgacacaggagtgccgaagcatataagtggtgggcaaatgacaatctttggagttatttcttgcctcccaccttgctgaatcagaatctccgttgtttctgcctcactgtgagctctgagctagccaggcagtccacgagcatctggagtcatttcctgtctctgtctcctacttctccactggactatggttttgcagatgcccaccaccatactgacttttcacgtggttctgggaatgaacttagggagttaggcttctccagcaagcacctatagccactgagccacctgtcaggccacctaattcttccttgcttagaacaagcccttgtgattcctgcttctgtctttagtgtgtgcatctaagcttttggttggtcagttgtcccttttttctaacagttttgttgagatgtctgtgtccacacaagtgtacagtttggtgaccccccaggttcctagctgcctgtgtattaaaagagctatacagtcatccccacaatcccttttagaatattttgctcactttaggaaagacaccggcttcctgtagcctccaaccatctctggctctggcagccattgttctgctttgggtttcattatatgcaaatgcagtcttgcagtatgtagtctttggtgattagcttcttttgcttagcgggttttcaaagtccaatccaggctgcagcttgcatcaggttttcatttctttttgttgccatacgttgtgtgggtaatgttcttcagaagacagacttttgggccacgcccacctggcagccattatgagaaagtctgctctgagctttcaagtccgtatttttgtatcatctccatttctccaggatgtgtccccaggagcagaacgggctcacatggaatgcacggcttgccactttccgagatgtctaggatggtccacagtgtccgccatgtttatgttgctgccagcttctcccatccctactggcactgcattaccgtgtgtctactgtgtctctgagagccgccaccccagtgtgttatctatttctcatggtagttttgggttgcatttccctgatgacagagtggacagtgaccatgtgtttttatttctgattggctgctgtgtgttttttccctggaggaatgtgatcttaagaccattgcccacttctacaaatttattttattgttttatttatgcatctctgcatgaacttgtgtgcatcatctacatgtaagaatccttggagatcagaaggcaccaggttcattccctggaactggagttatatgtggctctgacagaccacgtgagggtttgggtctagacctgagttctctacaagagtagtatgaattttttttcctgaggcagagtttctctgtgtagccctctctttcctgaaactcattctgtagaccaggatggcctctaactcagcctcctgagtgctgggattaaaggcatgtaacactgttgcctggctgtagtttgaaatttttaactgctgaatctttgcccatttttgtattaaaaaaatcactgtgttgtgtgagttatttcttatcagatgtgtgatttgcaaatacttccctcccatcctgccagatgttctcttcccattcttgatagtgtcttttgatgcatgctactattcttcatgtaagttgaaagtagtgtcttgtggagggtcggtgaggtgggcaacacacttgctgcacagtcctggggacctgagtttgattcctgtaacctaagtcagtagagaaggaaggagagaaccaactcaacaatgtcatcttgaaacctattgcacataactctcccatctctctctctccctctctcttagtcacacactaataaataaacatttgtaatgtctcccaaagccaattttcaaagagttatttaaggaatacttctatacaacaacaacaacaactcaaaattctttgtgtggttcacaaaagtacataagaaataaacaaaaaatacttttagtctgtttattcagaagcaataactttgaatattttgtgtttaatctttatactaaaacaaggtcatataattcatgttttattacatattatttagaaagatttatttatttttattttgtgtgtatgagggtttgcctgtatgtatgcatgtacactacatgtttgtagtgactgaagaggccagaagagggcggtagataccctggaagtagtattacaaatgcttggcagctagcatgtgggtgatgggaaccaaacccaggtcatcttcaagagcagcaagtgctcttaacctttgaaccatcactccataacctcaattccgttctctcttgagccaggctcacatgcagcccaggctgatatcacactggtggaaatgcttctgcctcagcctctagaatgctggaatcacaggtgtttacagcttatctggcctacgactcttagccatctccagtgagccattctcatgttctagaatgacccagctagagctcaccaggcctgctggggcaacctgctcatttggagtctctgtatctgtgttcaggaatgagagttcttccccccaccccctcccacctctgtatttctctgtcaagctttgtttcctaaaatgaatgggaaattttttccttttttttttattcttctgtgctgtgcagcaaagaataatttattctttagagactggtagaactttcttccaagcaaaagccctcctggcttgatagcttccttggacggtattttttgaaactgctttctctttcagggccagaaacctcttctagtttcctattatttttgcattgatgctggcattcatatttttaaagaaaagctcctccttctggatctttgaggatttttgtcgtggatttaggcccactttattctcccccacaatgtctttttattccatcttcccaattgccaatgtgtatctaatctttgaaattagtttgatgaatatgcatctcctttttgagggggttaattatcaatggccacattccactttctgatatgctcattaccctacaactttgctttaaatttatattttatattttgcttacaatttccctgcttcccccccccgatttcataaattatcagcttatttattttcattctttttgtacaaaggagaaagcatttcagattgggttttccatgcatacgagcctgtctgcaacctgggtgtcttggatttagtcttggctttctctgactcagtggggttataagaacgtgtctttaaatgtctaacagcctgggatttccattttatcgcttcttattaactgtaagctttattgaatggtcagagaggtgaccggcgtgagtttatttctgagtttttactgagccttgctcttggcttttttcctcctaagggctgcaagagtgccagaaataaggaaaggtatacttcctgttttcagttgtcacaaagctgtctatttgggtgtcactgttgatggtatcattaacctctgtctcctagcttctgcacccaactcttgtgtgtgtgtgtgtgtgtgtgtgcgcgcgcgcgcgcgtgcctgtttaaagatagagaaatatatactatactatcttttccacaactctcgtgtttctgtcttttctttgtacaaaacatgctagttggctgcctgtcttgcctgacttgagtcaaaagtttaagaacctggaatggatgggaaagaaaataagctttaggaagatctgaacagctaaacggggttccattctaacctcttagacctaaatccgtgtgcttgtctctgtgttcctgtatgttctctacggtttttgttgagtacgtggatgctctggcacatctgtctccgtcggatgtgaccgtgtaaacattgtcttctgtgtgctggtcattgtgtgtgttcagtgtgagnnnnnnnnnnnnnnnnnnnnnnnnnnnnnnnnnnnnnnnnnnnnnnnnnnnnnnnnnnnnnnnnncagcagtttctcgcattgctctgtgccattgtcttctggagtgctgtaaatcctgaagttctaccttccctgcactttaatccatctgaccctgttttttcttttgtggctgcagaagatcctcctggtaagtgacagccccatgctgacgctcattctctgctgtctgggataccttttgagggagctaggatacttccaggatggacctctgggtacttctggtatcctcactgccttctagcgtcattggcctggtccattcgaaagagggaattcaaatgagggtttggcttagaggaacactaagtgttttcatgttaaatgacagagactcagcacaccacatagatgaacgcagcttctggtaaaagtcctactcagtcttcagtcatggttccagaatgttctctaaagacatcttgttcttagttcttctcgctagactgtctgggtttcagtcaggagaggcaggtttctggggggtagagccttcagggcacttgctgagtctctaagggagaggcacaccctaggacacagctggggaagggctgaagcaagagctgagctggaaggtgtggatggaggtttgtggggcacgcagcggccccacccagtgaatatgactgatgaagacagaaagggcagagtgaggtgtcacagtttcctgtctgctagcctagctccccacacttagcagtgtcatgtgaatgaagtcatgtagcaaatgtttgctcattttcagggactctaccttgattccaccttgagaagtccatgttctggttcccactgcagaaagcagagtggtgggctggcccttgagctgccttggctctaccttatcatacgtctaggcaatatattcttgtcatcctcccggcagagagctctgcatatcctggacctcagccagtttatcactgggatgccactgtggttatgccagagtcacagaaagacaagaaaggccaagtgcctgatgggaagcaggaatgggggtggagctaggcctgggcctcagttgctcagcaccattaaaatgtctgctcggccttcgatacagagaatcagaggtttctgcctcactgatttccatgctccctgtttgtttgtttgtttgtttgttttccaagacacagttactttgcgtaacagccctggcttcctaatcataattacttgcaggcaagccttgggatccaggtcagcctgcgtgaagccttaagaggaaacatcctactcagaaggccttgattggcagatgagctcctaaaccctctgtgtttctctttgctcaggaggaggagttcattgactggtggagcaaattctttgcttctgtcggggagagggaaaagtgtggttcctacctggagaaggattttgacaccttgaaggtaagacctctccagaacgcactcccagcccagcagccgtcaggttcagggatgagcagcaggggctacggcggaagacagagatgttctcatgagtcttatgagcagtcgaccacactactttagagcatgggcttagatcaagaaatcactgcggaaaaggctaagcaagaaagtatttgagggacagagttgacaatactatagtgatggcggtggcatgagctctgtagagctctggccagcgtttgtggggacccagatctaacccctggtagcaagggatgaaagagaaatagaacatgccgtgagatggttcatgggtaaatgtgcttaccaccatggctgacaacccaagtgtgagtccctgggccgacaacataaaagtccatgtgtgtgctgaggcatgagtgcatgagtgtacacacacacacacacacaaaacacacacacacacacatataccacatatacgtgcatacacacatacacacacacacatatatacatacacacacatatacacacgtacacacacacacacacacacacacacacacatacacacacatatatacacacacatatacctcccccaaataaacaaataaatctaaaaagacagaaaaggaaggggcggtgagatggctcagtgggtaagagcacccgactgttcttccgaaggtccagagttcaaatcccagcaaccacatggtggctcacagccatctgtaacaagatctgacaccctcttctggagtgtctgaagacagctacagtgtacttacatataatcaataaatagatctttaaaaaaaaaaaagaggaaaaaaaaaaagaaaagggagaaaatgttgaagcatttataggtgaaatggtgactcacggatgttcctaaacatggtggtggcagaggggtttgtggtgcccttctcttgcattgggggtagggagggggtgggggtggaggaggggctttgggaaactgttccgcagtagggtctctgtagtgggatcaaatgtgaaatgcaattgagaatatacctctgacctccaagctttgaccccatgagagagaagctacctagcaagtataattaagatgctaaactttgtttctgtggataaaaacagagatgtgtccttcaatgtctggtattttgagaaaattctacaaatataattataccttttcaaggtagacgagtttttagaaagatagttaaagatgactcaaaaattgttccccagggtgtcatgtggtctccattgttgggtggccagttagatccaatgttggatgcaatatatgacttttaatgttaagtatggtttagatgtggcatgggatatacttacctgaagattatttatttttttatcagagacttgagtacaatcatgatttatagcatcttttctggactctaagtgagagctccacctcttcttcatggctagatgaacaaccacagggcacaggccaggagaggctaggaaaaggttcagctagttggggttggggtgggctgggccctcttccttcaaggtcccctgggtggggactctgggggtagtttcacaaagtggccacgtccttcaggttcactggagtctgcctggcgtgctgtgcctgatgtcttggctggccttcctggaagctgcaggagtccagcagcaccttaagcagcagtaagtacttctggctccatggctgggtgtatgaggctgggcagacagacagaactatttgcacaccaggaagaaggtttgaccacttaggtctggcatgtagaactgtggccatgccaagaaatgtgacaaaggaagcaagggtgaggatatctgccagggtggccagaggccccagcccctcattcctcaggaggatgccggatgcagaactggcactcggcctccagcttgacctctccgaggaggtctccaatggctgccaagtgagcaaaggctctccagaacaaaggcatcccaactatttctgagggagaactagacctgggaggaatgctggtcctttaatatcggcaaatggaagagaaccatggctaccaacaacaccagctgagagtatggtggagagagcagtgcacataggtagagcgagagaaaacaacaactatacattgcaatcgccagcaaaggggatacgagctcgtcgactaagcagcaaagaaatgagagtgcacggcaagaatgcactacagtcagaaatcagaaagaatgcagggaaagtcaagcacatattagctttcctaataaacaagaatggatcaaactctcatgctaagcgataaggagttctaatctacattaaaagtcaaaattcattgtactctccttaaaagacacttaaaaaaaaaaaaaaagaacagaatgactggaaaaaaaccaagcattttgggaagcaacattttgggagacataattaggtaagtgtaaataaggaggaatctggtacaatctaaagtaaaaagcaaagaacaaaacagcaaagtaacaaaactttgatatgctcagggaacaaaatagttaggactatgtaagcaaagtagcatctcaaaaagacagatattaaaactgaagaggaaattttaatgttgctgcttctttgaccaaacagacaataaataatagtaaataacagaaccagggagctggagagatggctcagtggctaggagcactgactgctcttccaaaggtcatgagttcaaatcccagcaaccacatggtggctcacaaccatctgtattaggatctgatgccctcttctgtcgcatctgaaaccagctacagtgtacttatatataataaataaaatttaaaaaaataacagaaccaaactaaggctcttttaaaaagttacagctagttaagttacagcttaacacaatgaatgctaaatctacagccttgagacagaaaacaaaaatgataaaaaagggaagacacatataataataaaaaggaatacattttcttcctcatgctcagagaacatttacaaagcttgatcacaaattaggttagtaataagttacccaagacagaacttagtcaggacatattaaagtgcaataaattgagaaattaatacatttaaacaaaaagtccatccagttggaaatctacaaagtatttcattcggactccagtatgagcgcagctgcataagtcagcatttctccccctttctcttggaaatcattcaaacccacaaaatccatttttcagaaaagctggaaacaaataaaagccacagactccaaaatataagtacgggctgctcaaggacaattgagattgggcagaggccacaggacaagaaggatgatggtagctcatggggacaggggctctcacaaagtccagtgaaacttccatttcttccaaatgaaagaatgttggtaaccgtgtcagacaggaggtggatgcacggggcggggggtgggaggtggtgtctgtcgctgtctctctttactttcctataacttggaaattctcataatcgtttcagaactaagtgtttgtaacacgaagtagggagtatacaccttgtttccaaagctgcaggagctttgaaggaggtcaaactaactacagaagcctaacctggtttgattcattggagctggaaaggtggagcgacatggaggagccatgtctgtaggaggccgtgcgcctccgtagtgggaaggaaggaaacggccaggctagggaaagccaactcatttagtggttagtaaatgtgactgcatagcattaacccaaaattacaaagtggaaaaaaagaagagaaagtggaaatcaaaccaatcaaaaaggacacttgcctaccggacatgtcttccctgggagcagaggagaagaaatgttttgctgtgaactttttagaaaggaaacttcaaaatgtgaagcatgaaggaaggagcccaagaatggacaagatctaaagactggaaggatggactctgtcaagagagaagaaagcgtaatcttgcaaatgtggacagggcagaatgaccatgcagaaaccacagctgggcacagatctggtagtcatgaggaaagaaaacagaaaaaaggtcctgaggactacagagaaagtgacagatgaattagccagggacaggagaccagactctggcatgattagagactttgaagatgacatcccaaacagtgaagttaaacagagcagcatgtaatcatttactcaaacttcacagtcgtgaaacaacacttgaatatatatagcttgaaaaggacctttgtgagtgaggacagttgaccctgattggtcagcttcagatatagactaggacgcatactatacttcaaagatgagaaggaatttgttaggtagtcatacttattgttcccatgcccctgagaacaccaaagctgtttaaaatagaatacagatcaaggtgacttcagtgactgtaaaagtcccgagtccctgaaacagcacgcataggattgtcagtgacacacaggggacaggatcttagggtcagccatactgcctgccaagcacttggaaaacagcctgccagtggagaggtacagcacgaatggatcctaggaccaagcagctgggacttgggaagaccacagcagagagaggggttgtgatcacattgtcccctgaaacccaagtgaagacgtgggaggttcagggtgacaagaccatggagacatcattgtcactgaagatgtagagagtaaccatgattaaagttagaacaggaagaggcacagggactgtcatgttgtagaataaatggagttggcagatctttggtcaagttagaaaattatataggtgagtggattccaagcaaatagtatcaaggttaacactggggaggagagccttgcctaaagctgggcgatgggggagcagaagaagaggagaagagtggggatgaggttgaggaacacaacatgaaggaattcttttacttttttttttttttttcgagacagggtttctctgtgtagccctggctgtcctggaactcaccttgtagaccaggctggccttgaactcagaaatccgcctgcctctgcctcccaagtgctgggattaaaggcgtgcatcaccacagcccaacaccatgaaggaattttaggaaaacaagaaattagaaattcccatgactatctgaatctaaaatgttcgtaaaccttagatccaaactctctgccttatcaatacatgtagtaccagtcgctcattacaccgttttccttctactgctgctcttccttccctccttctccttgtagagcttttgctgacctggaattcactgtttagatcacgctggcctcaaactcacaaagatccatctgcctctctgcctccccagtgctggggattaaaggtgtgcaccactatcacccagcttgcacgtaacaaacaaacaaacaaacaaaccacagaatttgacaagaaaaggaaataaacccaacttgttgaatattaaggaggcagcaatattacactagatgttgaacttgagtcaaagcagccatttttaaccttaagaactgatgttaattataagagattggaagccaattaagcagtgaagtctgagaccaaatagtagggttttgtttatttgcttttcttttgtttgtttgtttgtttgtttgagacagggtttctctgtgtagccctggctgtcctggaactcactctgtagaccaggctggccttgagaggagatatcatggagatatgcctgcctctaacttctcaggggtgggattaaaggcatgcaccacccctgcttggtcttatttgtagtcttaatcccttaaaaaatgctcacttttgtaaatgccagataacttgaaattttgattattctgaaaccttacaccctaatagactaatagatgtcttccccctcccttctctggggttttcttcccatttctttctctctttccttccctcctccgccctccaaccctgctctcctgtttgcttttgctcctctgttatttttgagcctgtcaaatgcaccgtttttctcctctgtccaccccccttcctttacactgccttgtttccctctggttcctactccttcccttctgtccccctactttctcactcttgattttttttttcttctcatcctcatgacaggtctatgacacacagctggagaatgtggaggcttttggaggcctgtccgacttttgtaacaccttcaagctctaccggggcaggactcaggaggagacagatgatccatctgtcatcggagaatttaaggtctgtctctggcttggcctatgattgtgaggtttcagcaatagctgaacagaaaaggggtagtggcaatagtgaccatggtgctgctgttgctgtccttgggagtgaccttgtgattgatgcagaattggatggtagtgtgggatggtttagagctatatggtttccatggtgatggtgttcagaaatgagagtgacggtctttttggttactgtgttattgaccatggtgacaaaaataaaaatcgagttcccatttcttttagggtctcttcaaaatttatcccctcccagaagatccagccatccccatgcccccgagacaattccatcagctggctgctcagggtccccaggaatgcttggtccgtatttatatcgtccgagcatttggcttacagcccaaggaccccaatggcaaggtaaacattcttggagcttttggtcccctgagaacagtagcaagcttgtcttgtagaaagcaggcagagtttctgtcccaaaaaggctaaggtaaaccagggaaccaaaagacactgcagaactgagtgggagctggggatgtttgtgaggtcagggaaggctaaagtttatttgggcttctggaaaaatggcgaaaccttgaaggaagggaggacaaagacccttatgggcacatgactgttggtaggctggggaaaagttgggctttgagatggaggtctgaaggctgactgctcagctagcaggtagaactgggctatggcacatggtaaagtggacagaggttcaggctgagcccgggaagggttaggtgctgggtgggaagaagtaccaggaggggagggacaggaatggtgacttctgttggccatggggctggagacggagggtaaccaggaaggtttgttctgctaatgttgatggtctgttggtactgattttgtaaaaaaatatttttattattattttatgtgtatgggtattttgtgtgtatgtaccacatatgtgcctggtattcacagaggccagaagaatgcttcattagatcttctggaactggagttagagacagttgtaagctgacatgtgggtgttggaaatagaacctgggtcctctggaaaagcagccagttcttgacctctgagtcatctctcatgctcataaaataccataataaaacatcatctatctggattactgagttttagatctttccttaaatttcacatctaaagcaagagaaagagcttagttatggccagaaatagaggagggaggtctaaatgagaagagtgggcatacagagagagttggaaagggagggagaacagcaaggcaggagtgggtcattgtagtttagaggtacaaacctgagcccttccttgtccccttagatagatttaggccccatgtgttcccccaagttttgaggtagaagcttggtatcccatatcccaccatggctttacctttcaatgatgagaagttacgtgctcctaaggccaaatcaaattgctgcttagcctgagcagcacagatggattcgaagatatggctgtcatcctggctgtgtacttgaagccttatgtgctagctctggttcctctcttacgtcatattcctgcaggatgatgggaagtctgctgttgcttagaggtagcatccagaagacagacccaggctattctaggtgggcaaaatgtggcctagtctgtcttctttcatctttggaaataggacacttggaaatagggaggacccccaacctgtccaaggtcttgtgtgtatgagggtaggggtccaacaacacctagctttccttgtgtgccagtgggtcaggagtctaaccacacccacctcttcccatgtgccagtgggtcaggagtagaggacactcagatgttccttcccactgctagggatgaagctggaaggcatgtccagccataatgggtgaacgggtgagatatgttgtgaggtatgtgtgataaggtatgttatgatgtggcttggaagatgggccctggcctgacagggcaatctgtatcacagctccctaatggccattggcagccagaatcccccaaagacaccttgatccagtgcttttacttgtacatttctgtatcttccagtgtgacccttacatcaagatctccatagggaagaaatcagtgagtgaccaggataactacatcccttgcaccctggagcctgtattcggaaagtaagtgggaagtgccttgggtttcgggtagagggtctgctatggataactcacagatgtggctgccaccacttggaaagtctctaattccttgggtgggactttttatcttggatcttttatgtctgtgagcgcaggcttgaaccctatcaggagcctcttgctaagcacgggaagagttacctcagtgactagagacctacgtgagcactcagaagatgcacttcctatagcatagacttcccgtcaatgcttcaccccaccttccccttacagtcttacctgaatggtacctttgtccagaggaggacattgtcattgggagagtttatgaggtcttactcattttccaccagtttctctttctgtccccatctatcccagatgccaggtgaccagcagttagtctcttagtgcctggtatgcttctgtggtaggcatctaggggatggaggtcgaccaagacagccagggtacatgactaagagccatggaagagggctaagagggctagggtatgtgggtggatcctgggttctgtttggtcatgagtgtgttggggtgagggaggcctttggctgttgtgtctctcgcacctgtggagtcctggtctccccatgtagcaagtgacacattgcatccatatgctgacatctgtttgctaagttgaggtcactttgcctttagactttggagagagtcccaaccagaaacagttttccaccatggttaggagatgagggacggtagacagaagaggtttgatgagctctgacagctgctatagggcttatagctagagagagagagagagagagagagagnnnnnnnnnnnnnnnnnnnnnnnnnnnnnnnnnnnnnnnnnnnnnnnnnnnnnnnntcacaggagctccttcccaagagaccttttcataagccttccttctatcccatcttggaagctgtcctaggagttcctgaaagtaggtcccggtcatgccctcagtagcagtttcctctctctctctctctctctctctcctagtgccatggcagaaacagatgtcaatgttgtgttccatctcattgtctattcattatggagtacatgaaccaggcagtcagctcagatttcaaaatgctggcacatatctacacacacacacacacacacacacacacacacacacagaggggggagggagagagacagagaaacagacatggggaggggttgtacatagaggaatacccagtacagctgctctgtgggtgggatgttttaggagcaacaggagagttgaggagggtcacctccctaggacagctttcaatctcctgccctcacactcctgccccttgattccccactgggtggatgccatcgggtgagtttgcagtatccttgatgccacggccctcctgcaggatgtttgaactcacctgcactctacctctggagaaggacctgaagatcacactctacgattatgacctgctctccaaggatgagaagattggggagacggtcatagacctggagaacaggctgctgtccaagtttggggctcgctgtgggctcccacagacctactgtgtgtaagtgtccaaggctggctgtaggatctcacagacctactgtgtgtaagtgtccaaggctggttgtaggatcccacagacctactgtgtgtaagtgtccaaatttggggctcgctgtgggctcccacagacctactgtgtgtaattgtccaaggctggctgtaggatcccacagacttattgtgtgtaagtggtcagagctggctgcttcccaatggtcagccagccaccctgattctcagcactaggggccagcccaggtgctttcccctagcatccaatgcagagcccagttgtttccattccacagataaggaaacaagagcttgtaactgggaagattagactttgaatctggtatctggctatcatgttatcacaattcagccttgctacccccatttttttgagacagggttacgatgtagccctggctgtcccagaactcactctgtcgaccaggctggccttggacttagagatccacctgcctctgcctcctgagtgtgagattaaagatgtccaccaccatgtctggcttcagtcttttgtgacacacacagaggtctacagggcactgtgacttggaaggagagatgggggaggacagaaagaaggagaggagaagatagtacaaaaaacaagtttctgttgggtctgagggagtcctgtggctgccaggggcagttgtgcgtggagttttagttccagcttcatgcgtacttcagtcctttgctctttgggactctgtttcctcattagtgaaatggggatgacgagctatcaggaagggcaccagctatgacactgaagcatgggcaatgctgtgtgagtgtggggtgcaaaggctcctgaaagcccctcactctgtctcatcttagtcttgtccttgaccctcagctctggaccaaatcagtggagagatcagctccgcccctcccagctcctccacctcttctgccagcagcacaggatcaaggcccccgtgtaccggacagaccgagtgacgtttcaggataaggactacaccattgaggagataggtgagttgcccttggaccccagactgtggaggactcttcgtctcatcacaaagacccaggtggagacaccccctccccaacagcagagtaaaggagtacctgtttgtgggtcagaggtcatagtgaggtcatccaaggatgtcctggttaaccttgattgtcaacttgtcatggcccagagtaatctgagaggagcctcaactgaagaatcatctagattaggttggtctacggccatgtcaatgagagactgtcttgattgatgcaggggggctcagcccactgtgggcggcaccatgtctagaaaggtggacctggtctgtgaaggaaagcaagctagcctgagcggcgagggagccaataagcagaaacctccgtggtttctgttcagttcctgtgctgactgctcctccatgatagattataacctggaagtgtaagccaaatcagccttttcctccgctgtgttgcttttggccagagtgtgttatcatagcacaaggaagcaagctagagtagaaggcacgatttcaggcagttatgaagcacgttgaggccaggggcctgtcttcttttggctttagtggtaagactttggttggaacttgtggtatatccacctctgaggagctcttcttactgagttgtgctaacctccttgcttgacctttgagaacatccccccccgcccccccacatgtaagcatccagggggaagctaacagccttgccacatcccatccctgcccttggctctgcccagtgtagtagctgagatgccccgccacatgctctccatgtgtctgagatgcccacactcccacatcgcccacccagagcagttccaactccctgaggtgtttacaggcccagctggccctgtgcctcctgcttgttgcagagatgtttgatgtcagggctggtgctgaggttataaaaggaaatgacggctttgatgcctgggccccgtcccctcctccttggtctgtgttcctgactctcccagggcttgagccaggctcagccattaagaatgtgcatctggttgaggggggagtctcatttcctccgggggcacccgctgctctgctagcaaactttagcacaggggctctaggtcattaaattctgaggtccagcatctgcctcatcttatatatgaagctattggggccaggggtacttaatgacctgcctgaagctaccagccagctgagtgcaggccacactcctggctctgcagcacacactgtgtgacagtgtgcttggctcaaaagaacagtgacccactaatagcccatgagagtgggcttctttctgtccatgctacctgtctccaagtcacctcctggcagtggaggagctatcctgtaggaagcaggaagtagaaaccacatgtatttaccttttttgcccgatgcccaggtatagggcttctgcaaggtctatgactgtgatggtggcgatactcagctgctagggtccttcagggatcagacatgctcacacttatgtgagcagtgcacggcctgtgggtcctctgtagaagtgttcgctgtgatttccgagtgtagctactgccattcggagaataaccaatgtgaaccagggcatcgttctggcagcactaggatgacacatttgtggatactggttgctggggctcagaggtgggagcagttaagaatagatggatgagtgggctttgccagacaagcaaggttagtgtggatggaagggaagaattttccaggagaggtttggtagaaaggacggcaacaggctatctgtattcggatcctggagtctgtgggcagtgatgtttccctcgtagcaattgtggcctaagggccagcactgtatatctttatggggatggtctgtggtgatgagggactccctgatgctctcaagagttctaggtaaccttcagaggaaggcagccctggtgtgtcttgtctctcacattctcatccccttttttcccccctggggcagaggctggcagactcccaaacccacacctgggcccagtggaggaacgcttagccctgcatgtccttcagcaacaaggcttggttcctgagcatgtggagtcacggcctctttatagtcctctgcagccagatatcgagcaggtaagcccttgccccctgggctgtagagttgtcagaccccagagtcctaaggatagctagagcagtcacctcctccatggttgcccctcccccatggctcctgtctttatagagtggtctacatgggctcttggggcctagcccttactgccagggagacaatgactgttcttgttttaggcacatgacttgcctgggcatctgaagtctttccatttcaacctgacctaagggtgtcctctgtctctgccatcattactggtttagtcccagaaggtcatcctatactgagctccagttgaggggtcagactagatccaggaactctggaatggtcgaggcccacagagagagtgattagaaggactgcgagcttccctttcggaagataggtgaacacagacagtaagtttaagactggcagtcagctgggtgtggtggcacatgcctttaatcccagcactcaggaggcagaggcaggtggatttctgagttcgaggccagcctggtctatagagtgagttccaggacagccagggctatacagagaaaccctgtctcgaaaaaccaaaaaaaaaaaaaaaaaaaaaaaaaaaaagactggcagccaagccaggctggttgaggaagcaggctcagcgtgggatggggagaggggagaaaagtcaggggaagctctgagggtgcctttgagagaggtaggcactttcttaggttggcttccagccccacagagcagctcaggttaaaccttcttgtcttctagcctcatgatcatatggatattattgaatggaagtacttttgttctcacattttgagagagagagagagagagagagagagagagagagagaaagagagagagaaatatcctatgtttgtagaggccagggggcagggaaagtgacttctgtcatagagacccgagtccttataattaaaccctggctccctggccctctgtggcattgcacataccattctctgcatgctgaacctcagccaacacatcactgtctctgagcagcctgtgtctggtgggtagtgatctttcctccatagtgggtcctacatcagcctgtctaggctcccttttattgctgagtgccgagtctctttctagtaggcaagcaggcaggcctgagtttcatttcctttggcctgggccccaagtgtatactctaggcaggtgtatagaaactatggatggaatgaggtgtgtgtgtgtgtgtgtgtgtgtgtgtgtatgtgtagaatgtgaatgaactgcttgtgtctttacaggggaagctacagatgtggattgacatatttccaaaggtgctgggccggcctggacctcccttcaacatcaccccacggaaagctagaaggtaatgaacaggcttgtccacaggctctagctgggcccatggcaagagggctagagcagctgtgggagagtgggaagaagcgtgcctgtcggacagatttggggccactgagatcttggaacacagcttgtttgggtctggataactgtccagccaagcaggcagaagaactccttgggtgagttggcctatcagctggggacaacatatcctttcctggaatatctgtgcagatataagccattttcctttgccaggttttttctgcgttgtattatttggaacacaaaagatgtgatcttggatgacctcagtctcacgggggagaagatgagtgacatctatgtgaaagggtaggcagtcattgttttccacctggaccagctcatgacacctccccagctcccagaggtcgggggacagatgctctctcaggcagagctgtggcgtggaggtggagaaggcacccttccaaggagggtctcccaaccgagtctgcacctttggggaatcatttccctcaaattttctttgagctacaatggcaagggctgaggatgctcttggggaccactgaggcatcaccccactctgtggtatatagtgggtgctgtggagatcacctgggtcttcccttaccaagttccttcacctccacaactcttcactggtctaagtagaggttgagcatctggcagtgcatgtgggaaatgttctgttgtatggggcctttgaaccaatgaggactgtcctcttccatgtgtggccagctggatggtgggattcgaagaacacaagcagaagacagatgtgcactaccgctccctgggtggggagggcaatttcaactggaggttcgtgtttcccttcgactatctgcctgctgagcaagtctgtgctgttgccaagaaggtgagtggcccttggcctggggcaccagactctgggtgcttcacattcctaatgtgatcctcacctttagcattacagctgacactatgacattctctctctactcctgcagctgtgacctctgtctctgtcacccacaggggcatcaccaccatctatgtaccctacttctctttccttttctgctagtattactgtggccagtgtctctaccttccaggatgatccatagctacacagcacacaccaaccacttagccaagttcaggacctcctaccactgcctatattaccaccactaccaccacccccacacccagcagcatggaaggacctagagtctgaggcagaagagtctggagacccatcatggtcatcacagaggcagggggtggagccagctgtgtactcctgagggcaggcctggcctgggtctgggtgaggaggtgggccttggactcttagcagatccaagtttaggtctcagctgagtgttagcctctgtagtctcgaaagggtctaagtctaagggtagcagcatcctccccatacctggttaccctcgtaagtcagtagagcacaatacatgggtatggggcagtgtgggtctccagctatgctggttccaggaaggcccaacgatgctttcaatgttcttcctccttcctgacactaatggctacccagaagtgtcctcttctccgagtacatgcctgcatgtgcttaggtcctattggtttgatttctacccagagggagctcaggtgtccagtgtcacagtctcagtgacacctttctgtaggctgtagtgtggctttaccttgaagggaagtcagagtgctcttgacttccttgccctccgaattctcttcatctcacctctgagcctccctagtccaacacacagactcatccaaacctcagagaaaccagagtgttccaccaaacacccaggaaccgtcaaagagaaaaatataaatttgttagggttaaagggtagattcttctacccagagatggcagtagggtccaccagaaaagaaagccaaatttagtggcaatgttgagtgtagtcaacgttgaaagtgcagtgcccaggctctctgtaagttttgattttgcccttccttcagatttgtctattataagcctatttccctgatagcagatactgtgcctgagagcccgcatcaaatgcagaagtacctctcctttagccgaggacagggatggtgaggctagggcaaagcatcatcttcaggcttcagtgagccctctaaagagagtaggcctgggtagggaaattgaggcagagatgcacattggttgcttgaacgggaggggcttcagcatttttaccacaatggaggatgtggccaggcttgtctggtgcagggacttcctgtttccttgggtgaaggaagaagagaatttagcactatgacaagtgatttgaggtggatgggagaatggggaggagctgtaatgatgatgagagatgagcacacatgcacacatgcacacatgcccatgcacacacacccatacacacgcacccatgcacacacgcccatgcacacgcacccatgcacacatgcccatgcacacacacccatacacacgcacccatgcacacacgcccatgcacacacacccatacacacgcacccatgcacacatgcccacacatagatacccatgcacacacatgcacacatgcccatccacacacacccatccacacacacccatgcacacatgctcatgcacacacatgcacacatacccacgcacacatgcccacacacagatacccatgcacacacatgcacacatgcccatgcacacacacccatacacacacacccatgcacacacatgtggcacatacagagggagtggaggaggggtggggtgagagaatgcaagttggtagctgagaattttcacctggcagttctgtgggcccagttgcaggtgctgtttagcactggggcagcactgctctggcacccatggtaagaaagggaagctgggtgacttgtgttggggtcagggtggagttcaaatagaatgacttgttgaggttacagagaaagagagtggctggtctggcggaagaagggagaacctacaaagggtgtgtagggtgcagaggagtgaggagacacacatttggggaggaagagaagaaatccccatgcaaaggatagctggagacaggaggcaggagggtgggatcaagcagaaacagccctaaggacagcagggctagtaggtacttctaggggtaggtcctgagaggcaggtggagcttgcccatagtagggcactgattagctggtctgaagggcaggatggggtagttgagggcaggggctgcaaggtctgtgggctcccaggctctgctgcagaagcagccctctaccatgaagtttggggctcctggcaggcagggaggccctccagggaccccattaaccagacgagactgtcgtaaagtacaaggtctcctttcatccccccttttttgaaccaccgctggttgttcagccttcttccccacctggagccnnnnnnnnnnnnnnnnnnnnccactggggcctgccatgcaggcaggcccccaccctgcaaataaacagctagtaaaagggcccaggccaggagtgtaatgagcgcctgggacctggggggctcattccccaggctgagcccctgaccagctgctcccaccaggggccgtttgaacctcaggctcattactaagccagtaaaccagcctgctgaggaatggaggctgctggcggccctgcaggcagcctggagctggctgtaaaagctggttagaggaagcaggcacctgcaggaggctgggccaggcagctgagcaacagagcagggtggctggggccagccttggtctgctttccttccatgcaggcggctgaagcctaggctatgggactgtgcatgatggccattctttgaggacagtggccatggtctctccttaggaagcatagtgaggtgtttgtaactgtggtggccagggtgttcatggcagatttgttgctgctatgattcagtaccagatagaaatggcagggatgaaaggtttcttttggctcctggtttaaagagagacagtctaccatgatggaaaggcacgtggctggaattccatagtcacgtggggaatgtgaggtgaccactaatatccccacagaacaggaagcagggagtgggcgaatgccagtacttagctattcttctgctttctccctatatattcattctggggacccagcccatgggataatgtctcctgtaatgagggtgggttttccctctgttaagccttgccggcaacaccctcacagacacccttctaggtgtgtctcctaggttattctaaatagtgtcaatgaagatcaaccatctctatgacatcggggccacacacttctgtggttaattggggtacccagctctcatcccacagcttgtactagaagatatggatccagggctcaggttggccccacaaagtatttcctatacatgctacctgctcagatagagccacagtgaacagagaagtccagtgatttttcttcaagctgtgagtggttaaatccatgggaaaactcacccccacacctccaagatagcctggttccagaagggtctgacctgtgggctatgggagacacgccatgaagagcactgccctcctctccagcaggagagaaaaacttctttgcaggctctggagatggagatgggctagagaagtgggaaggaagacctgtggacccacctcagtgccagctttttattgcagcatgccttgttcccctccagtgacagcaggagttgcaccctgatgatctctgccagcccacatgtcccagaggccacatgtgcaaagcccattttagaactaagaacaggaccctggaacctaactgtctgggtttgaatccctgcttgtcactctgtattctgtacccttggacactctgcgtactttggtttctcagctgaaagtttgcctctccttcttaggttgttggaagacagacagttcaggacctagcctaggaaatggtgccacccacaatgagctgggtcctttctatattaatgaacaattaaagatagtcctcaacagacatacccatagcctcatatagacagtagttcctcaaaggaggctttctaagttgtggcaagttgccattaaaatcagccatcacacccctgaacagtgctgagcgctttctagtcttcctgataggacctggcctgggtatgacccttaacgatacactgctccacagtctctgccttgtagtcttcgaggctagagggccttcactgtttgcagcctcggacaaacctttctaaccttgtttctgtgatcttcctgtgggtcaggatgccttctggagactcgacaagacagagagcaagatcccagcacgtgtggtcttccagatctgggacaatgacaaattctcttttgatgactttctgggtaagcctcgtgtctatcactctgagcttccaggagaagctctgggttgctgggtcctcagcataagtgaagcatgtgacacaacaatgtcagagaccagggtggtcctcctggagcaggtcttcagcagaggtgatccttgagccatgtcaaagagtgggactcaagaagaatggggacaagggcagaagccagggcagggctgtgctggccctcacagctgcctggcctcatttctaacagggaggtcccaaaggtcccagatcataacaatctagcaatacagagtccaaaaattgtggggatcaggtcatgtcttatccttgtgccccagggacggtcctaatgaacagaactcagtctaagaagccagactgggtcatggggagctgggctgatgggtaggagtgaagacaaggaggatattgtatgtgggtatcagggagtgctgagggagaagcaggttattaacagtcttacccttagtaagaggtaggaaaactagtgctgaaacatggtctgtccatacatgggatattgttcatacacacaaagaaaagaggtgcttctcctgactccgtctggtggaccttgaaaacatgctaagtgacagaagccagcaatgaaaagacaagtaccacacaagtccacatctgtgggatccaaagaggggacgaaggctggagaggtggctctatgaggaaagagcttatcgtgtaagcctgagcaccgggcttcaagcctaaaacttaagtttaaaaccaaaccaaaccaaaccaaatcaaaccaaaccaaaccaaaccaagtcaaaccaaaccaaaccaaaccaacatccaaaacaatagccagatgtggtggcatttacttgtggtcacagagctggggagctagagacaggaatcttgatgctcattaatcagtcagcctagcctacatggccagctccaggccagtgagagactttgtctcaaagagaaaaagatgatcagcacctgaggaacaattccgaggttgatttctggcctctacagggacacacacacacacacacacacacacacacacacacacacacactcactcacacactcactcacacacatatccaaaacagggaagagtagattaatgggatacatggggaaggagtctaatagacagaaagataggtttctttccagatatgaaaaatgttctggaattagggggaggtctgtggttgcacaactcttgactctagatttaaacgtgctcagagtggcgaatttcttttaattgaagatttgtctgcgtttatgtgcaccatgtccttgaccagtgcccacagaggccagaagagggcatcagatcccctgtaactggagttacagatggttgtgattcatcatacggcccatcccaacacccactggtgattctttttcatggttttgggatgtgctcattttttaaattattgcttttcagatattttttatatattaaggatacaaggtacatttcatatcatttctaccattttaagttccttattatttttaaattactttttactatgtgtctttgtaggtttccacatgtgagcacaagtgcccgtggagttcagagataccagcttctagaagctggagctagagttacatgtggttgtgagttgcccagcgtgggtgttgggaggatcctactcaagtggaatacatgcttgtaaccgccgagccatctctccagatcttccctgcctttacattttgcatgatttttttaatagattttttggcatcaatctatcctttacaaatgaggctttagaaaatttatttccaaagaaaatttcatttttactgagaaaacaacattcaaaacgataaacaggttttctgttttgttttgtttttgctttaacaaaacttaaaccattaacaaatactgtctttgggctatcacagatctcccttcttcaccctagactgcattttctaatcacacatttcatatctcaaaagaaaagcagagaactgggcctgtgtatgccagtgtccgcccgcccacccagatgtctgcagttgtcacagggggaggatgatttgtgtccaccaacagatgagtggatgcatgaaatgtattgtctccctgtggcatatgactcaactgtaaaaaacatagtgacatgccgggatatggacagactctgaaaacagtttttcaatgaaataagcctgacgcctaaggacagacatctgtaactacaagaggcatgtccacacaaactagacaatgctggtgttcaggtctgaggggacaaggaagttatagcttggtggtcagtttctcttcagggatgagaactttctgtaagtagtggtgacggctaagcaacactgtgactatatctaatgccgctgaatgaacacttagtattactgggggttggcaggtggcccagtgggtaaaatggagtgctgcttactggctcgctccctgtggtgtgtccagcatgcttccttatagaactcgggagcacctgcctaggggtggatactagcactgggctgggccctctacatcaattgttaatcaagaaaatgacccacaggacaatttaatggaggtattttctcagtcaaggttcactcttcccagatgacactagcttgtgtcaagaggaataaacacacttaaccagcacacacacacagacacacacagacacacacacacacacacacacacacactatatatatatatatatatatatgtatgtatatatatatacacacacatatattcacacatatatacatatataaatacagacgtatatgtatgcgtatacacacatatatatacacatgcatatgtaagtatatacatacatgaatacacacacacacacacacacacacacacacacacacactatatatatatatatatatatatatatatatatatatgtatatatatatatatatatatacatacacacatacatacatatacagattcatatagtgtaggtgtgtgtattcattttaccatgataaaaatgattatgccaatgaatgaatgggtgtatgaaggcttgtactgcagaaacagaatgggtagattacacactttgaatgaatggatgaatggtagaagctatatagaaggagcaagaggcaatagacaggagctgggaggctgctggagctgacccttggctgacccatgagcacaagctgaagaggtggcaatgagctcttaaatctgcccacccaaagtggccctaagtgagcagtgactgctgcatcctctaagagcatcatcactctgccacaggctctctgcagctggatctcaaccgaatgcccaagccagccaagacggctgagaagtgctccttggaccagctggatgacaccttccacccagaatggtttgtgtccctttttgagcagaagacagtgaaaggatggtggccttgtgtgacagaggagggcgagaagaagatgttggcggtgagtctgtcctcttcagctcagtggagggcagtggctgtttttttcatggaacccaggggcacacatacccatgctcatgtgaatgtatgcgtataggtacaggaggcctgctactttgtctttttgagacaggttctctcattggcttcctgctcactcattaggctagctgtctggccagcaagccacagggaactgtctgtctctgcttcctcagtcctggcatttcaaatgcgtcaccatccttgggtttctctgtgggttctgaggctctatctgaggtccaaaggcttgcatgataagcacgtgagtgactgagccctctcccaggccctcttctctgtctctattatccaatgtgttctccctcttcctattccagcctgcctctctctgggctcctattacagggagacctgttgaatagacaaatggccttatagagattggtcccgagtatccctgtgactggggcttcctgctggatggacagaggccgtgcctcttctgtttgtgcagccctttctcagggatcactcttgccggacgagaggtccactctggcaggtggggggaggggcgtggccggaggaccaggatgagcagtcctcccctgaagtccaaagcagccccagggaagaagttaatccccctctgactccttagaaagcataattggccagccctcaagtgacccttgtagtaaaatatccatgttgtacagagactcatgatagccaataagaaatacatcccgaagggaaaccgagcaaggtccatgcacaggctctgtgactcattacacaagagaagaaagttagttatttccctagtaattaaagaactatttttaaaaaaatgcgtttgatctattaaattagacttaaacaacaacaacaacaacaacaacaacaacaaattggaaatgctcacgctggtaaaggttaaggagacaaaccccagtcccctgcgctggggtcgcagggtttgtttcagtgtgtagggaagcagttacaaactgtacagcacaggacttgacaacgtctatgcccttgcaccctgccatcccacttctaaattctcgtctcaagaaataaccagataaaataaaaaaattaggttcagagatggttgttgtgctattatttattcattttgaagagctgaaaacaacataaaataaccccaaataagtagttactaaataaattatggtcaaccaatcgtgggtggctttacaatcattagaaaccaagccttaaataatatataattacacagtgaaacgcctcccgagcgagaagccatggggctgcacgcacagtgctgcgcctcacacacttgcagctctgacgagtaagaatattgggaatggggctggagggatggtgtgtaccccagctcagttcccagtacctacaatggttggctcacaggtaattaattacctgtgactccagctcaaggggatccagtgccctctcctggccttctcagtcacttgtgcacctgcctgaatgcacgtgtgcacacactcatgctctgtctctcaattaaaatatattaataaaataaaataaaacagtagaaaggttaaaatggtaaaataaagaaagaacactggaaacaccggtgtccacgtaagtggtgacttcttcattatagttctgtaatctctgaatgcttctgtgattataacaacccaatgtttcagaagtagatatattgccatagttggcttttctgttgctactataaaaccccgaacaaatccaactcgaagagggaagggtttgtttccttggcttacaggtcatagccatcactgaggggagccaaggtagaacttcagacaggaacctggaggcaggaaccaaagcagaggccatgaaagggtgctgcttgctcagctacctttcttatactgccagggccaccggcccaggacacattacccatggcaatagacaattaagaaaatactgcacagatatgccctcagggcaatcttttctaggcaattcttcaattgagtctcttcccattttgctctattttgtaccaaataggcaattgaagctatgatacatgtttattttatttgatgtatatatttgtgcctgagtttatgtatgtgtaccatatgtgtagagggtccagtagatgacctaagagggtgtggtggttgtgaatcaccatcttcctgttagtggggaattgaatcaggttcctctccaaaggcggtaagcacttttaactgctgaaccatctctctagatggttcaccacaaccctacatcttaaaaataaataaaaataaaaataaaagtaacattgtagccttttctgtttggcctggcctggctctgctctgtgccactggccagaggccacaatcaggctccattgatgtccacagggcaagctggaaatgaccttggagattgttgcagaaagtgaacatgaagagcggcctgctggccaaggtcgggatgaacccaacatgaatccgaagctagaggatccaaggttagttaattgtcctcagaagcaggccactgctatctaggagacatccagtatacagctttacagaggctacatagtctttatgggttaagagacagaggccatggcacagcctcagtggacacttgggatcttcaactaattcatgaagcaggtacaaaaccaggcacaggatgtaggtctattatcctggcagttgaaaggctgaggcaggaggatagtgggttccagaccaacctgggttacatagctggagactgtctcaaaacccaaaacacaaacaaagcaaacagaagcaggccccttagaactagttgtctgtgggttttgtgtcaagcatactatactgcattagggtccagtgtcctagaatcttccctgctgggaagttacttccgtttcacagatgaaacttggctcactgatgttaaatacagtcattctagtaaagaaatgggagaggggatctgaagttctccagcttcctggacagttgctgaagatgcttttgggactcagttcaaggctgtgtttggcagcactcaccatggggtcttgaaagtgagcataggtggctcgctttatcagaatgctgtcctcagggtgtggagttagagaatgtggagttgtacctgtaccccaggctgttgcaatctgatagacaaaggaggaagttcgaagacttaaatgactgattgagttgtaaagcgctctgtgttttttgagttgtggtgctgctagaggagagggggtttgcggttctttgttaagagtgagtgagagaagaagggcttctctggcttctctgctgtccatccttccaaagtccagtccagctatgtacacaggggtaatgcctggcttatctgggggccagtgtaccctcagtcaccaaacagggcatcctggaagctccgccccactcccaagcatgtgatctgtgactgaagatgggttcagaaggagagagggccattgtgaaggggtcctgatgaaggggctcagcagcaccgagaatgcaggtggtacaggcaagcatcatctaggaagaggctctgggaggaggagctgaaggtctggaggcagggtgcccctctcccacagtcaggttctttgaccaactgtcccagctaaaagcagtatctggaggaatcagtcctgcagaggtgctcagctggcctctgggatctcacttccaggcgccccgatacttctttcctgtggttcacctccccgtacaagaccatgaagttcatcttgtggcgacgcttccggtgtgccatcatcctcttcatcatcctcttcatcctcctgctcttcctgggtgtctttgtctacgccttcccggtaagcaggcctgatgtgaggagatgctgacttgggggagccttctttttcaagtgctccaagaacctggtggtaaccatgtcactggttagactcagtagcagttgctacaccactgaaaagcccactccagcatggctggaaactctcagaaactgcagcctcggagctttctgcatgaagttcacaggaagctacactgcttggatactctcttttttgagagtcttgtgaatcttgtaaatttcaggagcgtcctgagacttgtaagttttgtttgcttcctgaaccttaacaagataagtttggaggaaatgcacactacaaggggcttgagcctagggtggctcaggagcctgttgaagggtggaatagagctgagcaaagggtgatggtggtggaagggaaggtatgaggtgatggggcagggggcagcacctgcttggtcctctgaggtagggtggagacttggagaaagtaggaatgaacaggggctggcccaggagtccctcagtggtagggtcatacttggggttccttttatctgataagaagtcaattagcatctggtgaagagacacccaggccaccaggggcataccatccagggctgctggggccttggctccctggctctgcctgtgcagtagttgtggggcaagcctctgtcctctgcccatgcttctggctttcacagctggccaagacccttccacagccttacatggtccaaccgccaggcaccaatcccaggtcacctacggtggcagcttggctcaggacaccatacttgtaagaccactcccccccacccccacccccatcaggagacttgaaaatgcctggccctccagtgtctcttgagacttcaaggtgttgaagtactgttaggctgtctctagagtttttgtggtattttatgagtgtgtgtgtgttttctatgtgaatgtggaccacctgtgtgcagatgcccatggaggccagaagagggcatcactggctctatttgagctccagtaatagatgggcatgagttgtctgacctgagtactgggaacagaatttgcagttatcttcactgtcgagacaaatcttcagcccacagacttttcacatcaacacttcaaagccacatcaggtccagagaggggaagggactgttggtaaactgcacagcaattcatgcatataaactgtatgcaattcatgaccatggcttgatatggttgtcactgagaaccaaatggcatcctggtcaccatctcagactagagaagctgcttggaaaattatccccaggttactgtgtgctcacagactcctcacgggaggaagagatgggtagaaaggctccctccactgagagccaagcacggggctgcctggccagtgtatcttgcctcctggaaggaaaggtcaagaccacagatcatcctgctttgctccaacctgcacaaaccttaagtagcagcagatgggacttcctggtttggctgttgaggccccagttccctttatggccacagtagcaggaaagcctgtaatggtaacggctgatggctatggttacaggctgggcattgtgcactggctgtggccaccttactccgtttgcaatgcttgcctgactcagcaggaagctgaagtcaactggacaaactggggtcctgagtgggtccaggctgtgaggactgaagtttgtgccatgtcaggggacacgttaaggaaaggaagacaacaaatacagcgtcacagtcaagtctcctgggggttgggggtggggagtggtcttacaagtatggtgtcctgagccaagctgccaccaaaggtgacctggaattggtgcctggtggttggaccatgtagggctgtgaaagctgaggtagggacagcctcctcttctggcctggcttaggtcaccttctctcaagtggtgtgatcagcttctactcagagaatgaggtggcttgaataagcaggtatcagtgcctaggaggggagggccttggggccacaagggaaaaggtgtgaggcagatacctaaggaataataaggccactgaagactgaggttgacagaaagcagggcaggtatacagtcggcatctctaggtatggtccagggagcatcagcttcaatgtcactaggaaacttctaggacacaagagttctgagctggctcagcaggaaactgccccctgtccccgtaagaatggagtaactggctgttgtaggagacagagcattgctcttgaacctaggaacatgggctccacggacttctgatgggctcaggtcgggttctgtttgtcctttcaaactgctgcatgttaaactgagtcccttctttaaggacctagagggcaggaacatgtccctagcacctatctccatggctgattcagtgcttacccagaccctgtccaggtgggcccagccctgtgaggcccatgggtcctaagtctcagggctgtggctggaagaaagaccagtcctttctagattgtggaccttggtgttcctgaagacggctgaggagcacttttggggactgagtagagagtctcctccggtgtctgggctccagtggctgagttacgttcttttcatgggcctagggtgtcttctttatataccagcctcccagagcagcagagggcacaggtggatccagtccagggctccaggctggaggggacacaggattagctgcgcactttctgcttgctgacctggctacagcctagaatcccatctctacctatccaagtctctagtcacttggcttggcttgtccccggacctgtcagctcacctgcttttagctatgtggtacagagggtttacactagccggtgcagagtacccaagttgctctagctctggttggaccacccccactgtccccataggaggggtaagagggggccttctgacttctctggcccctctgagccttctgggagcagggccagcttggggcggcagaagcgatttggccgggaaggagggccggctttgtttccagggttggctttccaggccggcgctggagaacatactgtccccaattaggagccctgtgttgtgttgtgtgttttcatggcgtttggggggagtggtgggaaggggaggcttctgtcaggcctgcagcaggaagggctttgtggagggtgacttgtctctgatgctggctcctgttgtgggttgtcctatgtatcaaacaccctacctactctctgtctttctggacagaggcttgggggtgggttagcctcaggtctcctgtttgtgggtatgagaggaggagcctaggagccatggagaaggacagggtcagcttggcttgctggagaaggagtgtcattacagtagtgtgtggagccggccatgggctggtaggtgacaagagtaggctgcaggcaggtggtaaagacccaagagcccaaccacctacctgcagctttactcccagcctcgatgacaacagctcccaccacgcttcccctgaagggcttaccacatgtctctatctgtgtctcttcctcctagaactacgctgccatgaagctggtgaagccctttcgatgaagaagacatctgctctggagaagggggtgcaggctgcctcctggcccaggactagctgctcctccattgctctggggcctggtggtcttgcgcatgtccatggagttcttgggaatcacgttattttcatcttctctttctcccctaacccaacactcctctggataaactcttggctttctcagtataaagcagacagaaccagaaaatatattgctatgtgtctacagttcctgaatgagcgagactgtgtgggagggaggggctgggggagatcagggtgctggtggggtattgtcgtttctggcccagtgtttggaggcagaagccgccagggcaggaggatttgaggcttgatatccagcccagcaaccaccttctcttcatttccaacttgaacccccaccttcctttctgggaaggttatcctgttcaggtaagagccgcagactgggaggatggcctgacctctggctttgaccttgtcacacatagttctgcaacacgtctgcttggttttcataccctgctttaaatatctggctgaatcaagacaccttttccttgtggtctgaagcttggccttggccttggtctgaaatttcctgcgggaaccagacttaatcctcagaagcagcaggactgcactccgaaaacgcagagctggaagactccgctctgaggcttccaaacgagaggcctctgcctcagggcctggagtgctggctgtctcttccctgtcaccaagaggcttctcctatttcctactgtgagctggttcccctggcccaggtccccgggccctggaggaattctccccctcagcctctccattatctcctccctcccaggactgcgggattcaggctgaggcaccacctgattgacatgacagagttggtacccagttactcttgcttcatgctgggccaagagaacctggcagccaggcccttgaaggcttgctgcctgagtccaggaggcaggagcacacctcacccagaaagcaaagcagggacacggggctgcaagctctttgggaaggtcccacctagtgatgaggccttgctgggtctatgccatgtccaacagtatatgacagtagcccgggggaaccagaggagaggaagcaggggttgtccagcctcaggaagggccagggagctttgttggtaggatgccctaggatttctgatgtttgggaggaggaagttaggaagaatcagagacacagtggaagatagagtggagtggaactggtttctgtaggcagaaaatattagcttgggaaggaaggaaggaaggaaggaaggaaggaaggaaggaaggaaggaaggaaggaaggaaggaagacagttagtcagtcagtctatgtttcccccaggtgctagaatgtaagaggaacccctgcagtctcccagctgctatgaaagggtcaggagggctactgtgagcactgtttttctattatagttgataagtaataggaagtctactcagatgagtaaaaagcactcaatggtttcattgaaatagaaacatagaaacataccaaaagaccggcttcaggcaaggattgattcagcttcacacctaaggacttgtgatctttctctcctctgcccttcttaggttgttttctgtttacgttcatccctgcagctagaactgagcttgaagcttgaagcttgagacaacaccagtcattaagcaaatctcaggcatgaggatgagagtgtggcatggatggtcaggggacatatgcttggccaacatgtatgatgttgagatgcttcgtggggcaggcctagggtaggctccacggctgtccccagtgagttgcacatgactcccacagggaggcacacctacggctctgggactaggagggtgggagaccttctttagggaataatggtgacatttgagtgggatcaaactgtgttctggacaataggaagttgttcccatcaccactgatggaaaaagagagagagagacagagacacacagacacacagacagagacacagagacacagacaaacacagacagacacagagacagagacacagacagacacagagagacagagaacaagagctccttggagccctgtggagccagaactgaacttggtcacagagaagaagggatgggtcagaaagaagggtgaggccaggtgtgaagaccctaacatacaaaggagactgaactttgttctgagacaacaggagaatacaggaggctgcagagactggctgaccttggtcagaaccatgtgtcttttaaaaaataattctagtctaggttttcttctgggagatgagaattctgtagggacagagtatctgctagtttgtagccaccctggaagactgtcctgctggagatagtagctggggtgctgacccaagtctcagtgtggccagagatcacagaggccaagcaggatgctggccagctggcgcctgacagttggttcagaaggctggctcagtaatcagaaggcaaaggtgattcacccactcattcatacaagacatcctatacagggtggggtgctgggcaaggagagaggttttataaggtaagcatagctctgcacttggagatggaggggcagcacgttgagggaagggcagctatcgtgagttaaaagcagggaaagagaaacaggaagggtttgcaaagacaggccctctcaggatgtggagtccccacagtcaggctcagacacaggctctcagctgggctgctcttccctgcaaatatcctgctctacggcgagtctgaatacagttcagattgcttgaactgctgtggggagagcagggggccccatacaaaggctgggctggcacagtgctgccccagaacctcggagatgaatagaatcacccagtgcaatccacacatggcctgaggttgtgggtgtgggatggcagacaagccccaagccatcctagactgtcaggtttcatggccagcagacagtgggactgttttatccaatctgttttgtacaagtgggttcaaatacattcaggtatctgcagctgggctctctctcctctccttatagaaagttctagaaagcttcttctctgtaaccccacttcatcctccctcttctacatgctatgatcaggcaaatcaaactaaagccactgtccttggcaatgggagctttggaaagaggagttgtaactagggaaagtgctggtgctatggagatgaggaaggcctgggcatttctagaaaggtatcccaccaagtaaaacacacacacacacacacacacacacgtacacatatgcacacacatgcacatgcaagcacacatgcacacatgcacactcagatacacagtcacacatgcacacatacatacacatatgcacatacatgcacacacagatacacactcacaaacgtgcgcacgcacaaacacatacacaccttcatttttatgctcttactccagtgggaagtggagtgatgtttttagaggctatgccctgtgactgagctggtctgggtcagggaagtgagctgacacacggaggatggcagaatggagggaaggcaccaaggccttaactgcctgcctctaggccagatgcaggtcatagttccccacaacccaagcccctgttggttgggtttcttggctgcagagctccactcactccctgagacttgtttaaactgccaccgccctgaataagatgtgtgtgggtacaccaccatgtgctttctgtgtgagtgtgtggaggtacagccagagggtaacaactcctctcctctcctctnnnnnnnnnnnnnnnnnnnnnnnnnnnnnnnnnnnnnnnnnnnnnnnnnnnnnnnnnnnnnnnnnnnnnnnnnnnnnnnnnnnnnnnnnnnnnnnnnnnnnnnnnnnnnnnnnnnnnnnnnnnnnnnnnnnnnnnnnnnnnnnnnnnnnnnnnnnnnnnnnnnnnnnnnnnnnnnnnnnnnnnnnnnnnnnnnnnnnnnnnnnnnnnnnnccccctcccctactctcttctcttccccttctctctctctctctctctctctctctctctctctctccctccctccctctctccctctctcccttccttcctttcttccttcgttttgagacagactctctcactggacctggagtacactgattggctccagcacctgcctatctctgcttccccagcatggagcttacggacatgcgcagccatgcccagcctgagcactgccctcagatccttgtgctcctgtggcagggtctttactcactgggccgtcttcccagttcacatcatatagactatttactacaacactttccccacaaatgaagccaagtgtttcattctaataaaatcagtagagattttgttgttgttgtttcagtagcttcctggtaacatcactcatactacaggaagtggtattttttcccaccatctcctgcaaggacaccgccttaccctgcccaagcctcctccaccgttttagtctctcagagctcagggttctccagccattgtgtaagcaatctggagttcctgcagcccccacagcgtgctcctctttctggcctggcttccctgtgagtctatagtgtccccaggtccttgatggctcctgatctcccactgaccagggtgactgattccagcctgcctagcccagcttttctctgagatgagctctgtctaatttgtatgaacttgacacaacccaaaatcaccccaaagagtctcaacagaataatcatctttatcgggttggcctcgactgtcaatcagtgtaggaggcacagccctctaaggacaggagcactccctgggcaggtggtcctcagctgtgtaagaaaactagctgagtacaagccatcctgtgggccagcaagtgccattcttcaatggcttctgcttgagttcctgctccacgtgccctcagtgatggactctgacctgaaagtgtaagccaagtaaaccgtttcttctctcagtttccttttagtcagtgtttcatcacagtgatagaaaggaagccagaaaagctcccttatgcccagagggagatggtgggtgctcctgtgttcttccttccccctgcatggtgctgaccaaggttcccattctgctctatgatccaccgatcaggcacgaggatgcatgtggaagtgtatggaagccctgtttcaccagatacacacactcagcacatcaacagagctgatgctgtctctccagtgccctgcaaaccggctgcttctcagtccggtgtcagggcctcacttactaacatgcccagccgccagcctccttggagcccagagacctgccttctgtcttatgtctagtcttctgccccctgtccttgacctctagtcccagggagtttccctcactgccccaggagggaatgagactcacctcacgctgtccctgttgctctgcccagcctgactctgagctcctcagcactgccctgagatgactgcagcttgttggtccacgacatgtctccagggatggattcacatcttggtcttcagtgggttctcttctttcactggagggattttgctgagggctgactcaagtcctctcaatggccatcagaatccactccaggggactatatgttttgaaattctgtaggtctaccacattagagatcattctgggacccaagtgagagggggaaaaaatctcactgttaaaaaccagttcagtcaaaagtatgacctctgtatcccaaaattcactttcctgcctctgctgtttctaagaactttcaagagagattctacacacatacagatacacatgcatgcctacacaaacatgtaaatgtacagagaatacgtacacaaacacatacacaaacaaacttgcttatacattagcaaaatcatgtatacacaaatatatacttacacacgcaaataaaacatatacaagcataaaaaatgccacacatgcatatacatagacatacaaataggtatactccctgcaaatataaaacacaaacacggatgcatacacatacatacaaatatatgcacacacaaacatatatatgcaaatacacacaaaagggcctatgcaaaaatactctacttgtatacacataagcatatatataaatgtgtgcccatgtaaatgcacatcacacagacacatagaaacagactcacatgcacacaccacacacaggtaaacactgaaacacacattgatttcttctctctagtctggtgtgacagtcctggctgggcagacagggaagccctgcacacacagagcgattactttgcccctcccctatgtgccccaactctgggaacctcaagtttgtctcaatcctctcttcatgtgtttcataaatgtgggattatgggatttccagaggagccaggtgagtgcccctgcctgggagctggtgacagccagggtgtctcaagggctcacctggctcaccagtcccctcctcactgagaggtactgaaggtacagtggtgactttccagacctgttctctggggaaaactgtgtctgcatcagctctttcctgtgacccagcctctgggttcacctcatttccttgactttgctctggggtgcccccaccactcacacagctggcagatgaagtaaatgtgggcagaaactgagagaggcaaaggcagacaggcagagggatagtgacagcatgccaggagcctgtccaagtgcctgtgagctggagccatcctcaggtggcttgtctcactgctgggcagagctggctccactctaccctctccacttactcaaaatatgggagaaaaggagaaagagagggacatgccctgtgcaagccccacacccagccaggctggcctggcacccaggtttcttaaccagatggctgtggggtgtgtgtgtgtgtgtgtgtgtgtgtgtgtgtgtgtgtgtgtagggggaagggaggcaggttcggctctagcagaagaaggcaggagctgccccaacccttggtctcctgctaggctcagacccacctgtgctcttgcctggtgtaggcctagacaggaaactgcttccctgctgcttcagcatctgctgaagtcctggaaactttcaaaggatcagttttcaagtttgaccaagaacaaatagtaaaagactaaagtctaggaagcattcacacgagtaagcctgctacctgcccccccccccccgacatgggagggggattggccattcacacggaatagaactatatatacaggcatacacatagagtgggaccattcacacacacatagtgggaccattcacatacacacacactgggaacacacacacacatatacacacacacacagaactcatatagtgagagtaaatgctttttatatcattcttactctgacctgcttggtcctctccaccaggataactccaaggaagaagaggaagggatcaaagatgcctcaggcaaagggaagaagaaaggacagcactgtccagggacagtgctccatggacactaccttcttggacctacccagaattgttgaaacagctagctggcttggggacatacccactagggatagatggcttgggagcaccttcactggagagtggccagcttgggagtactactaccggcaggtggctggcttgggagcactccactggtattcaccttgggggagagtatactactgcagggacccaagctccagagtagtgtggcacagttctcccagggccagacactcactagctggcagattccaggtcatagagcttctggggtatgggagttaaagttggggtgtctggaaccccagacatggtgttctgtgtctgtaaccaacagtccttgggaatgctgttggctgtctcttgggggaggtgacacagatgccaggaagtgctagaaggacataaggagccagggcgcctctgacacttgagctccaactatcacctggtcccaaaagtgctgcagagcctgtagaccagtagttctcaacctgtgggtcgtgacccctttggggggtcacatatccttcacagggatcacctaaaaccatcagaaagcacagctatttacattatgattcatgacagtagcaaaattacagttatgaagtagcaacaaaatacttttgtggttgaggggtcaccaccatgtgaggaactgtattaaagggtctcagcattagggaggctgagaaccactgacgtagacagacttactggtggactcagcagtatctgctcacaacctggtcctctcagagctggccacagacagacgtgggcacacacgagagggacaggcatcctgagcatgcttgctctctgagcgtgcgtgcatgtatgtgtctcccgctgtcagccagagcacatgctggaaatgcaggcagaaaagagtgcgtggatgtggccgtcatcggggataaattaatcccagacatgtaaagcgcttgctttcttcattctcagctcagctgcaaattcaatcactactccttgccagctactgaactgaggggacgaggaagtacgtggctgggtctggaaaatggggtggggcaggggacccttctggatctatctccccacccccctgctgttgtcccagatccaggaaagagtggcagacattccctagttccccagtcagctcatacacgctggcctggaggcatgggggaagtggcagagataggctgaggggccccagggcccagggaggcctcaacgatcctacgctcacccatcagagaggaaaacgtgggtctctcagatggtgtatattatctctgcaaagcttttcatgggcctccctgagacttgctgagaagagtctggcttgttgttagacccttctaaaccaaggtcttaaactacagacaggcctggggcagctctttagctcaagaatgtccctcagagatcaaactgtctttggggatcccttttctgtgggttgtgtttgtgccttccctagactaggaagggagtacacccctcaggtggctgcattccctctccagcagacagagatgtgttatccttctgtctgaaccaaatggctatagttgtgcccagagaaagtgggtagtttgaatattattggccctattaggagagaaatggcactattaggaggtgtggccttgttggaataagtgtgtcactgtgtaggcaggttttgagggttccccctgctccaactttgcccagtgcaggagagagccttcacctggctgccagtgcaagggagtctctttcctgactgccttcggatcaagatgtagaactttcagctcctccagcactgtgtctgcctgcacactgccatgcttcccaccatgacgataatggcctgggccaatgaaatgttttcctttataagagttgccttggtcatgtctcttcatagcaatggaaaccctaagcagtgctcgagtttggaaaggcaagggtgggtagattggtagaaatcattcttgtgagtggagagtgtgggttttgagtggtcattagagacagtaaagctcggggaaaggaatgtgagggaagaatagccttggtgaccccaacatgaagtaaagtccttgctggggaggccttgtaagctccacttcaggttgaggtagggcctcaggggccttggacttaaccttggcttcaccccttgagggtgattgcctcaagaatgagaccagtgtctaaggaacacttctagacatagatgatgggaggaggggagggtggaggaatagaggcttggatccagggagtgtgtaagtagcgggcaggcaactgtggcagcccttagtcccagtgctaagaggaggccagcttctccttctatcccctctcttctatctatgtgaggtgggtagcctcaggaaagagaagaggctagtgagttcccagaaacccagcctccacctccagagctgctttattttgggatgaggctccttgcaaggcaggaggtcttagaaggagccttggctcccttgagccagtacggcactaggcatatctacttcttaactggcattggcaacaggaagccgttgttttaattagtttgtttctgagacaagatctctagctcaggttagcttcaaactcactatgtggctgaaggtgtccttgatcctctgggtccacctgtctgcgccacctaagggct

SEQ ID NO: 64 - DNA, 6323 bp, Mus musculus
gccattgcggccgccgcccagcccgcagcttcagggtctaaggcaaagtgccgtgtcattgggaaagctggtggcggggcattgaattacaattccatggagctggagtacaactgcggggcgatgctgcgagtcttcatcctttttgcggagaatgtccacaccccggactccgacatcagcgatgcctactgctccgcggtgtttgcagaaaccttaaaggactccgaaagaactaggcggtggaggaggttcctgggggaagccaagatcccactccaggaggtccttgccacccccagcctctctgccagcttcaacgcacctctgctagacgccaagcagcaacccacgggggcctctctggtcctgcaggtgtcctacacgccacccccaggagctgtgcccctgttcccaccacctgcttctctagcaccctccccgacactgcctgacatggatctggtgcctgacacaggaggggaggaagacaccgaggaccagggcctgactggagatgaagctgagccgttcctggaccagagtgctgctgtgggcccagggggaccgaccacacccaggaagccaccttcccaccctcctccccactatccaggggcaaaaagaaaaagaagctctgccccacctagaaagctgctgtcagacaagccacaggacttccagatcagagtccaggtgatagaggggcgtcagctgcctggggtgaatattaagcctgtggtcaaggtcacagctgctgggcagaccaagcgaactcggatccagaagggaaatagcccactcttcaatgagactcttttcttcaacgtatttgactctcccttggagctgtttgatgagcccatcttcatcacgatggatgtgggcaccgtgtacagagagccccgacacgcttatctccggaagtggctgctgctctccgaccctgatgacttctctgcgggggccagaggctacctcaaagccagcctgtgtgtgctagggcctggagatgaagctcccctggacaagaaggacccttctgaagacaaagaggacattgaaggcaacctgcttaggcccaccggtgtggcccttcgaggagcccacttctgcctgaagctcttccgggctgaggacttaccacagatggacgatgctgtgatggacaacgtcaagcagatctttggctttgacagcaacaagaagaacttggtggatccctttgtggaagtcagctttgctgggaaaatgctctgcagcaagatcctggagaagacagctaaccctcagtggaaccagaacatcaccttgcctgcgatgtttccctctatgtgtgaaaaaatgaggattcgtgtcatggactgggaccgcctcactcacaatgacactgtggccaccacctacttgggtatgtcgaaaatctctgctactggaggagaaatagaagtggacgacaacctgggcttcctccccacttttgggccctgctatgtgaacctctatggcagtccccgagagttcacgggcttcccagatccttatgcagagctcaacacaggaaagggagaaggtgtggcttatcgaggcagggttctgttgtccctggagaccaaactggtggaacacagtgagcagaaggtggaagaccttcctgctgatgatatcctgcgtgtggagaagtacctgcggaggcgcaaatattccctctttgctgccttctactcagccacaatgctgcaggatgtggatgacgccatccagttcgaggtcagcattgggaactacgggaacaagttcgacaccacctgcctgcccttggcctccaccacccagtacagccgggcggtctttgatggatgccactactattacttgccttggggcaacgtgaagcccgtggtggtgctgtcctcatactgggaagacatcagccatcgaattgagatccaaaaccagctcctcagggtcgctgaccgcctggaagctaacctggagcaggtccacttggctctgaaggcacagtgttcctccgaggatgtggacgccctggtggctcagttgacagatgagctccttgcagactgcagccagcccctgtgtgacatccacgagataccttctgccacccaccttgatcagtacctgctccggctacgcacccgtcacctgagccagatcaaagaagctgctctggccttgaagcttggccatagtgagctctccactgccctggagcaggccgaggactggcttctgcatctccgtgccctggccgaggagccccagaacagcctgccggacatcatcatctggatgctgcagggtgacaagcgtgtggcctaccagcgggtgcctgcccatgaagtcctcttctcccggcggggccccagctactgcggcaggaactgtgggaagctgcagaccatctttctgaaatatcctatggaaggtatgcctggggcccgaatgcccgtgcagattcggatcaagctctggttcgggctctctgtggatgagaaggaattcaatcagtttgctgagggaaagctctctgtctttgccgaaacgtatgagaaccagacaaagctggcactggtcgggaactggggcacaacgggcctcacctaccccaagttttctgatgtcacaggcaagatcaaactaccaaaggatagcttccgcccctcagctggctgggcctgggcaggagattggttcgtgtgtccagagaagaccctactccatgatgctgacgctggtcatctgagcttcgtggaggaggtgttcgagaaccagacccggctccctgggggccagtggatttacatgagtgataactacacagatgtgaatggggagaaggtacttccgaaggatgatattgaatgcccgctgggctggaagtgggaagatgaagaatggtccacagacctcaatcgggctgttgatgaacaaggctgggagtacagcatcaccatacccccagaccgaaagccaaaacactgggtccctgttgagaagatgtattacactcacaggcgtcgacgctgggtccgactgcgcaggagggacctcagccagatggaagcactgaagagggtgagccagcgggagcacaggcaggcagaggccgagggcgagggctgggagtatgcctctctcttcggctggaagttccacctggagtaccgcaagacagatgccttccgccgccgccgctggcgccgccgcatggagccgctggagaagacgggacctgcagctgtgtttgccctcgagggggccctgggcggcatggtggatgacaagagcgaagactccatgtctgtttctaccctgagctttggcgttaacagacccacaatctcctgcatctttgactatgggaaccgctaccatctgcgctgctacctgtaccaggcccgagacctgccagccatggacaaggactccttctctgatccctacgccatcgtctccttcctgcatcaaagccagaagacagtggtggagaagaacaccctgaatcccacctgggatcaaaccctcatcttctatgagattgagatcttcggcgagccagccagtatcgccgagcatccgccctgcatcgtggtggagctctatgaccacgacacctatggtgctgacgagttcatgggtcgctgtatttgtcagccaagcctggaacggatgccccgcctggcctggttcccactgacccggggcagccagcctgccggcgagctgctggcagcgttcgagcttatccagagagagaagccagccatccatcacatccctggctttgagatgcatgaaacttcaaggattttggatgagacggaggacacagatttgccttacccaccacctcaaagggaggccaacatctacatggttccccagaacattaagccagctctccaacgtactgccattgagatcctggcctggggcctgcggaacatgaagagctatcagatggccagcatctcttcccccagcctcgtggtggagtgtggtgggcagacagtgcagtcctgtgtcatcagaaaccttcggaagaaccccaactttgatgtctgtactctcttcatggaagtgatgttacccagagaggacctctactgtccacctattgtggtcaaggtcattgataatcgccagtttggccgccggccagttgtgggtcagtgtaccattcgctccctggagaacttcctgtgcgacccatactcagcagagagtccatccccacagggtggcccagatgatgtgagcttactcagccccggggaagatgtgctgattgacatcgatgacaaggagcctctcattcctgtccaggaggaggagttcattgactggtggagcaaattctttgcttctgtcggggagagggaaaagtgtggttcctacctggagaaggattttgacaccttgaaggtctatgacacacagctggagaatgtggaggcttttggaggcctgtccgacttttgtaacaccttcaagctctaccggggcaggactcaggaggagacagatgatccatctgtcatcggagaatttaagggtctcttcaaaatttatcccctcccagaagatccagccatccccatgcccccgagacaattccatcagctggctgctcagggtccccaggaatgcttggtccgtatttatatcgtccgagcatttggcttacagcccaaggaccccaatggcaagtgtgacccttacatcaagatctccatagggaagaaatcagtgagtgaccaggataactacatcccttgcaccctggagcctgtattcggaaagatgtttgaactcacctgcactctacctctggagaaggacctgaagatcacactctacgattatgacctgctctccaaggatgagaagattggggagacggtcatagacctggagaacaggctgctgtccaagtttggggctcgctgtgggctcccacagacctactgtgtctctggaccaaatcagtggagagatcagctccgcccctcccagctcctccacctcttctgccagcagcacaggatcaaggcccccgtgtaccggacagaccgagtgacgtttcaggataaggactacaccattgaggagatagaggctggcagactcccaaacccacacctgggcccagtggaggaacgcttagccctgcatgtccttcagcaacaaggcttggttcctgagcatgtggagtcacggcctctttatagtcctctgcagccagatatcgagcaggggaagctacagatgtggattgacatatttccaaaggtgctgggccggcctggacctcccttcaacatcaccccacggaaagctagaagctggatggtgggattcgaagaacacaagcagaagacagatgtgcactaccgctccctgggtggggagggcaatttcaactggaggttcgtgtttcccttcgactatctgcctgctgagcaagtctgtgctgttgccaagaaggatgccttctggagactcgacaagacagagagcaagatcccagcacgtgtggtcttccagatctgggacaatgacaaattctcttttgatgactttctgggctctctgcagctggatctcaaccgaatgcccaagccagccaagacggctgagaagtgctccttggaccagctggatgacaccttccacccagaatggtttgtgtccctttttgagcagaagacagtgaaaggatggtggccttgtgtgacagaggagggcgagaagaagatgttggcgggcaagctggaaatgaccttggagattgttgcagaaagtgaacatgaagagcggcctgctggccaaggtcgggatgaacccaacatgaatccgaagctagaggatccaaggcgccccgatacttctttcctgtggttcacctccccgtacaagaccatgaagttcatcttgtggcgacgcttccggtgtgccatcatcctcttcatcatcctcttcatcctcctgctcttcctgggtgtctttgtctacgccttcccgaactacgctgccatgaagctggtgaagccctttcgatgaagaagacatctgctctggagaagggggtgcaggctgcctcctggcccaggactagctgctcctccattgctctggggcctggtggtcttgcgcatgtccatggagttcttgggaatcacgttattttcatcttctctttctcccctaacccaacactcctctggataaactcttggctttctcagtataaagcagacagaaccagaaaatatattgctatgtgtctacagttc

SEQ ID NO: 65 - protein, 2013 aa, Mus musculus
AIAAAAQPAASGSKAKCRVIGKAGGGALNYNSMELEYNCGAMLRVFILFAENVHTPDSDISDAYCSAVFAETLKDSTRRWRRFLGEAKIPLQEVLATPSLSASFNAPLLDAKQQPTGASLVLQVSYTPPPGAVPLFPPPASLAPSPTLPDMDLVPDTGGEEDTEDQGLTGDEAEPFLDQSAAVGPGGPTTPRKPPSHPPPHYPGAKRKRSSAPPRKLLSDKPQDFQIRVQVIEGRQLPGVNIKPVVKVTAAGQTKRTRIQKGNSPLFNETLFFNVFDSPLELFDEPIFITMDVGTVYREPRHAYLRKWLLLSDPDDFSAGRYLKASLCVLGPGDEAPLDKKDPSEDKEDIEGNLLRPTGVRGAHFCLKLFRAEDLPQMDDAVMDNVKQIFGFDSNKKNLVDPFVEVSFAGKMLCSKIKTANPQWNQNITLPAMFPSMCEKMRIRVMDWDRLTHNDTVATTYLGMSKISATGGEIEVDDNLGFLPTFGPCYVNLYGSPREFTGFPDPYAELNTGKGEGVAYRGRVLLSLETKLVEHSEQKVEDLPADDILRVEKYLRRRKYSLFAAFYSATMLQDVDDAIQFEVSIGNYGNKFDTTCLPLASTTQYSRAVFDGCHYYYLPWGNVKPVVVLSSYWEDISHRIEIQNQLLRVADRLEANLEQVHLALKAQCSSEDVDALVAQLTDELLADCSQPLCDIHEIPSATHLDQYLLRLRTRHLSQIKEAALKLGHSELSTALEQAEDWLLHLRAEEPQNSLPDIIIWMLQGDKRVAYQRVPAHEVLFSRRGPSYCGRNCGKLQTIFLKYPMEGMPGARMPVQIRIKLWFGLSVDEKEFNQFAEGKLSVFAETYENQTKLALVGNWGTTGLTYPKFSDVTGKIKLPKDSFRPSAGWAWAGDWFVCPEKTLLHDADAGHLSFVEEVFENQTRLPGGQWIYMSDNYTDVNGEKVLPKDDIECPLGWKWEDEEWSTDLNRAVDEQGWEYSITIPPDRKPKHWVPVEKMYYTRRRWVRLRRRDLSQMEALKRVSQREHRQAEAEGEGWEYASLFGWKFHLEYRKTDAFRRRRWRRRMEPLEKTGPAAVFALEGALGGMVDDKSEDSMSVSTLSFGVNRPTISCIFDYGNRYHLRCYLYQARDLPAMDKDSFSDPYAIVSFLHQSQKTVVEKNTLNPTWDQTLIFYEIEIFGEPASIAEHPPCIVVELYDHDTYGADEFMGRCICQPSLERMPRLAWFPLTRGSQPAGELLAAFELIQREKPAIHHIPGFEMHETSRILDETEDTDLPYPPPQREANIYMVPQNIKPALQRTAIEILAWGLRNMKSYQMASISSPSLVVECGGQTVQSCVIRNLRKNPNFDVCTLFMEVMLPREDLYCPPIVVKVIDNRQFGRRPVVGQCTIRSLENFLCDPYSAESPSPQGGPDDVSLLSPGEDVLIDIDDKEPLIPVQEEEFIDWWSKFFASVGEREKCGSYLEKDFDTLKVYDTQLENVEAFGGLSDFCNTFKLYRGRTQEETDDPSVIGEFKGLFKIYPLPEDPAIPMPPRQFHQLAAQGPQECLVRIYIVRAFGLQPKDPNGKCDPYIKISIGKKSVSDQDNYIPCTLEPVFGKMFELTCTLPLEKDLKITLYDYDLLSKDEKIGETVIDLENRLLSKFGARCGLPQTYCVSGPNQWRDQLRPSQLLHLFCQQHRIKAPVYRTDRVTFQDKDYTIEEIEAGRLPNPHLGPVEERLALHVLQQQGLVPEHVESRPKPLQPDIEQGKLQMWIDIFPKVLGRPGPPFNITPRKARSWMVGFEEHKQKTDVHYRSLGGEGNFNWRFVFPFDYLPAEQVCAVAKKDAFWRLDKTESKIPARVVFQIWDNDKFSFDDFLGSLQLDLNRMPKPAKTAEKCSLDQLDDTFHPEWFVSLFEQKTVKGWWPCVTEEGEKKMLAGKLEMTLEIVAESEHEERPAGQGRDEPNMNPKLEDPRRPDTSFLWFTSPYKTMKFILWRRFRCAIILFIILFILLLFLGVFVYAFPNYAAMKLVKPFR

SEQ ID NO: 66 - DNA, 252907 bp, Homo sapiens
ttgcaacctgctatgaatctataattatttcaaaagaaaaagttaaaataattggattctgggattgggttggtcatatattcaaggagtgcatcgataacctctttgccaggggtgagtgggacatagtaatctgtgatatgcagtgtcatcacagttattcagattattgccaatggcatcatggaatgaagtgcaggtagaggacaaggccttgagagatgaagtgtctgaggcacttaagtcagtatgacaacaataatgattattaaaactgaggccacctgtttcttatagccctcttgagcatattttgggaataggagaaataaaagttaagagcatacaattaagacaggcatggagaaccagaaggcctccatggtagctttgaaggagtcccttatctcttggaatcacagagcaggtaagggtgaggagcctctggtagacacattcttctaccacctacctggtaacaggttgactatattcagtctcttgtcatggagggtacaatgctttgtcctcacgggatatattatggatatggatttgccttccctgaactcagggcttctgatggcacactgtagattttatggatggacttctccatcaccatggaataccatccaacttcattttaacaaggagatgcatttttttggtaaatgggcatgtgggcaatgggcccatgcgtgcagacttgacaaattttaccatacggtccatcacccagaagcagctggctttttaggtggcatgacctgctaaagactggttatggcacaagttggagacagcgttgttgcgggaagtcagggaccctgaaccgaggaaccagctggagccacagcagaggaacataaattgtgaagatttcatggacatttatcagttcccaaaattaatacttttataatttcttaaacctgtctttactacagtctctgaacataaattgtgaagatctcatggacatttatcagttaccaaataatagtcttataatttcctatgcctgtctttactctcctaatcctgttaccttcgtaagctgagaatgtatgtcacctcaggaccactattgtacaaattgattgtagaacgtgtgtttgagcaatatgaaatctgattgtaaaacatgggtgtttgaacaatatgaaatcaatgcaccttgaaaacaaacaataacagcgattttaaggaacaagggaagacaaccataaggtctgctgactgcctgtggggttgggcagaatagagccgtatttttcttcttgcagagagcctgtaaatgcgtgtgcaagtaggagagagatcgctaaattcttctcctagcaaggaatactaaatatcaagaccctaggaaaaaaattgcattccttgggggggaggtgtataaacggccgctctgggagtgtctgtctgatgcagttgagaaaaggactgaaatacgccctggtctcctgcagtaccctcaggcttattagggtgggggaaaaaatcccgccctggtgaatttgaggtcagaccggttctctgctctcgaaccctgtttgctgttgtttaagatgtttatcaagacaatacatgcacagcccaacatagaccctcatcagtaattctaattttgcccttgtcttgtgatctttgccttgccctttgccttgtgatctttattggcctcagaagcatgtgaactttggtctccttttttgccctttgaagcatgtgatctttgtgacctaatccctgtttgtacaccccttcccgttttgaaatccctaataaaaacttgctggttttgcggctcagggggcatcatggtcctaccgatatgtgatgtcacccccagaggcccagctgtaaaattcctctctttgtactcttttatttctcagctggctaacacttagggaaaatagaacctacgttgaaatattggaggcgggttcccccgatacagcatcctaagaaatgtagctgttatcctatggaaactttatgtgccttaaaacagaggccaacaatgtggtgctagctctcccatggctagaacttaagggtttaggaaccaagaagtagaggtgagagtgccccctctccctattagacctactgacccacttgtaggattttagttcccatctctgtgatcttggcctcagtattttggaagcccaagtgctcaagagaggaattcatataccaggaaataagaacgtgactctaatgaactgggagctgagactgccctctcacctttcggagttcctcatgccaataaaccaataggaaaaggatcactgtgcctaatgggaatgatctgtttaccagggggaaattgaattgctgctacacagtggggacaagaagaactgttcagaacccaggaaattcatgggagcgccccttaggtctctcctgccctatagtcctggtcaatggaaaactgacaatccagtaaagataatcccaccaaggactccagtctgcctagccttcatgctggcagagggtgagagaaacataagtggaaagatttaactcagattcccgacataggccttgccaccagctacagaagtggagactacagcagccttgtgtggtgattgttgtttttaatctcgttcccctccattatatgctggatgacacaaactcaggatgctctgacaagtacccaccctaaaactactgaggagggttgaatatgggtaaagattgacctcagagcctaggctataggcttgaaggggatcacactggaggggaaggtattcttaaatgtcagggatgtcagtaggatctgatttctggatcagacgactgggtaatgattgggcaaaggagcacggctactgtgaacgactggctgagtatgaaagactgtaccctgctttatccggtagtctcagcaggacctttataaagctcagttctgtttttctcaagtggaataatgaagaacctcaagaagtgttcctcagctggccctataaaaagaaagctcttaggaaggccagggatttgctaatgtcaaggaattaagtgggttccctgagttctggggagcctggttaatagggcatgttgtggaaagacagagccccaccaaagtggcaggatttgagccttgaaaactttacatggctctggcagcattcatcccaaagatgattatccccaggtttcctgctgcatctgcttctccaacaagttcttccttgttggtcaggattaggttctaagagatcccttctctcaattcatcttcttagagatggaattgtccctaaaataagtcgacattaccagatgcatatctttgagctaatgtaacttccccaagtgtccagagagtggaagtctctcaccacctcggcttgcccatgcacctccattgatcatactcttcagattatctctcctttcatcctcaactagagcctatcttgcatgagtcttggtaaggatttccatgcaggcatatgtcttcttgatctgcagaactctcttctccctggtagtaactcttctttgaacaagaagtatctttcaccatttcaatacctctgttgttcaaacctcaaatgattccaacattttatagatatcagagatcataaacattatttgtggcttcatttctaaagttttaatcctatgaaatactagtcacacattccaataatagtaatattagctaatatttagcaccataatgtatgtaaagcatttcttttatgaggcaggtatttctatagttctcatattacagataaagaaaccaagccgcgaaggtaagatcacttgcccaaggccatacggctagtaggtaaagaaagctaagatgtgaatccaggtagtctgactctagcgtcatccttttacactactgtcattgttcttgtcttgtcctactggtcttacagttcttagctgaatattatctttcccactgtcttccccctgcctcccgagtcccccttttttcacttaaagccagttttcagacagtcttctcaatcattgtgaaatgtactccatccaaattcaagagtgtattaatctggcattttaggttatgatccaaagagccaaagtctgttctttgacacaacctaagtcagtggttcctggtttttggtctgcataaaaataagagaacttttaaaagccagattcctgggccattcccagagattttgattgagtaggtctgggagtggagggggacccagatgtctccattttttacaagaagattctgatgcaggagatgtttagattgatagtactttaagaaacactaggccagtcacagtggctcacatctgtaatcccagcacttgagaggctgaggcaggattgcttgaacccaggagttcaagaccagcctgggcaacgtggcaaaacactgtctctgtaaaaaaacaacaacaacagcaaaacacataagtcaaatattcacttctcttggtgccccttttccaaagtcctggccatcagccaagggggaaacaaagtgagacatttgttgccctcttaactcctaaagatgttctttaggccttttctggtgatatcttcccatgaatcaacaggagtcctttggtgtatgagcttcagaaagctttctggcccctctctgccctgagacatgcaatagggacacccaaacctgctccttttgcctgcatcagctctgcctgtgccttcattttgcaccctactcgggaaccagccatcagcagcacctgactcttctcactgctggggcctataacaggtttcctcacatttgctaggattgctgcatcctgggatgttgtggcctcttccagaagatgagataaccccactttggaaagaagtcgaactcctgttctgttcctcactcttatcaccctggtttggatctccctcacttctcagaggccttctatgtgtgtattactcagggttctccagagaaacaaccaataggaggtgtgtgtgtagagagagagtaaaatggagtagaaacagtaaataaatatctgttacgagatttgactcatgctattatggaagccaagaagtcctacaatatgccatcttcatattggagaatcagaaaagaccacacgttgggaatggaggtggggggggcccaccaggagctcagctgtgatgtccgagagcaggagatgaatgtccagctcaagaagaaagagtggctcttctaacaatcgctgtgtgtggaggctttccttcgtgctgtctagagactcctcaccctctggactaaatccaaaaggaggactgtgcacacagactgacctgttcacattagtcccagagctgcgctcttgcagctcagcagataggccgctcttcactccctgctcaagaggagtgagggctttcagaagcccctgcaccttcatgctgagctcactcctttccattgtatcagcagccatgcctgaacaaaaaatagtttctatttattgagtgtttactgtttattatggtagattcttgggaaattgaaactctctgacactaccattagtttttcttcttaggggaagcagatgaaatgaccaggctgttaccagggtctatggtccttagcaagctttgcaaagatctgtggtttttacagaagacagagaacatagaaataatgtagtgtgttcacattacctctttggcgaaaaacctgttgttgttgtttttctattttctgttggaaaatagtatcaaacttgtcccttagtttctcagtgaaattggagagccacctccctccctttcgtttctgtcctgaaacagtaaagtagtaaaagtggcctgaaaaccacccctctttaacagtggttggttgtgttgacaaagccttggtgtactcgtttcctgtggctgctctaaccaattgtcacaaccatggtggcttaaaaacaacaaatttattctcacagttttggaggccagaaattcaagatcaaagtgtcatcagggccacaagaacttgttcttttatagcaagaaacagaactgtgcttcatgctcaggagttggatgttgcagtgagctattttgccaccgcactccagcctggggacagagggagacgtctctaaaaaaattaaaaataaaaagaattgcatttcaagttaacctaagtaaaatgtgcagcgactcactataaagacactgggcatgttggtctggatccctggctgctagctacagcagccaagcctggatatctgaagcaagagaggatttcagaagagctttgggggctaacagaatggagggaggttggagaacttggctttggttatggacaggactcgcacagcaggcgccctacctggtcatttgctgtcacacggcagctgccatgtctgacttcctgaagctcaagaacttgtttcaagtcttgggagagagcatccaactgtctgagcctaggccacactgcccagtgacacagagtgggaggccctatctctaaagcttccagaaaaaaggcaggcacttctgcccaccaagaggggtgggaaaaggatgttttaggaagagggagattaaaagctggaagccaaaaatggcaaatatccaccacaaggactatctcagcactcacaggcagggagactcaaggaatgagagccaggaacaacaaccagaagggtctctttctggatcttgttttccccacctcaccccctacacgtgatctctttttctctgactgcgaaactttctccacttcatgtgcggggccccttctgagcctcccattttattcatctcagctccagccacacagaagctagcttctctcagtcccaattccacgtttttgggagagagaatgtgattgattcaggttgggtagtctcagagaaagtgattcttttaaatagagaagataccccaaacatgtcctacaatttgggggcagacatgctcactagaggtttatttctgcacagactgggctgtgcagaaaaagtttgaagacagccttctgtatgaataaagtagtgaagttgtgaggaaggtgtttaacctatacagaaaactggctcttttcttttttttttttttttttcctgagatggagtcttgctctgtcgcccaggctggagtgcagtggcatgatcttggctcactgcaagctccacctcccaggttcacaccattctcctggctcagcctcccgagtagctgggactacaggcgcccgccaccatggggtttcaccatgttagccaggatggtctcgatctcctgaccttgtgatccacccgtctcggcctcccaaagtgctgggattacaggcgtgagccactgcacccagccaaactggctcttttcaaatcactgtagccacaccatatttgcaagcagctagctgcttcttaggtccaattttagctctgccacagagcaggttcatgttactttatacatctgaatagagccaaactgtacttctttaaaaatagaccataatttgggctttccctacatcaacagggcctcctgcccttcttcccaaagcaattaaattttactccctccttgctatctttctgtaaaatttgaatctgaaaaatgcttgccacagacaaggtaccaataaatgttggtaaatgaatgaatgactgagtcaatcaatcagttgctacatccgagccaaaactgttttctccagcaacacataatggccaagttctgtaatgggaaacttgattgcttcatctgctcttgcagaatttcctttcttcctcctagctttgccttactttgcgccatcccccttttcacaaccttggtccaagtcaccatcaactctcactctgaccctctgctgtagcttttaactcttcacttccactctgatcccttgcactgtattctccaaaggcagcccaagggagcttttgagaagtaaatcagatcctgccactcctctggacttagcaggcctcaggcagcttcccccaggccctgcatggtgccctccagcctgcctgccccattccacaaccccttaatctacactcctctcctcccatggccttgacagagcgcttccttctttctctctggaatactctcttccttgcccccacctcagtcctgcccagtgaactcctagctgaccttcagatctcatctcaaatagctcttactgtcctgggcacgcgatgaggactccctgctctctgttctcacactcccacattttctgtcttttatggcacttacatatttgtaatggtatgtgactgacgtgattattccataagtgtcagtttccctcactgaagtggaagctctttgaggttagggactctacttgtttgctagggctgtcatagcaaaatactgcagactggggggcttaaataacaaaaatttatttctcacacttctggaggctggaagtccaagatcaaggtgtagtcagcaggcttggtttcttctgaggcctctcttcttggcttgcagatggccgccttttccctgtgcccttcacatggccttttctctgcgtgcatgcatccctggtttgtctgtatctaaatttcctctttttataagggcactggtcagattggatgaccctaatgacctcactttaacttgttcacctctttaaaggtgctatctctaagtagaatcacattccaaggtactggaagttgcctttcacatagaaatttcgagaggacctaattcagcccataacacagactgtgtcacttgtgcccaccactgtgtccccacccaggacagtgcctgacttattttaggacttgacacactcccattaaatgaatgattgcatttcagctccccccttcctcttcctcttcctctccccaccccccaccatacgttgtgctaaaggcaaagaaaagaaggcatagaccactacagaaggaccctaagtgaccacaggaaatgtttgctaccctaatcttgaaattacagacctttttttggggagtgttgctctcttctagtatctccctatggggaaaaaaatcagccacctgtcagcggccagcccatcctgccctgggtgtgtctactgcccccaggggctgctgtgggagttttgctgacagctgcacacccatccaactggccctctttagagggtgagtcaacaggctgccgggagtgtggatctatctgcaggaaggcagtttagcaataggtactagaacctaaaaaaaagtcatatcctgtgaccttacaatctaatctgaagaactgggtggggggagggggagggctaagatgagtttatatcttttttattaaaaagaaactccctttctcactattatagtagaatctggggagagcctaaatgtgaaacaagagaaagtttgtgaatctagtacattcatatgacagacaattatatagctattgaaaatagtgtttatgaataattgtttaatgatgtaagatgttacatgaaaacgtgggacacagactgcattctacactcagatatataataaatactgcaatttacatgtgtgtatacattcagaggagaaagcctgggctgccaaatacccaaatgttaatatactattttttcagaaccagagatttctttctttatgctttttgttttaaaatggcatgtgttgcttttaaagccagaaaaagggggcaaagtttttaaggcagctgccttgcttgtcaatgaaattctcaactccaggcttctcttagggaaagaggcctccccaggatcccccgtcctaccccgggcggtcgggttgagttctggagagactgctccaatccccgaggcggaaggaggcaaccgatttggcgcagcactcagccagggggtagaagctcaggggaggagccgagcctttctcctgtccaagagcgagatctgggctacgccgggcgcccggagccctagtccagcccccggccatcgcggccgccgcccagccaggtgcaaaatgccgtgtcattgggagactccgcagccggagcattagattacagctcgacggagctcgggaagggcggcgggggtggaagatgagcagaagcccctgttctcggaacgccggctgacaagcggggtgagcgcagccggggcggggacccagcctagcccactggagcagccgggggtggcccgttcccctttaagagcaactgctctaagccaggagccagagattcgagccggcctcgcccagccagccctctccagcgaggggacccacaagcggcgcctcggccctcccgacctttccgagccctctttgcgccctgggcgcacggggccctacacgcgccaagcatgctgagggtcttcatcctctatgccgagaacgtccacacacccgacaccgacatcagcgatgcctactgctccgcggtgtttgcaggtaggaggggccgaccaccctcgcccggggtcggggtggggtagaggaggggacgccgcggctctcaaccctggagagcacctagagctgagagacaggagactttctggccccgccagactgacgttgagtgttgcaacgacacaggtctgcagagggcgactcagagggaaactgaggctggaaggagagaggtgtctgaatggcgcttctcctggaagcttcagcccaggttggtactgaggtaggccaggaaggtgggaccagcatctctcctctcaccttttcgggatctctgaaaagaggtctttctgcgttgccggcggcgaagcgctgtactgcagggctctcctccttctcccctgaaggtctggtcccaggcctatttataacccagctctcttcccgccccgatctgcgcctggctgctttcctggccctttgctctctctcagaggctggcctggcaggctggcagccactggaggcgaaggcaccctacccttgctttgcgcacaggatgggggaaatttagcagctgggcacagctgtcacagcaccaacctttacagactttctctgcccccaacccctgcccccaacggaccagtgggtggagggagcgggggtcgtatctgctttctatcatcagagtgaggcctccttgagcagggaagccactcccttatcagattgggacctcctataggagggccttcatagagttatgacttgacttttcctccaggagctgagggctgggccctggctgctctccaggaacccttcaggaccaagccagagctaggatctacacagctgggtctttgggcttggaaccatactgggggagaagaactagggggaaagagtgtgaacctcccacccagcctgtgggttttcctctcagcctccactacctgccactccccttctccccagagatctgacctctaactacatcccagacttccagaaatcatagcattagttggtttctggccattcagcacagtttcacaagctcctggatacacctgttcacagacaccatctgcacatatgatcccaggcacatgcacaccctggagcgtgtgggacacctgtgatgttccaaggaataaaagctccgaaagcacaggcctgtgtccagctcagcatgagcaagggatcatgtcatgagtaccttctcttgggtatgagattcagggcttctggatttgttggaccagagcagagcttgaggaggagttgctgaatggtcctgaggcctggaaagcagtgtacaccaagagtggggaccaagggggtggctgtggcactccagctgtgctttttttcctaacgtgctgctttgatctgctctcaatcagtttcccacgtggcctccggaaatgagctttatccaggtgtttccagcagggaggacatgggagtctttcatgcttcctctccgcatcctcagctctgggcaggccaggtcagtggccctgttcagcagcctggctgagggctctgggctcctggtgcacaactccagggggcaccattcatactgtaaatagccccttggcggaggggagggaggacaggcactctgtgggtgaagcagcctcctcccacgccagcacctcttccccatttatagcccctgaacctgggggctggtgctccaaatgtacactcagctgcagcagcccctgctgtcaggggctttgtttctggcttccactcagcctgaaccagattttcttccaccttccctgaccacatgccccctctgcacccccatacactcaatacactaggcttctacctcatggtccctcacccaggctaggctcagacctctggttggagaaaggaaagaatgaataataaatggcaggcactttctaaccccagaagtgcaggaagtgctgctggtgtggcttttcttttgttatttcagccccaagggcctgtgtgtggagcagctccccccatcctgcatcctcccatttacacatccctggctgaatcctctccccacccccatctgctttttgcctgctgcctggctcttcggggtaggctccccctttccagggcccagagcacacagctcaccttggggaaaggaagtacattttctgtgccaatccgtcatgagcccctgagcctaggaagagactggctggagcccccacccctggtcatcactgaaaccgccaggcagtcctggggaatgcagtccctcccctcccccagcccctggccacatttcacgtcctgcattagccaagctcctaacccatgtccaaatttggcctccctgtgacattcaggcctgctcgctctccttctccctggcagggtcagcttggtgaatgattacacagaagacttcggtctcagggatgcagctcaaagcaaaacaccagtctgggaagccttccctccccagctgggctgggtctgctcttcccagactctatctgttgtcccataaagcccctcctttggttacatgattataataccctgtagccacacttcacagcccctttgtgcatgtatacattcattgcaagctcacagaagctttgtgaggtagagggcaaagatattatccccccttaaagataaggatattggcccagagaagtgaaggagcctggccaaggtcacatagtggccacagcatccccacccccaacccctcatcagtgccctctgttgttctcagtatccttggtgcatgaataagaaagtgctctggagagcataccatatgctgcccacacccagggcaccagggcactcggacctgagccagccagggagggtggtgcctggggtccccagcaagaagctgagtcagagtagggggagtgcagggctgcaggagcatggtgtgaaacaattgaccaaaagatggaggattctggggtttcaaatgcgtgttcctcacaaacagagggaatggacatttgctaagcacaaaagcataccattgtcaggtggtgtttcttgaaaatcccaccaacagtcctatgaaagagatctatttaactgacaccatgcttattttaaggcagatactgttctaactagaacattaatagaagctacatcatgacccggttataatttgtaccaggtccttatatgtagacatatacacctcagtcctcttagcaagcatatgtggtagcaactgtcatcactcccattctacagataaggaaactgaggcatgaagaggttaagtaagttgcctgaggttatacactggtaagtagtggggttatgatttgagtctaagtatctggctcctgagcccccacaatatccccagctttaaccactctgctatctacctctggctttagcttggatttaccaaagacaagcaagaaaaggtggaggggcaggacctgaacccaggcctggctgagaccctgatgcccccctcggtctgcaccttgactcctctcatcacgtgcgtggtccttactgctgcttgctcacccaagcacagacatcctcagcccttatgttctggtcttgcagatgctttcttatctcagggggtccttgctctctgcctcaccctctctatatctgataggaccaatcagtcaccagttgatgcaggacgctccctccaggcagtgctctcgttccgggcaagctcacagctctgacaggactatggtggctgcctagggtctgataagccaaggccagggcaatggtcacatggcactgaggtgggcaacctgtggtgcgtatggcaggtgctccgggacttccagggagggggtcatgtaactgtagatctcaagcttagccagtctaggagaaagtgaaagttgggcggggggctcagaagagcggctagctggcagcctgagtcacagtccagtgggataacagcatcgaacaagagggagagaaggactgcctgcatcttgaactcgggatcccaggtctgccacttttcaagctatgtggctttgggcaagttacttaaccactctgtgtcagtttccttatctgtaaagtgttgataacaatagcttgtacctgctttggatgaatcattctggagagtttatgtgttagtccatataaagcacttcaaacagccaggcaagcaataaatgttaactataataattattacatatacttttacataaatttattataatcattactattaacatatattgtacatgtactaagaaataattgtacacatccacaaaggctttcaatgtcttttttgcttggtgaattctatcctcagctttgtttctccatccactgtcctgccaggctggacacaacaggccaagtggtgggtggccgtctgtctgcccccagggacactgggcctgtcttctctggctgcccctcctagagcagtcccttctgaggcgaagtcatttggccacctgcctgatggctggcagtggccctcactggggtactttctctttctgggaacaagtattcctctggtgactcactagcagcccacaaacctcttcagtccctctccccaggccaaactcactttctttctctacttcctgcatgctagtctctttccagattggtccactagcatgggatgttagcagagagagcgttcacatctactgtggatgtgctgtgccccaagcactgtgctggagttgctagtgttttgtttaatcctcccaacaccgctgcaaactgtcctcattcttttgattgcacagaagtggaaacagacactgaaaggtccaatcacatgcctcaggtcacaccactaggaaagggtggcctgggacagaagcccaggactgtctgattgtttccactatgcacgatttctcccctgacaggccctaatcatggctgtggtcagaaccaggactgcatgtgggttctaccctcttgctggatacacaggtcccctgtcaattccacctggtggactgggatatccgccggacacatattcttaaatgaatgtgaagggagagggaagaaggcctcatctatacttccggaagcctttggacattgacaaatatgccctgaaggagtcctgtcaactcatgtagaatgttcctctaaaggtcagtgtcactgagcagagaggcaaggtttgtttgcctcctggcaccccatgtttaagtcttgggaaacacaaaggaccagctaacattaggagaatgtggccagaggagaactggcccaactccagcagcaagagatgattagaagcatgccttcctcgatggtcaggaaggtagggccacaaataagtagtgacaggggtcacaaactcatgcacttccagaaacgtggcaggtggactaagatcaagctggaggggaaatcctatgtgcatactgggagtgagctgagggggggacacctggtctacaggtgccagacggtcagtgttaggtggaaaatctaggcccaggtgccacattctctgatttttttcaagagaagctgtaaatccagatttatacggaaaagtcttctaatatttaaggtacaattttgttataaaacattgtactgattaaagacaacatgtctgtgggctggatgtgtcccagagaacaccagtgaccgcttctgagacacagtatttcattcaatcctggagaccttgggcctgggctctctggagggcagagagccagtgtcctctcccttgggctcatcaggcagcacctgtcatcagtgactacaggatggagtgagtgggagagctttagtccccttcccccttaacctctgtcagccccgaaacactgcaataagcatgaaactcagtttccaaacaggcccctcaagcccttccttccaggctatggctcctaagctggccccatcacctttacagtggggctggagtagcctggggtcccgaggagctgccctcacctgaagcctcaggtgggatgcagatctagctatttgtaaacaagccctaactaacattggtataagcatgatggtctctccactcacataatagttgaatgtagacagtcctgactggtaagactctgacccacaggctgtccaggaccccagctcctcctgttttattgctctgttatccccagaagttccctttgacaacgtggtccatgatggcgcacgcctctgtctatattccagccagaggggaaagggggccggggaggcgtgccgcttccctttaaggacatatccaggcagttatatacagcccttctgctcatattctgttggtcatcaattagtctcctggctacattcagctatgagggaggctgggaaatgtttttatttgggtgaccatgtacccaagtaaagtgctgtggaaaatttctgtggatgaaggggagaacatatactgggaggtggaggtcaggtctcagccacactctccattagaacttaattcctgataatgtcccctcgggaggaagccctattgagttactaggcctcagtatgaagtctgcaagggaacagtcagttatctgattagggagaagtccaggtcagtgaacatcagccagactaggaagttggaggctgggatgaaaaggaggcctcaggaagtgtccaggggtcagatcaccagcagttgcttttctgatttgcagaacagatgtggggagacccttttccttggatgcaagccaagggaaggcagaagtcccttggaatgttcctatggaggtattagttataccccctacagatttccatttcctgtggtgactctgaaggactggagctggggtagggtggggtatgataggggcaaaagcaaagccaggaatcattgtgatagacaggaaaaaaaaaaaaaaaagaaaaagaaaaagaaaaaaagctttgtaatatccaaaaatccctctaggggacagtactatcccctttgagaaccactggctgaactcaccagtgggcagaacccacacccgggagccacgtgcagtgtccactataccaatgccaggccagtcctgtactacacgctgggaatacctgggtcactaagacagacttggtctctcccctcgttgaccaactccacagtctagctagacacgaaacgggtgattacgctaatagttattcctgaccattgtgatgcgtgctaagaaggaaaagggctgctgtgcagtcatttgccagagggacccgtctagaccccaggatatcagggactgctttcctggagaggtgatctttaagctgaggcctgaagtatgaataggtggttctgcaaagaaagagaagaaggcagctggaggcagagagaacagcggacctcagagctgagagggagcttggcatattctagaaactgacgaggcaccggagctagagctaggagagcgagaggtggaatggccttgccctttggcccgaggaaatgaatctgggcttcatcccaagagcacaggaggcctttggataaacctcccaagaggcttttagcaggagattgacctgatcatatttaagatcacctggctgcagtgtggataatgggtcagacatagccagagtgatgatgtgatgaggcgactgaccagctaggaggcacctgcagtggcctgggcaggagagggtggtggtaagacttggtggagtcacttggatgctgtgggcacacagatggtaccaaagtcacaggggtcagtaaggatgatttaggctgcaagcaactgaaatcctggcttaaatagacttaaatgagcagagaggcaaggtttgtttgcctcctggacaccccatgtttaagccttgggaaaatcaatttattaaatgctaagtagtcttaaggggatcagctcacttaactggtgtccagagacccagtgagctctgggcatatagactatacaactctgtcacaggatcctaagggtgttgctttttccagctggaaacctctgtggctggtagcacctttgcctgaattttgcttgggcccactgggctccttctgcccactcagcctggcaggctgtgctcagctctcagtaccagccctgatcccacgcctgcgaagggcgagccaggcactgaacagcaaggggtgtgtgagtgagtgcagggtccagccactgcgcacagccaggcatgccagctgtggtggggcaggcagctccaggtgctggtacaggcactggctctgtgccaggctgcggctgggccaggcatactggaaggggcttccactgtggctactggggaatgtggtggtgcccagaagcttggaggcaccaggaactgcagagccccaaagagggtgtcacagccatgtcacccctaggtctgggctccccaaagtgctgaagctttatctcgttctcgttgcctgcaacatggcgagcagggttggggtggggggcaggctgtttcagccttgtttgtcttacagctctttcagtcctgctgttcagtgggtcctgggtccttgtcctatgtccaggaagaataggtacacagacaactggatggtgagcaaggtggagagagcttcactgagtgacagaacagctctcaggaaacccgaagtgggtagttcctttctgcaggcaggtcctcctgataagtgtctagctttcagcagagaggagacccacatagggtagctcgtcaccgcaggcaggtcttcccgacaagtggaggagacctgacctggagtgggtagttccttcctgtacctggtagtcccaacatctgtctgagtctagctgagtcctgggattttatgggctcagaagggaggaagtgtgtgctgtttggtccatgggtgaccaggagcaggctgggggaaaaagcaccataagttctcactctgggctgaggactccacctggaactggcagcccagcccccaggcttcaggccatccctggcttgtaggtggggtttcactgaggacccacccctttctgcccaggagcctgtctgcctcctgctgccatcaacatgtcgtctagggcacctaggctgttcatgcagaggggtgcttgcagttccaggtggagctacccctcagcttccctcctgagcttgtcagtgctcaaagtctggagggggttgaggcagcagggggctggcatctcagtgccaccacaagtgtgcacacatctggctgggttgcaacagcatgtgggcttggacacaactttgctccaccctggagtgggtgactggagttgggagaggccagagatggggcgaaggcacttctgagcctgcaagcttcctgggccccagagagtgcagggatgcctggatctggggccgcagccaaacggctgcagctgtgcctgggagcttggggctcccaccccaccaacttggtagggggcggggctcccacctgttcccagcccccaccggctctgcagagtgcacaacactggccagactctccactgcagcccacgtcttggcagtggccactccagatgggccgctgctgccagcaactccatagtatcatcctgtacccaggcaggctccatgtttctctctgatctgctgtccatgatgtctgctatgtcctcaactggtcagcaattggatctgcaagcttccttatgcacacaaagcaggagagggagttgggcttctctattcatggcatataaatctgtctttccaggggaacaacttaggacacatacctctagctagaccaatagccgttgccaagaaatatgctcagatagagtgggatccatcctggagctggggctgcataactgagcagtcaggttctgctagaagggaagggggtctggatggatgttgagggaatcaaatgtccgcctcatcttgaggggagaagagaagggtagagctgggaggaagcagcaagggtccaagcagctagagaaggcgttgtgatgagaacaggctcagactctcctctctttccttttccccacccccatgctcatcctagctctgtcctttaccgaccttccacttcttgggagctgtagatgtggttgccaccctctgtggtctctaccccttgactggaagctccctgagggcagggatgtgacttattcccagcaagtcagaggtgatgggtgaatgtttattctttcagtccatcatttagaaagaatttatggagaccatgctttgcaccaggtgctgtttcaggcactgaggaaacagcagtggacaaaacagacaaaaacccctggctccttggagcagacattctgatggggaagacagaaaacaattaagacacatgtgctatacagtgattggtgctagagaagaagcctgaaagggagatgaaagagggaaagttgtggtgttcagttgtgtggccgggttggtctcactggagttgatatctgaaggaaaggaagacatgccagccagagggaacagctgacagagaccctggggaggcgctggtctggcctgtctggggaacagctggaaggctagcatgggtcctggggaggtcagagaggtcagccagggctttcaaggtcacgtaaggggagagtggctggagaggaggtcagcgaggtcagccagggctttcaaggtcacgtaaggcctttgagttttgcactgagtgagatgggagccaacggaagactttgagtagaaccaggtcatgagaattgaattgaggatagaccatggggacaagggcagagcaggagacgcattgggagtccatggagtcgattaaatgactcaggcaagggatgacaggcttccactgggggcagttacaatggagatggtgagatatggtgggattttggacatattttgaaggagagtgggagggggatttgcagttttggtgacctggtggggttgaaggtgtcactgggtgggttcaagagagaatggaggagggagattggagacagaaagtatggagagctccttcaaagggcattgttgtgaaaagggagaaatgaccagtagctgaaggggatgtggggtcaacggtgtgctttcttgagagcaataacatcatgcttgtgtgccgatgggatgatccggtaaacaggggaacttggtaaggcaagagagtgagagaatcactgcaggctcaccactgaatgggcgagaggggatggggtctatgcccaagtgtccagttgttaccagtggggagtacgggtgattcatttgtaggaacaggagagaactcacaggatttgggcacagatgccgagggcgggcgttagaaggagactggggacctgaagaagttctctgctccgtaaagaggaagcaaactgagagtgaggttgggcgatggggtgtcctaggggcatccgggagacagggagacaagacatatagtatgattgcccccagcagtgagggctcgcttgagttaagggtcatgactacaaaaggcaccactcaggccggctgtgttactctccaacacagcactggttgggggcaggtgtggaggaggcggagttggattcgccagggttatggcttagccctgtgagaatgctgtatccctcaaaataagagaggggaaagggagttgagattttgcgcagcagtgcgtttaggctgagtgagcaggttggttagtgaggacttgggcggtgggaagacggacagtgccctgacaggggctaggtgctggagtgctgggggatagaagtgcgaagccagggcccctgtgtcaagaagttcatacgctggaaaggaaccagacataataagcgaaacgactgtcaccgttcatggcttacaccttgaacagctttccactgtggagactagggagtgtagagattgttggggatgggggacttgcaggggacagaatgggccgcagctggaccctagttctccagggaacgcagtatgatttgaatacagatctctgcctccagagatgagtgactcgacaccgctgcggagaaggctccgaggagggttggtggggactcgaacctcggagtctctcccgacccgggggtcccagcaaaccagaacggccacctagacagcctgcggacgggagaggaccggctccctggcgcagatcatggggcaggtggagagaggcgagaggcaatgaggcggggggctcggggtgcacggcacgctccgcacactcccccttcagcgctcactcagacttggtttccccgaagacacactctcgtccccgccgctgattgcccactccttccgcctgcactcctgcctccttctcaccctttcgtcgagcgcacagggcggctgccaagtcggcaccggtgcgcaccgggcccgggatccctggctggtgtggagccttggtcaccggaggcccccgcggagcaggccccacggcgccttgtgcgctctcggaggccgagctgcgcgcccgcgtcagcggcgcctcgttcctggccgggagctgggacccgcggagctagggaccagcacccccacaggcgcccgtctgacccctgtccctccccgcccgccgcgggcagggcggatctgggtaggggccggagggggagggtccgcccagcgggtgtccggtgtcctccctgcagcctctcccaggcattggtcacttctccgcggaggagcagcgaaggcgacagctctcttggcgcggctgcctgggagccgggcgcttgctgggtgggtgctcgggcccggtgctcccgctcccgccctgactgcgcgcctgtgtgccgccggggctgcccagccatgctgtgctgcctgctggtgagggccagcaacctccccagtgcgaagaaggaccggcgcagcgaccctgtcgcaagcctgactttccgaggtgagagccccgtggctgccgcgcccatgctcgggtgctacccgactctcggcgctcactggcgggtctgaagcccctgctccggagctaaccctagtccaggccacagtttctccctttgtcagcagggacggaaatcccagccccgacttctgcaggggggcgatgaggaataagcagagcacaataaatgccacagggctttgaaaaattggaaaagcgaaagtgccgtaggtcagcggttatcacttttctaagactgacacccagaggaaataaagtccgagcttttactgggtagtggggataagggtaagttggaagatgggtgcagaaggtagagaggaatcagggcctctgaaaaacggggcgtgtagatgatgtgctttgaaagttgtgtcttttttcattcattcattcattcattcacccatctttatccaacattggctgtattgaatctgccccgtcttaatcagtaggaaaaggaacagaataggatggaaatggccttgacacaaggagttttgaggaatgtcaaggatattttctctaaattcaagaagctaagtccctacatgtagtgcttagaatacatacaggtatttctgtgtggggcagcagagaaatcacacacacactcctcttctcaccaggcgtcctgaaccccctcccccaacccctccaaggcagattcccactggagcgggtgtctcaggaggggaaagggaagaggaaggatctgtcaaaattaagagaaggaacaatagctgtgagtcaggaccccagttctgcagagaaagataaatcaggagaggaaagagggtttccacttagccaggagccataccctgtagctttgtggaatcgataataataataataaaaatctacgtatcagaaaagatagtcaaatgaagaaggaagagtagctggtgttttcataagcctccttcagtgcaggcaccaagggaactcttttcagtctgacccatgatctgaatcatatctccaagcacccccaagataatgatagatgaaagacattatttggcaaagggagatttatgtgtagcttttattctttgctgtgggacaagttatatgtattcctcttttgaaagatgtgatttgaaacgtttaagaaaatttcactattttcattgattggtgacatgcctgggagttcactatgcaagagcaacttcaagacaaagtctttccttctccagtgtccacctgatgctgcctaaggctttgctatgcagaaattgcggtgtcaccattggctggaaaagaaattccctaaggacactgggcagggcacacattagcatagggctctggatgctctaacactcgtttgggtctgctcacagctctttcccttgtcctgtaacagtcctgtggtggctaccaatgtctccattctgcaaataaggaaattgaaacccagggaagttaaatgtgttcaggtcagtggtcatggcagggagctaccagcgcttggagtgggtattgcccttgagtcgggaagatgaccaaatcccttgaggcccctctttactattgccctcgcccaagtaccccgaacacgtgcagctgctatctccccccagatctctgtattccttctttgtaatgccttactatttatttgcactgatgatctcctcggaaaacagaaataccatacaatagaatgtaacatctccaaccgtttcaagtctatttgtatttcaaagcccagggcaatgccaccttctccaggaggacaccctggatccccctggctctcaagagtctctcctctctggatgacaagcagcagcaccttgctagggatgctagcaccctcgccctgactggcctgtgctcagctccatgcttaggtgccttgagagcagtgacctgtcctatttgttcattggtttgtcccagtgctgagcacaagtaggtgctctctagtgtttgtgcgctttctggcccagcctctagccatcctccaggtgtgcctgggagcttcatttagtctgggacatggtccgctcacttgattgttcctgagaatcacttgtagaacgtgtttgagaaacagattccagagtccccatctgtagaggttccgatgcagcaggtctggaaggtgacctaagaatcagcacttaacaaatacccgatgcaggttattttggaaccgcatcttgggaaaaatgggtctgagatgtgatggcaggtgaaattaatgcgctccccattgcgggagcattcactggggagtttggggctgagttgatgcctaaggagggaaaccgttagaaccaggttcagaacttacagagcatgtaggctggggggactcaactctggctgcaggtcaacattgtgtgtgggagcttcaccaaagaccactgccaacctccctgcctgccttttctgaagccagatcccttccggtggggccccaggcataggtgttgtttctgtcaaatttccaggtgttttgaatgtgcagtcagggttgagaaccactgagcccagctcctcatggcacagatgggacagtggcctgcttgcagagaagccagcctgcactgtgtgtttggctcctacaggcagcctgaaatgtatggggctgggctggccccactttccttgcagttgttccctgtctcggatgtaatttcaggacctgcctcccaaaatagactatgagctctgggaggctggactctgagggcaattttttggcttccctgtctaagcacctctattaatagtagaggctactaatgaatacttctcattcttttgtttttctattaattaattcattaactaaaactaccatgagtaactgggccatagtagatatttttgactgattgtgtcaacgagcagcttaatttcctatagcatttaattgtctgtacttcttttctgccctgcccattttccattccttaatgtgattatttatatccctctattcatgcagttagttcattgaacaaatatttactgagtacctactacgtgcctggtgcttttctaggtgcttggatgcatacaagaacaaaaccagatccctactgctttaaagctgaaacatcttatttccttgaaggccagatctgctgcgtccccacttggtgaatttctgccctgtgtcatcagccaggaacccagaagtcattactgacacttccctctctctcatcctgtcagggcgtctcctcctccagcctccccctcccacctcttctcttcttgatctcctgggggtctctagatttggggcaggagttgggggatcttatagaactagttggaggtggattcctgtcgtcagggaacactcttaactcacctatgtagggaaagtgggctgaaggccccggactctctgaacctagctgtttacatattacaaatgacttaaaatattgaaaacagcggccaggcgtggtggctcacgcctgtaatcccagcaatttgggaggccaaggcgggtggatcatgaggtcaggagatcgagacaatcctggctaacatggtgaaaccctgtctctactaaaaatacaaaaaaaattagccgggtgtggtggtgggtgcctgtagtcccagctactcgggaggctgaggcaggagaatggcatgaacccgggagacggaggttgcagtgagccaagattgagccactgcactccagcctgggtgacagagtgagactccatctcaaaaaaaaaaaaaaaaaaaagaaaagagctttctcttctcttccttctttccttctttccttccttccttctttccttctttccttccttccttccttccttccttccttccttccttcattccttccttctttttttttttggaaatggactttcactcttattacccaggctggagtgcaatggcacgttgtcggctcattgcaaccgccgcctcccaggttcgagtgattctcctgcctcagcctcccgagtagctgggattacaggcacctgcaaccatgcctggctaatttttatttttatttttagtagagatggggtttcaccatgttgcccaggctggtctcaaactcctgacatcagtcaatccacccaccttggcctcccaaagtgcttggattacaggtgtcagccaccccgcctagcctgttttctttttataaacataatatgtacttgctgttaaaaatgacaaactacagaaaggccatgaggcaagagtaaaaaatagccccaaatcctgccactttgaattaacttgttaacaatttgacacatttcctccaagattttttttcttaaaaattttagttataaaatttaacatacaaggaaagtgcagaagatataaatatatgatttaatacagtagttctcaactgggggcagttttttcctcagatgacatttgccaatgtctggagacattttgggttgttgccacaggggttgggggcacagggtgtttatctacagggtagaggctgaggatgctgctagacattccacagtgcaaggggaggtcccccacaccaaccacagagtgattcagcccacatagtaatcatgccacggttgagaataaatatgtgtgtgaagagaataactatgtaatatcacccaggtcaaacaggtcaagaaatagcacctggccagccccatttctccaccagaagtaatcccatcatagattttttttttcccaaatgtttgcacatttgctgaaaaataaaccagggggccgggtgtggtggctcacgcctgtaatcccagcactttgggaggctgaggtgggcggattgcttgaggccaggagttccaggccagccaacagggtgaaaccctgtctctactgaaaaatacaaaaattagccaggcatggtggtgtgtgcctgtaatcccagctacttgaggggcagaggcacaagaatcgcttgaacccaggaggtggaggctgcagtgagccgagatctcaccactgctctccagcctggatgacagaatgagactcagtctcaaaaacatcaattaattaattaaaaaaaaatccagggtcattttttatgtcagtaagtattcttctataacacctttataaatatctgcgtaatattttcttatatggatgcaccatcattaatttactcaaccccctactgatgaatatttaggttatataagtgtttatatttatatccagtgcttaaattatacagtcactgtgaggcatattctggtgactacatctttggccacatatttaattatttcctttgggtaaataccagaagatgaattgctatgtcagaggttatagacagatttaatgcgttgctgcatttcccaaattgttcttgaagtctgtatcaactttatcctcctgtcagccaagtatgagggcttatttttctaataatcctgctaacacacagcattgtcctgtaaatctttgacactttctttcttttttttctttttgacagagtctcattctgtcgcccaggctggagtggagtggcgcgatctcggctcactgcaagctctgcctcccgggttcacgccattctcctgcctcagcctcccaagtagctgggactacaggcgtccaccaccacgccaggctaattttttgtatttttagtagagacggggtttcaccatgttagccaggatggtctggatctcctgacttcgtgatccacccgccttggcctcccaaagtgctgggattacaggcgtgagccaccgcgccaagccaacactttcttaaggttcaaatagtatttgtgatacttcattgttatcacctattcgtatttattcttactgaattactttttcatttgcccatggtggagcatgtttgtctttttcttcattagttgcaagtgctctttatgtattgagaatgttaccgtttttgtcatagatgtttctagtatcttctccagttctgtttgtttttctttaattggcaagtaaaaattatatgtaaatatcttccccagttctaatgtaaatatcttccccaggccttctgagtttaaagactactcttcttgaagtgcatttcaccctggctccctccctttttggccacttctgtggttccagctaggatttaggaaggtggggtggagggtggttgacggggagaggagcagtgctctgctgatgataggggagacagctgcccagttcttggggtgtccaggcctgagaacaccatggcagggcaggtgtcagaatgaccatctacctctgctttttgtttgggggtgtctgtaccaagaggtaatacaggccttccttcagcccacgctagggccatcttttctcctttcacttgctgctgcctttgggttttctgctgattctttgaatttctgtcactttcttggtcttatgtgtattctaatggggccgtcaagaaacgccctgcacaaagtaagccctcaataaatatctgggggataagcaagagtctgcatctaggctgctgcaggatccaaagccccctgcagcttctgagagtaactcctgttgcctgactcatgggcagatgcagctgtctctctgtctctctcactgggagtctgagacaccgcaactcctctccttctctctgtcccctctctaggagggacatccgagactgggagacatcttctgctcctcctgcttcccattcgccaagccgatactggccagtagacctcaggcccaccacctgtgtccattccatttcccacctggacttaaaaaaaattgtggtaaaatgcacataacatgaaatgtaccatcttagccatttttaagtatacagttctgtggcattaatcattgtgcagttatcaccatctccagaacttgtcatcctccccagctgaaactctatacccattgaacactaactccctattcccctccctcaccgcccctggtaattgcagttctactttctgtatgatttttttttttttttttttttttttgagacagagcttttctcttgttgcccaggctggagagcaatggtgtgatcttggctcaccacaacctctgcctcccgggttcgagtgattctcttccctcagcctcccgagtagctgggattacaggcatgtgccaccacgcctggctaattttgtatttttagtagagacagggtttctccatgttggtcaggctggtctggaactcctgacctcaggtgatccacccgcatccacctcccaaagtgctgggattacaggcgtgagcaaccatgcccagccgattttgactaccctaggtacctcatataaatggaatcacacactatttgtctttttgtaactggctgagtcactcagtctagaggaaccctcagggtttcatcatgaatcttacacctgttgctggtccccagttcctcagagcagtttgggaagagggcatggccccctttcctcacccagcataagctgtgagctctcctgtatcttcaacttctgttaaattacatgcataaagccacatctctcaaggcctaaattaataatcaggaacagggcaggccaaaatccatgatgaggaactattttcttaacagtttcctaattatcaatgtgccttcccttttcttggtgcctgtaaatcacgtgattgtgcttagtgaatgtttcgtttctttctttctcctctttggggctgcagcacccatgagtgaccccttccttcatgttacccagagggtcccagagttggcccttctaaccaggacttagtgaaatctcattgagagcttttattctcctcatctacagggaaggtaggaagtggaaaatgattaaaagatatttagcacagggcttggcacacagatatcgctcagttaaggaagcctggagcaccaggaaatgagtttccaagtgtgcaactcatgagaggctgcagatggaattttccatgttactcctgtaggtcacaggaagctgatctgtgataggggaggggaagtggacacgtagcttgcatctcaggccccctcagaaccctgtgcagcagacacttttattatgatccactgattgctgaggagcaaggcctagaggttatgagtcctccctaaggtcacatagtagtggctgttagttgagtgactccaaagcggtgtgtctgactcctgctggagccacaccaatatgggccacacagaattcaaagtggttcagccaggacccttcccccacatggcgcctcctttcttcctccctccgctgacaaacagccacaccatgaatgaagtcttggggcgttccctggaaacagcgcttctatcctcttgtgaggaagtcaacttgcagtcaacgtggaaagaaaaggacccattcattcagcacccgattactggccacctcgctatagactagggttacagttagtaatgtgagtaaggcatggtgtttgccgccagaaactcccagcccagttgggggttcagagctagaagcacactgctacacggctgtcctgcacatgtggtcacagcatggttagggagcaccaaagagagatcagctacctcttttgggagagtcaggggagtcttaccagaggagagacaaccgtgctgggtattgaagagtcagtaggagttcactagatccatcagagtgggcacagaggggagggcaggggaaggaaactcacatgtaatcagcatactatgtgccaggcacctcaacgttctatctcggtaattttcacagcaaccccttgtaaggtagatattatgatgatgaaattgaggcagaaatgttaaatgaatttcctaagagattattttattttttagagacagggtcttgctctgttgcccaggctggagtgcagtggtacgaccacagctcactgcagcctcaaactcctgggctcaagcaaccctcccacctcagcatctcgagtagctgggaccgcaggcacatgcaccactacacctggctaattttgtaaattttttgtagagatggagccccactatattgcccaggttagtcttgaactcctgtcctcaggcgatcctcccacctcagcctcccaaactgctgggattacaagtgtgaggacctcactggcccctaagaagttcttaaagtgttgtacatggaacttggggggatcctcaagactctttgagcaggtcagaaggtcaaaactccttcacaacaacactaagaggctatctgccttttttactgtttggacatttgtactgatggtacaacagcaatggcagctaatactactggcacctgatcactaatcgaggccttggcaggctgggtgtggtggctcacacctgtaatcccagcattttggaaggccgaggtgggcagaccacctgaggtcaggaatttgaggccagcctggccaacatggtcaggctaaaaatacaaaaattagccaagctaggtggtaggcacttgtagtcgcggctactcgggaggctgaggcatgagaatcgcttgaacctgggaggcaggggttgcagtgagccgagatcacaccatcacactccagcctgaatgactggagtgagactccatctcaagaaaaaaaaaaaaaggccttggcactaaattgtgcttcttgttgtgttttttagattgcatgcactcacagttaaaaataaaaaggcagtttcatttaagagtgtccttgatgaagcagtaaaaggattagtttgaatcctcctgtacatgtgttgagaatgttctgtgtgatgaaatgggaagtatgcatagtgcacctctgctgcacatcacaaaatgatgattgtctccaggaaaagcactggagtcactgcttaagtgacaaaccgaactagctgctttttttttttttttccatggaatactgtttttactttaaagaatgactgacaaaactatagttatttgacctgggcattgggcagatattttcttaaaaatgaaagagtgagcctgccatttcaaggaaaatggcttgaaataccacttgctgccaatcaaaaaatttgagcttttcaagcagaaattggagttttagaaaactttgagaagtaacttccagcttcccagtactgaaagtgttactcccccaaaactctgggatttgttcacatggtgaataacaaacgacgttccatgagaatgcaggttttgatcaataggaattttattacttgtcacaagcaggagcactgggacaaagcagtgtctccctgagggaaagtgacaggagggttttatggggcaatggagaggggagagggtgcaacatcgcatgtagaggagggttcccggtggcacagatgctgtgagtcatggtgccagcacataggttgcatgttatggtaatgaagctacaggtctcctggggtgcaggctttagcatggtcatgaggaaagttcattggggttcatctgtaagttgccgggctctgtcaggagctggttttagcccactagatgaccgcctactacacagagcttgaaaaaaacaggctgtaagacagaaagctgtaaagcaggcagattgctcaatctccctacctgcttacagaaggctgatggtgacattaatgtatgagtgtaattttttggtagggcattgtgaaatgtgtcaacatctgggaagatctacgtaactgactgaacaaaaattttccaaatgaccaatgcaactgttacagaatcatacgtgggtgaaagattcattcaaactgcaagatagaacaatgaattttaatgtagcagagtacaaaatgttcattgatctggtttcagatttcacattgcaacttactgttaagaagttaagaactactacttgttgagttttgatgtagtatcaaagaaggatattcacagttatctgaaagtgtattaaaataggcctccctttccaactacatatctggttggattttcttcatagacatcaatcaaaatgaggagtctcagcagtttgaatgctgaggtattaatagatatgagaatccagccaagcattaaagagatttgcaaaaatctaaaagtgtcacttttccttttttgggaagttatagtttttttttttttttgctatatatgtgtcacttatgttaatatttattgggcttattgtgattttaaaattactaaataattatttttaaatgcttcagttataatttctaatgtaaaaattcatagatgcaggccacctaaataaaagctctttggcatcctcaataatttttttttttttttttgaggcagagtctcactctgtcgcccaggctggagtgcagtggtgccatctcggctcactgcaagccccgcctcctgggttcacgccattctcctgcctcagcctcccgagcagctgggactacaggtgccagccaccatgcccggctaattttttgtatttttagtagagatggggtttcaccgtgttagccaggatggtctcaatctcctggtctcgtgatccacccacctcagcctcccagagtgctgggattacaggtgtgagccaccgcgcccggcccaggcatcctcaataatttttaagagtgacatcctgtgaccaaaaagtttgaactgctgccccaaagaatcacaggaaataagtgttttatagtggcctgtgatttcaaatttcatgattttttccatgatcagtgattcacagtgggagagggagtttgggagctcccccctctccctggagggaggtttatcggaatctctgcgggactcactacaacgagcaaatatttacaagataattcccttagaatctccctgagcccctctctgcctccctccctccctcagatggtcttttgctccctctcacgtgctctctctctctttttttctctctcctcttcttcaaatcctccctcaccccttgcctgcctccttgatccctctctgcttccctcctcctcttctccaggctctgaacctggcagggcggggccgaccccacaggaggctgcacctctccaggctggatggactctgatgtgcttggctctaaagcctactggggctcctgggagatgtggccagaggctcgagggactttcgtggtccaggcaggactctctgaaagctgagccatccaggtggagaccaaaggctttccactgagtcttgcacaggttgggtggaatgaggtgatctttaagagccgacccaaataaaagttctgtgtcaggctgaaccctttgaattgtctgttgagcgccccatcgtttcttttcctgatgcttactggaagtgcccagggcactgcagaacaaagcttcattaaatgccttctcttcttctttgggaccttcaacactctttttctgtggatcagtgtcttcatggaagacgtgtctccagacctactgggcttagtgggggaacccctcaccctgacctgtcggtccacatggtgggccgccaagcagagagggccaaagctctgtccaaactccttgttttgtggatcatccagagagagaaatgcacttgccagcccagtaaaggaccaggggctgcagcacctgcctgtttctcccagcctacggctcttccatggaaatgaacttcctgcccactgctgtagaacctaccctaggaggagggtctccttgtgcgtctcctttgccacctttctttcaagcctcacctgcccacctcactggggacaggcacttgccccttcatgcccactgctccagaggaagggcttctgccgtgcatcatctggggcacagtgggtcagctctcagccatcaaagtgttagttcttcttgtccacctcagagccattctgcattccctcagccagccctcccagccacatagagcttccttgggacagcttgcctcagatggactccttcaaggccttggagggtgaagtggattttgtttaaatggaaataaaattaacatatcataaaattcaccatttgaacaatttccacatatataatttaattggttttaggttgcaatattgtgcaaccatcatcatgatctaattccagaacatttttgtcacctcaagaagaaactctatacccattaatcaatcacgtccccatttctatcttccctttcccttctcttagcccctggaaacaactaatctgctttctgtctctacagatttgcctattctggacatttcttatagatggaatcatataatttctggagatggatgttgttcaaaagaggaatgaaatactttctagggagattgttcattgttagaattagaaggctggatgtggtggctcacatttataatcccagcactttgggaggccaaggtgggaggatcgcttgaggccaggagttccagacccgtctgggcaatatagtgaggcccccgtctacacacacacacacacgcacacacacacacatacacaccagcttgatctagtggtgtgtgcctgtggtcccagctactcaagagcctgaggtgagaggatagcttgatcccaggagtttgaggctgcagtgagctatgatctcaccatcgcactccagcctgggcaacagagtgagatgctgtctctaaaaaaaataatactacaatcagaaaatttataattaaaaaaattatttaaaaagtcagaaataacaataacaaactcattaaggagagtcagcctgggtactttcttttgaaagcatgtttctgatgtcccagagctgagagggggaagttgtgtgattggcattggggattcattgcagactggcgggttctcagggaatctgttgattttgtaagatttcccttggcgaccaagctgaagcacaggtctcagaagctgagcctaactcagcggaaggtgaaaggcgggatgtgtctctccattctcccttttgtgtctcttgtaggggtgaagaagagaaccaaagtcatcaagaacagcgtgaaccctgtatggaatgaggtatgtgagtttttctccttccttttctctctgtctgctgcagttgtgtctgcagggacaagttagggggcttgtggaggaggtgccttctcagcagtgtccttgaggtggggaggggctggtggtccagcctgccaacgaaatccttcttgctctaggaacctgggaggagggttggtggcctggcctactaggtaaatggaggggagctagatattttttgtttctgtttccccccagctctggccagccaggtaaagggtgctcagggactctcttgcctgcctgtttctctcacacaggctgttcctttttccttgctcaaagctcaccttctccccacagccctccctgatgaggcaggtcctcctctggctcctgctagcccctgtcccctcaaccagctccctgcatacatggctcccgggtggtcctttggaagccctgctgccttgcatggatggggtcggatgcacaggggagcctttgctctgaggagggtcatgggggcctagccaacatggcactaactcgtgctgcctaccagggcctggcgtctggatgagcccaataatcttggtccttgaggatgcttcagggtcacctggctttttcccagccacactcctggcttggcttcctggggatgggttgaaactgagttgggagaggggcctgtgaaagacctctctcctctcttctgctgtcttcagctcatactgtcacctctgaatttctggatctgtggtcttcatctatccatccatccatccatccatccatccatccatccatccatccatgcttccatccatccattgatccatctgcctatccactagaatcattcatgaatgcctactcagtgccctggtggcacgaaggtgaaccagacacagtctcttctcctagagggccataggttaagatgccttttctctttttcttccagggatttgaatgggacctcaagggcatccccctggaccagggctctgagcttcatgtggtggtcaaagaccatgagacgatggggaggaacaggtaaggtggccagaggggggtgctccatggcttgaaggtgcaggtaggattgtggagtatacagactgcagaatcccaggccccagggagctggggtttcaattagcatttatccacctcctcccatgggactggcccagtgatagatgttgggagaatctggctgtggcttcaggaactcagccatgggtacagctgagcttccaggctacaggggagggaagatgggctggaatcaggtgtccacgcatttgcacagacagtgtgtgccccagggagcaggaagactcgcttcctgctgctccagcccagaggctccctgaggtgggctctctttcccggcccagcccaggccagtgagggcagaggccccctgcaggaggcaggcaggcaggcaaagtgaaactgtagctagcagggagctttccaggaatgcttcatggaaggggtaggactagaggttaagattcgtggtttagaaatcagaacagtaaaaatgagtagcccggcctgggcgcttccctgtgttggggtttctgctgagtttttcatgtacctagtggtgggtttcttggtggggggatcaaagttgtggtggcaaaagcaggctccccctaggcaggcgatgaatcccttctcttgccattgagcccctgggccttgtaaacggaggtggtggggtggacaagttcaacccaacctgcagatgggtgggtcttggactggggctgtgggtggactgggagacatagcacatgaaactgctcatgatgagccttaagcatcagagtgggagtccggttgtccctgctgggcatgagaggaggcagctgcgttagatgccagcaggagtgggttcgtgcttcaagtgccatttacggaggtctaggcccaagcatcagggatgggcttgctgttttgtgacctgctcacaggggagcctttgtttgggaactgggtcagtggtgtctgaggcctgaaagcctggctgtgttgccctggggtggggcagaaggggttggggaggatgagaattcaggaacctagggaagagcaatcagggtctccggctgcaaaacacctggaaaatttgaaatgttaaaaactcagaaaaaaacccaattgccaccttctctctgtggctgtgctggccatgggtgcatggtgtggggagggtggggcactttcactgggcccccaaaagtgtggctgcaaggtgtggggcccaggcctgtgggccagggcatcttgggcccgtctcttccagctgttgacctcagacatctccacctgcacgggggacagggattggaatcatttcagctaccttccaacgcagacactgtggaaggcaaggcagccgctaacaagcatgaatggtggacccgcagatcagggagggagcagccctggacagtgggcagtcctcgaaggcttcctggaggagggtcactcagactgacttgaaggcaggggtaggctttgaaaaggccagaaggggagggtattccagcgtgtggatgtggcgggcagccaggctcaggtctcacaggtgggactcagtctcacgacacgtgcggccctgtgagaagtgggtggtggggaagaattgagaggggggtctccaatgccaggctgaggagaatagcagcaaagtcacacaactgccacacagctgagtgtctggccgcatgctgtcttatatacaagaccttttcccatcagttaggcacgactattgtaactgtcaccgttacagatggggaaactgaggctctgagagattgggcaactttcttgaaggctagtgatggcagagctgtgattggaaggcaggtttttgggacatgctcatagtcactgagccccatgtgcctctcggaggctcctggaagccccaggatggtgttggtctcttctggagagttcagttccctctgacaatgccggcgttgacagagtttagaggggcagaagcaggacagtctggttactgcaggtcatgcagcagaagcacatgtttcattttcattatcttatccagcatttttacaggctctgtggggagatttccctttttttttttttttttttttttgagacgaagtcttgctctgtggcccaggctggagtgcagtggtgcgatctctgctcactgcaacctccacctcccaggttcaagcgattctcctgtctcagcctccctactagctgggattacaggtgcccaccaccacacctggctaatttttgtatttttagtagagacagggttcctccatgttggccagagcagtcttgaactcctgacctcaggtgatcctcctggctcagcctctcaaagtgctgagattacaggcatgagccaccatgcctggccagagatttcctttaaaaatttttaaaatcattatgggtagataacagttgtatatatctatggggtgcacgtgatgttctgacacaggtgtaatgtataacaatcaagtcagagtaactggagtatccatcaccacagacatttatcatttcttgtgttagcaacattccaattctactcttttagttgttttaaaatatacaatagattattgttggctgtagtcaccctattgtgctagggaatactagactcattcattccatctaactgtgtttttgtatccattgaccaccttgctttatccacctctccctgctacccttccctgcctctggattctactctatctccggaagttcaattttttaaaaattagttctctgtagggagatttctaagaccacagaggcaaaatgagagctgtgaacatatttttggccaattcaaggaccaggctagccctcagggtaacggtaagtgagggccacacgcaggctgttctggctctgtggagcagaggtcatatggggaacgggaagcttcgaaccttggggtcctcccattggcccctgtgggtgttctctagctcctgggggcagctagctccctaaaaaccagtgccccatgtgagcagttcactgcagggctgtgtgccagaaatcaggtcctcaaagatcagtttatgggacagccaattcaccaacctcacccgtttaccagaaacacctttcttataacatttaaatgtaatttttgatttttccaaacatttatctcagtttcagatttctagcaattaaaacttgtcttaattaaactagattgaaatgtgcacgtacattcataaatacttgaggactctcagaatatgccaaagcaacactgtcatgagaagaaatgatagaattttggctccatggctgggcattgtggctcatacctgtaatcccagcactttgggaggccgagggcagcagatcacatgaggtcaggagttcgagaccagcctggccaagatggtgaaaccccgtcactactcaaaatacaaaaattcgctgggcgtggtggcgggcacctgtaatcccagctactcaggaggctgagacaggagaatcgcttgaacccgggaagcagaggttgcagtgagccaagatcactggctttgtgccaggagaacatgggatgtgtggcctcctcagctgttttcaggcaggtgcgatgcctcaggggagggagcacaggtacctgcaaggtaattctgtcaccccaccccatgaccagatggcaaagtacttccaccctacacatggatgtgagaaaacaaccaaagacaagcagcaatacaaattccaaaagtgtaaaaagaaaaccataccagggagcaacaagaatgaacgcatgacattttaaattttgaaagaaaaggaaaaaacttcagggaatccagttcaatgagcattttatgtatttatttttgagatggagtcttgctctgttgcccaggctgcagtgcagtggtacgttcttggctcactgcaacctccgcctcctgggttcaagtgattctcccatctcggcctcccaaaatgctgggattacaagcgtgagccaccgcgcccagcccttcaatgagcattttaaattgaagacctcctcactgccctccagtcctgcctgttgggtcaggaagcaaacagggactcaagggttaggtggctgtgccttgcaactgtcctcaggcctctccagttggtgggttccagtgagggtccccggagtcatcatgcagccacccgttttgtttgtgggaatcctgggcgtgtcttctgtgagctcccccgctgtccaacctcatcctcttccaagtgaggggatcacagccctctgcatctgttaaccctctcagtccccctccaccttgcctcccctccctcttccccacctccaccctctggctctctctgcttctagatttcccctcaggcctccctcattctttacagcctgtcactctgtctctgtgtctcctgctttgcttcttttccttcctgtgcccctccttttattctttctctcctccttctcttgcccctcctcgatcctcaccatcctcaccgccactgtcctctctttcctatggctcctggggcatttggcatttctgggttttccctgatgatcactggcagtttagggtgatcttgttaaaccagagtggtctgctggcccagagtgggatctggggaatcctttcatgcctcaggaaggaaatctccatctgggaactgtctctgggctgctcagcatgccattaacccatgagaggggcagccctaagcccgaggacccctgagccaacttcagggatggatcgactttatctggctaaaatcaggtttccaatgcacataaaaggaagctccactccttagggtggaagacactcaggcaaacctagcgggtggtcctgggatcctgttccaggctgcactggacaatttcctgtttactcgaggcttctcagagagaagctgaaggggagatgatccaggtccctgaccagctgttttgacccctgggatgttcagcccagaagttcccaattcaggccacacaatagaatcacctgggcagcttttacacccactcatgcctgagccttggctgaggttctgatttcgttggtttggggcaaggtctgtgcagcatcacctactctccaggtgctggtgttttcgttgcgcagcctgggctgagagccactgatctggactctagaccagcactgcccactagaactttctgagatgatggaaatgttgtctttgtgttgactagtgtgcctgagaaattgaatcttaaattgtatttaattttaatgacttagatttaattaattccacgtggctagtggctactgtgttggacagagcagctttagatttttggaacagtgtttccaacctggctgcatctagaaatgacctgggagcttaaaaaaaaaataagtgtctgagctccgcactaagctgattaaacaagaacctctggagtgggctgcaggagtcagcacttttggaaaccacccaggatggcaggggggcagtgtgcccgcagggtagagaactcactgtgttagagagatgctggcattttgttgttgttgttgtttaggcagagtctcgctctgtcgcccaggaaggaatgcagtggcatgatctcggctcactgcaacctctgcctcacaggttgaagcgattctcctgtctcagcctcccgagtagctgggattacaggtgcccaccatctcacctggctagtttttgtatttttagtagagacagggtttcaccctgttggtcaggctggtcttgaactcctgacctcaggtgatctacctgccttggcttcccaaagtgctgggattacaggtgtgagccactgtgcctggtctgatgctggcacttctgaaaggaattgctctcaatttttccatggattagctaagaaataaatagaaatggtcattcttgtaattgtttatgtatgtgattattggcaaaataatcaccatcaagtaataatggctgaaactgcacatggtaaaattgttacagaactgaaaaacagatggaagaatcctgttggtaactgcaaacactgacttgggaagttggacttagtggaaataattccacaaaagaaaactcaaaatggcaaggagcaatatttgataaaacttaatgtcaaccaaaaaaaaaaattaaaaatctgtgagccaaatctgtgttgggaaatttaagcagggattaattgtccccaatgaaaagaattttggtaaaatgaaaataaagatggtaaaagagaaaaagaaaacagtttaattgctctgtatgcaaaacatatcaacacattaaactggcttcatttaatttgttctggaaaaatgccttctcagtggaaattaattactgtaggtgttttttatatttaaatgtttggtaaatataaacatggaagcaaaaatctccatggggtcaaaacatccacctggcaaagcaccatggtcaaaatgatgctcaccttgactgcagtgattcactaaccccaggcctaaccggtccccaagacagggggcccagatgcaacaaggaagcatacagaacaacctgttaaatgaggaggtctcaaataccacaggcgacaccttatattaaggcattaatcatcgtttctctgagatacagacttgagtgggctccctgtgtttttcctggtcactctaccctccagcctgaccgtgtccccagcctctctgctttaatcaagtgttataggaggaggtctagtcaggattgcctttaaagacgctctcttaggtgttcacagtggcattttctttggaatagtgtgatctactctgtatcttttagcgacctggtgactctgtaaagtgggcactgaggggcctctcacctgcactcagatgcctttctgccttcacccttccccatggtctgagcatcagtcatggtgcctgcaactggaggggacccaggagacaacctgagaactttcctgagccccaatgctccttctcctccttcctccttcagctgctcctcctcccactcccacattgagctggatgatctgccccagtggaataagcgtggactttgagaagagccagggtctagctgcaacactctgtggccttgggcagatcactacactccctgaaccttgctttcttccattcttagggagtatcaaatcaagggacctgccacaacgggggtctccctaaatgttagttctgcactgctgccttgctcttgttcccccgtgcttccttctgctgcccccaccactcaaagtcccactgacccagccctctcccaccaaaggctgctcttagccagctgtgggttgaaaaagcaccaaatcatatgaatgcataggtggcagcctatggcttcatgtttcactctattttaggaatcggcgggatgctgctttatagctcagactctgcttagaaaagagagaagtgttaatggtaggtgtccagccactgcagtagattatgaggagatattttaggaatggtgtatcttcttcctgacatagggccatctctgagcctggccttggtgccatctgggcggaggcaagggtggcctgatgcctcctatgtcaatgagtttcatttgttgagggaatgtggaggtttccaggaaggggctgaacatgctcttagttcttcagggtagccatgcatgggagacgacagaggcgcctggggagggggcctggccagttgaggcctgtctcccacacctggagtatgctggtgggattgaggggctctgtactgggaggggcaggtattctaattctcaggctgtccatcagagcttgcagggcaggggtggtggaatgagaatgagggtcaggggctttgctcagggaccccactgtcagcagagttctatcctggcactgtctgtaacctggacctctctgaaaccgtttcctcatcaggacaatggcaaaagcagtccctatgttgcaaggttgctgtgaaatttaaataatataatgcatgtgtgtcaaatgcctgctcagtgcttggaatactgaaggtgcaatatatgggggctgttgggagcaggatccatatagatgcacttacgtaaaccacacaaacatgtgaacactatgtgcatggcccgtatggacacccggctgtacctgagtgtgcactagcattgcataatatgtgcacatgcatttttttaaatttaaaacaaccaaaaaatttcacggaagtataaaaaaacctaagtaatttttataagtataaaagtgcatttcattctcaaaaagttataaaggaaaaagtacaagttctcccatcttctacccatgaatttcttctcttttctccagaggtgcccattgttaacgatttggtgcgtatctttctttcttttttgagacagagtttcgctctcgttgcccaggctggagtgcaatggcacgatctcagctcactgcaacctccgcctcccgggttcaagtgattctcctgcctcagcttccggagtagctgggattacaggtgcccgccaccacgcccagctgatttttgtatttgtagtcaccatgttggccaggctggagttggactcctgacctcaggtgatccgcctgcctcggccttccaaagtgttgggattacaggcgtgagccactgcgcccggcctggtgcatatctttctggacttttcctaagttatctacaggcatctgtttatacacatgcatactcatttacttatacaaaaatggaattatgctatatgtattggtctgcactttgcttttatcacttcatcattgactctttcccaggtcagtccatcacatttttaaatggttatgtggtattccgcggtatgtgtgcaccgtaatttaccccactgtactctcattgactgatatttagtttctttccaatgtcttgctctcgaatgattatccagtaaacatctttatccaaatatttttatgttcttatgctatttttttctttaggataggtcgttagaagtgggattactagatcaaagggtataagcaaataacattttttgtagattctgccaaattacttttcaaaaatgttgtcccaattaatgtccaccaacaatgcaataaagtgcctgctaatttatttttgctagtagaacggaccaaaaaaagttgtaatttgtgtttccttggccatttgtaaagttgagcatcttttgtgtgctgattgtccatttctatttcttcttttgtgattgccaatcattgtattttgggttgctcgtcttttccttttaattcataataattacatatatttggaatattattaggaatactaaccctcactctgttctatctgtataaaacttttttctctctgcttctcacctgtcagttgcactcacatggcaacaggcatttacccagaggtgcacgtgtgcacacagacctttatttgtttgttttaaatttttaagttcagggtacaggtgcaggtttcttacataggtaaacttgtgtcatgggagtttgttgtacagattatttcctcacccaggcattaagcctaggacccattggttatttttcctgatcttctccctcctcccaccctccaccctctgaaaggtcccagtgtgtgtcctcctctatgtgcccatgtgttctcatcatttagctcccacttataagtgagaacatttgggatttggttgtctgttcctgggttagtttgctaaggattatggcctccagctccatccatgttcctgcaaaggacatgatctcattctttttcatggctgcatagtattccagggtgtatatgtatcacgttttctttatccagtctatcatcgatgggcatttaggttgattctatgtctttactattgtgaatagtgctgcaatgaacatacatagcacacagacctttataaaggcagagtggcggtttgctgtgttagaagttgggaaaaggcataggcttggcctctggttttagcaagctggtttgccagcccccgcttctggcatgcttgggaggctgttttgggcaggattatttacccttcactgcctcattgttttcagcgggcccgaaagcattgaccatatccttattttcaaggatttttatgactatattttgccctggattctatccaggacatccctggctttcagaatcatttttcttttgtctttctctagactgaagtggaaaactatttagagttacccttgggcaggccctggggaatcagatactggccggaaggctgccagaggccaggggactcaggggctctggaatgtcctgctgttccctgtttcctgcccctcactgcctggcacgcatagcggagagctggaggggctcagaggacaggtgtttcctcccctgtatggcatgtgtctccttccaggacagggctctctcactttcctgtcacctggctcattgacgctaaccagggggagatacagtgagtcagtgatgagttactcgcaatacatatatagttttaattggcatgcgcttttcttcatttcaaagaaagaatgagaaatggatacatggtaacccttctggaacattttttttaattcaaatttaaagttgtaaaaatagtacaagaacatccatatattctttactcagatatacttattcacattttactccattagttttagtatatatgttttattatacttattattattatctcccttcctcccccccccccttttctttctctcgtctctcccttcttgtttctccctctttctcttactcctatttgaaggtaagtcatattcatcacggtctttgactcctaaatatttcagtgtatatttcttaagagtagggacacagttatcaacttcagtaaatttaacacgatgccatacttttttgtttgtttgtttgtttttgagacagggcctcactctgttgtccaggctggagtgcagtgctttgaacaaggctcactgtagccttgacttcctgggctcaatccatcctcctacctcagccttccaagtagctgggaccacaggcacaagccacctcgtctggctaatttaatatatatatattttttgtagagacagggtctcactatgttgtccaggctggtcttgaactcctaggatcaagggatcctcctgcctcagcctcctaaagtggtgggattacaggagggagctacagcacctggctgataccatacttttatctaatatattgtttgtattccagtcatgttaatggatgaaataatgtttttcatttcatagcaatttccctttccctctcccccagtgcgggattcagcctgtggtccatattgaatttagtcatgtttctatagcctcctttaatctggaacgtttccttagtctttgtctttcatgacaatttacagttttgaataatatagtatcccttttttctaatagaatgttcctcatttgggatgtcagcctaaataacgaacagagaaaaaagatatttgtgagggaatagagccagccgtgggaatatgcatgccatagtaaaccacgtgagtatttaaggaggtaaagaaacacaaaggttttcagctgggtgcgctggctcacgcctgtaataccagcactttgggaggccaaggtgggtggatcatttgaggtcaggagttcaagaccagcctggccaacgtggtgaaaccccgtcactactcaaaatacaaaaattagccaggcatgatggcatgcgcctgtagtcccagctacccgggaggctgaggcaggagaattgcttgaacccaggaggtggaggttgcagtgagctgagatcgtgccactgcactacagcctgggtgatagagtgatactctgtctcaaaaaaaaaaaaaaaaaaaaaaaaagaaagaaagaaacacaaaggttttttagaggaaaagaggaaaataatgaggattacataattattttgaaatattatccttggctataaaaatcaattacaagggtgattctggtccagggttggactggtaattagtgggcagatgttcttgcagaagtgttttttgagtaaggctgttatagcctttgtgcaagactgtgtttttgcagtcttttgtgagggtttttgttatcaggcatacaagcatgagaaccctctcttcatggccttccttagctctttttgttagggttttcttaacattagcgactccatttttattctgacaactttcgtggcagtttgtttgatgttttctcatgcttagattcaagcttggattaggttactcatccctggccagaacactgtctaagtgatgctgtgtctgtctccggatctggaggcacgtgatgttccttactggggaacgttaatttcaatcacctggtcaaggtgttgtctgatttttccattgcatatttaaagttcttttctcccccttgaagtttgttaagatgtacttgaagatggtgcaaatatcctgcttctcaagaagatgtccccctaaacttagcatccatggatgatccttgcctgatccaatccttaccatgatgggtatgagctgattttcatctccagcactccttccacatgtaccaggctaggctgtgtgaggctcttgtggtcacagtggtgctggcataaccccagggccaccacgcattgatccctacctgtgcctagcactgtgccttggtgactcatgccttgagcctcaccccttggctcagggccattctctcagagttgaaagacctctgggtcattaggttgggtgtctcatctcttccatccttgatagacagtgttggagtgagacagacacccattctggggctggattattcattagaaagtccttccttctattggctacagtttttctccctgacattttgaggatcttatttctctaccctcaggaatgatcaaaaagaaatctaaccctcttgcatatgacagcacttcaagtcatggtctaatgtggtgctgacagtcactgggtgggatgggaatgtgcagagaagcacaggaacatggtgagtggggaggggaagaagggaactgacacctaccaagttctatctaggttccaggcacatgtggggggtgataggtgtattaactgaaattttaccagaactctctgaagtattcattatttcctccaagctccaacagtgcagggtgggttgtccattttattctcatcagtatccccagtacctacaaccgtacctgacccatgagtggtgctcactacatatttgttgaatgaatgaatgaatgacttttacagatgaggaaacagtctcagaaagtttatgtcatgtgtgcccagccacgcagctggtcagattgcagggctaggtttctggcatggtaggatgacttgagggctcttattgttaaatcactgaatgattaatacttttggaagatagttgagagaaagaacattttcaaagtgttgctgtaggttgaaaggtacagtttgaaaacactgggttggtgagtgtgacatcctagggtcaaccacctgggctgttccatgaacccaatagaacaggagctatgtggcctgccagcctttctggatcactttcctttggggcatttgggagaaggtagcttgtctcctgtccacttctttttcagtctgagccgtacccactcctcccatcttcctgcagctaacatggctctcagcaccaggggccgtggtcctctaggctgccccagccctggttcctgcacacccacattcttcagcttaaaccgccactgacataggggaaggcccggagtcactggggcaggggctctgctaccctctgcaggcgtggaggcagggccctaaaagagggaggagaggtggaagagaagggttcactgtgggtgtggaggcatggagaccactctcattggtggctctcttctgggtcctcaggcatcctaccacagggttgcctctctctgacccacttgtttctctggggtctctgccagctaccgtgatgcagagctgcaccctcagtgcacccttctcttccacctcccctccctctttagggccctgccttcaaggccacctcctgaaaactccaaatgccatccctgcatagtgtagactattagacctcccagcctcctcttcatatgatactttaacccatctgaaaaatagaattaattagcttttaaaagctttttaaaatggccactcaaggctgggcgtggtggcttatgcctgtaatcccagcactttgggaggccaaggtgggtggaccccttgagcccaggagtttgagaccagtctgggcagcagagtgggaggccacgctgtgcagggccacacagggaagtgctggggtcagtgccagaatcagtgcaggggtcaatcaggaggcagagagagcgaggggaacacggggacaagcgcctttattgtggtttccaagggaaggaatgggcgaggcagggtaaacaggcctggggactggccagtttgaataatttctgtgggctctgggcacacttacacgtagacatatagctgtctatgtaccgacatagacggtaggggctgtcctgagttgctggaacctggccctatggtgcttaggacaggggaatgtgggccctgagtgtgacaggctgtggaggaggtgtggggtatgggctcagagtggctggtttgcatatgaaaggcctgctggtaagtgaggagtcctttaccatctccaggaattctgggaagagagtgcctccaaggtcaacaaggctccagatgtcgaagcatcagaaatacaaaaaacatagtttggcataagattaaaaaaatatgggccaggtcaaatgtatagactgggctccccttcccacggattaagcaaaccaatgacctttctgtttctttcatgatgcactcatgggcctctaagatggcacaggaggctcactgtagagttcaaagcaaagcctcaggctctgtcagccttgttatttgtgtgaaatcaggcaagtcaaacaccttcccaagtcccagtttccttgtctgtgaggtggactgaactaataacagtacctaccccacaggactagtgtcctaatatgtacctagttgatgtaactgccctacagattcatcgtgctggctgccaagatagagctgatttatcaagacaggggaattgcaacagaaaaagagtttaatactgagctggctaaatgggagactggagtgttattcttactcaaatcagcctcctcgaaaattcagaggctagagtttttaaagactgtttggtggtgatatggtttggctgtgtccccacccaaatctcatcttgagctgtagttctcataatccccatgtgctgtgggagggacccagtggtaggtaattgaatcatggggacagttatcttcacccggttctcgtgatctgaggttttataaagtggttcccacacttcactctgtacttcttgctgctgccatgtaaagaaggacatgtttgcttccccttcccccatgattgtaagtttcctgaggcctccccaaccctgctgaactgtgagtcaattaaacctctttcctttctgaattacccagtctcaggtatatcttcattagcagtgtgagaacagactaatacaggtgtgttcccagaccaaaccgagggtctggctgcttattctcatggcccaataatgagatgaagatgaactgggaaagaagagagtttatttctgtaatcaggtacaggcagaaggcctggaaaatatcagcagatcaactcgaaattacaaagttttccagagcttatataccttctaagctatatctctacatgtgagcgtgcattcttctaaagacctaagtgtctaacttctttgaatctataactaaaactaaggtctgagttttgaagaccttcttctggagcctcagtaaatttacttaatctaggtgggtctaggggccaggggtgattatccttcgcttgtctcctgctaaatcatggaggtttggggagatcctttagacccccaatacaacttgattgttgaggcctggggagtttcttcagacccccagtaaaaacttgtttagtcctaaatgggtcctgttaagaattcctttgttatcttgtcatgcttcaagtccccggaaaggcctgggcaaaactcttggtgggcttttgttacattccagcctttgtgtgatggcactggctctatcagctttgaatgtttaacttcaccactcagtcagtgctgaaacagctgttatgaagacctgcctgttcagctgttagcgagatctggcctgccacaggtgggcagggggctagggaataggagtgctgatttgttgggtcagggatggaatcacaggaagttgaggctgtcctctagccatgagtcaattcctgggtggggaccacatgaccagatgagccagtttaccagtctaggtagtgccagcaggaatgcagtgtctgaaaaatacctcaaacaccaatcttaggttctacaatagtgacgttatccataggagcaactggggaggctcggaatcccgtggcctctggctgcatgactcctgagtcataattcctaagcttgtggctaatctgagttttacaaagttactctggtctccaggcaaggacgaggtttgtttctggaaagggctgttttcatctttgtttcaaagttaaactataaactaaaattttctatggttagctggcctatgcccaggaatgaataagggcattttggagattaaaggcaagatggagtcggttgggtcagatctctttcactgtcatcattctctcatttttataatttttgcaaagccggtttcattaataggagggttgctattattagcatgcaagttccatgaggtcagagactgtattttgttggacatactaaataagtatttgttgaatgaataaattctaagatttttaaggagtttttacgttttgtttttaaatttaattttttacgttggtaaaaactttaagaagttgtaaaaacagaaactatatttaaaaacgcagtgaaaattctccctggcctctttgtccctgatctgcccagttcttgctgttccctaacaggtaacccctcttcttagtttcttatggatcattccagagatcttatattattgcttaatcgcccatatagattctaactttcctcttttttatgcagcaagtagcttattatacatgctcttttgcaccttgttttatcacttaacagtgtatcttgaagattttccatgtaagtgaataattccccattattgttatagctgtctagtgttccattgtatgaatgtactgtactttatttacctgtcgtctatgatggacacgtgaattgcctcctgtgttttgttttgttcttacaatgatgtaataagacccaatgttttaaaataaaattgttttgatttctttgtgctttattaaaataaattgacttggccaccatgattcccaccctcccacatgctgcctaaggctaaggtttgggggccacccatgcctccttcccttctgccatacggcagtagtagcacccctggatggtgagtttgggaactagttctttttctacggaggaaaagcatgtgccctgtcagacctcaagctgccttggcctctccttcccttgcccatgccagttcctgccttctctttctttgggttggcagcggctctttcggtccccacacttctccaccccccacattccaatggctccagagcacagctagccaagaggtctgaggaggctgggagcacctgtggtgttttcctccatgtgggctgcagggggtgtggccaggacccacgggtgtcatttccacccatgtaggctctgctctgcacacactcatagctggccctgtgcaggacccctggccccctccttgcctcatctgagcctctggaatcctgtctgccacttgccaggcccctggttggtgccgactgagagtgcagcatccctgatgagcagagggcacctggccctggagcctgtgcttcagtctgactccagatggggcgggtctcctcaagggccccagacctagaggcccctggataaagccacatctcctccatccctgtgaaatgaatggatgaatgatgagtggccttctgggttttctgtgaccaacctcagacccctctagcctcccaggggtccctcttctgcgccccccacctctcctccctgagcaatgcttcctgggaggctctgaatttctgactcttgtgaacttgactaccacagcctgctccttacactgcgggagaggcagcctgccctgctatttccagcccttccttctacaggagtgggggctggtgaagccacccttcttggagggacttgcccccaggccgatagcagggtttgggggtgcatttcatggccccaaaaagcatttcagggaggaaataacaagcagtcaaccctggctgctgtctcttgggcatccaagaggcaccccaggctggcaggggtgggggtgctacttccttctgcatttcctgccattgttccctgacccacttccgggaattctccctgggctgggagggctggacaaccagcaagggaggcagaggaggtctggcttttctcggcaccctatgacctggctgctaactctgctctgctcagtcctgagggctcctaagctggagctccagctgccatgtacagctctctggtccatgaggcctccttgggccctgcctcccagtccccaaggagagaagcctcagtgctctgggggattgacagggaacctagatacccgggtcctggggctgactcagccattctcctgcttgaacaagtcactcccctctgccaccccagttttctcgtgatgggcagggttactctgatctctgatgtcgcatggactcatgcatcctctatacctactgtctggtctttttgacattgtctgggtcctgaggacaattcagtcaacatactgacgggtgccttctggcaccagcccctaggatggagacactccaggagccccagcttattaagtgatggtaaaaatcctgctccatgctgtgaaggaatggaacacaaatcagtttacattctagaaaatatggctcctaacactgtgagggggtttcaaaccctggattgaatattagtgaatatctctccccctctatccccttctttcagaaagggttagaaaatggaccttgagcgtatattacatttactgccttgctagcaagggcacgagcaaggcggcagagtctgttgctttcaagaaggatggaaaaagagggatttcattgttgagaagcttaaataagtggctagtttttaattttaagttttattatgataaatcgacataaacgctaccattttaaccatttgtgagcatacatttcagtggcgttacatgcattcatgatgtcatgcagtcattcccaccgtccacctccaaaatgttctcatcttctaaaactgaaactctgtaactgttcaataataaatcctcacttcctcctccccccagcttgtatcagccaccattctactttctatgaatttgactactctagctacctcatacaatatttgtctttttgtgactggctgatttcactttgcggaatgtctccaaggtccatccatgttgtagcatgtgtctgaatcttcttttttgagactgaataatattccattgtatggatggaccacatcttgtttgtgcctctgttgatggagacttggtttgcttacacctcttggctattgtgaataatactgctgtgaacacaggtgtgcaaatatctaggtccctgatttcaatttttttgggggtatataactagaagtggaattgctagatcatatgctaattctaggtttaattttttgagtaactgctatgctgtttcccacagtggctgcaccgtttacgtccctacacaccatgcacaagcattccagtttctccatatcctggccaacacttgtgatttttctctccatgactctgtgtgtgtgtgtgtgtgtgtgtgtgtgtgtgtgtgtgtgtgtttataatagccatcctaatggatgtgaagtagtatctcagtgtgagtagtcagttttaaaaatcacctcgttaggtcgaggttgcagttttatttgatagggtcataaaaatctatattccaatcaatatttgcagagaccagaaaagggatgagcccagatgacaggtgtgctgttcatccatcaggaaaaagcagttaataagtacacctgtggctgttcaccagcctaacatggccttgtgccctgacagtaatgttcagggtaagtccatttctcagggaggcaagcagaagtcacacacagacaccaggcgacaggttcctacagtcacaggccactcactgcccatggtttcctgctgcctctacagaggggcagactatatggtgagcccacttcatagcttcctctgctctctttgaagggagcatgtgccaaccatcgcgctgctgacctactctttcctaatagcccatacatgtgccccacccctcctgtcagtcagaaatgcagcctctggtgcgtgtggtgtggaccgcccagggcctctcaggagtggagcctgtttcccctgccccaatatccttttctccctgtccctgaagacaggaaggtttccttgcttttcatgtacaatcaatcactgccggcggagccctgggattccaatacagacggcctgtgtagacatgggtcatatgatctgctggggctcaggggcagtgtgggggtgatgagatactgacctggtggactgtcaagggctcatgggaagacaacccttcatctctggggaggcatggctgggcctctggggaggggcaggaaggggtcaaggtggaccttggagaaggaaaggtatctcttatcccttcccatgcccaagtatttccctaggggccaggccttccagggatggtgcatggtggtgactgggtgtgggggtgcaggagagccctcgtggggtgctgggtgactgtgtggtctaggcagaccagcctcatctgagtggtggcagtgaggggtctggcagaagagccagggtgccttaggctagttttctacatttgacttctctctcctctcaggttcctgggggaagccaaggtcccactccgagaggtcctcgccacccctagtctgtccgccagcttcaatgcccccctgctggacaccaagaagcagcccacaggggtaagtgcccatcagcctctgccaggttaaggtccaaggcattgccaggtggcttcctctttgggccttgccattctgaccccagacatgcatctgacttcagctcccttgaagcaggcctggccctccctgaccagagtttgcagtgtctggaggggcactggactaggggagatgggaagggcagagggagccctgaccccacctgcagggctcaagtcagccttggctcgcagcagcttggcctgccccttggtctggtgctgccggtctggccacctcctgtccccagcttcctggtcagccttggctatagcccacctagtctccctggcagacctcccctcctccctcaccatccagccctcttctccagattcagaatctctgaaccatctgggtcacagggcatgagggatggagggaaagagccctctcccctgcccaccaggaccctcttccttttcctccgttgttcttcctgcccctccctggccttctcagtgctccccccaagtccaatcagacaattcccagccctcctctctgcctgttatttttagtgagctaaatataccctgtagggttctctcttcctggtagaattcctgacctctcctgtgggttagccccgccttccaggatgtaccaggaaccatggattggaactacttccgccctgtgaggcctgggggattcaggccctgacttctctcagacagggcagcggtactgccccgtggcgggtgtgtgaggccggggctcctggctggctgggtgagtcaggaagtagccggtctgggcagatctctgaatggaacgagactggatgctgagacctagagaaaaggaaccactgaagtcacatagtcagtggctgttcccatgggggcctggaccaggagctcatcccctagaccctctggtggaatggctgtggatggactcctggttcactgaactctcagtctgctgccctctcggtgctggactttgctcccaaggggtcttaggctggggatggctgggctgctcccttgatggaagatgtcacttcccaggaaagtccatctgtttcccacacagggctcactggcagaatgttctggtttagagcagtattcactgagcctgtctccatcaccctgagtcccctctcatcctccgtttcagcctcctgtctcttaacactccctgtggtcaaggaggaccccaaggagttctggaactaccccttcaggggtcctgaggaggctcagacccaaccctcaaggcatgggacacagatggagggatgataggtatcaaggcagctggcgagagaaagccttggggtcaggcttggttctcacttccttgctgggacaccagcatctctccactccagctctgtgtgcatccatgactctggtgtttcctgcccttcggtcccttccaacctcaaaggcctgtccagccccgaggcagagttttccatagctggtccctattcatgagccgtgtcaggctggagccatcccctccatacctcccttcgcctcctcctgctccttgttcccacactgtctgggcttcatgtttaccagcggggagcctgctgccttctcttccctggctggggattcctggctgtctgcagagctttacaatccttcaccaaccgtgtctccaaaaagagtgtgtgagatccaggaggtggcggatgggagagagtgctggaccctgctgggttgagccccactagctgagcacaggctggaaatggagttggggagcctcctccctgttgcccaggaggcagtcctcacctgtacagagggtctaggactagattctagtccatgtgatggcattaaggtcacagtgcagccccagacaggtcatatgtccctttgggctggggcttcctgcctgggacctgggctggctgcactgtagtgcgaggcagggataactgggggtgtgctgggcagggacagacagccaacaacattgagggttctcgctggccgctcactgagacctcatttctgagctaagcccaatcagcagagcatgccaggtgcccccatttcattgtagctctcagttgcctctaagggccaaagaacctgctgatggggtgatacgagtgaacacagagccagtgggatccttaggaaactctggcagactgagaggcgtgggggaggccgggagtcctgccgcaggctgactgcagaccccgtttgccttttgctcagtgttctcacccaagtcccttcagatatagcacgctgggctgtgtgccatggaggatctggctatgtgccaaatctaccctctgacagctgctaggttgatggggaaaacactcccccagtcctggaggaacctccaggccatggggatttaggacacacatggaggaaaagaagcagcatcctctcagatgtattttaagaggagctcactcaggaaggtgtggatacatggagaaaactcagtcggcatcacccgggccttaaagccagaatcggatcacaaaggaggacaagagcctacgaagcccagtggtgtgtgggtcagggaagccaggagggcactgtgtgttgggagcggggacctgaggcgggcaggacagtgctcagtgagtccctgagctttcttcaaaggtttggagcttctgccaaccaaccctgtatcagctcagggccacagctaccctctgcctgcttctggaggttgtctgagggagaggttagtgagggccacgcacatatcaggcctgtcttgtccacacgggacacatgtgttaggggaggtgagagtgggctggtctgggttttggttttgatgagctcagtgttggagagctgtggtcgaggaagtaggtggcgcacaatgggctgggcatggcagggtgggcgaaggaccccagagcctgaccacataacctggaggagggtcacagccagggagggtctgaggaggtcattcgccttcagtttcctgagccctcttagcctggggcaagacaggagtctcaagttctgctgatctcgttgattgtgggccccaaggcagcagacgagggcgacccaggttaccctgctccagggcagcgtgtttggtggacacacgattgactgacaatggccttgtgcgtggagaaccctggagtgctgctgagttggagactgaggacctgggctgtcaggcgcgggacccgtgacgtggaggaccttgaggaaggtcccactgggagctctaggcccaggttgtgtagtccgggagagcacagggctcacatatatcccccaggaagaaaatcttagctctatttgtctagagaaggagacaggggttgagctgtgatgtcatggtgagggtacaaggtcctggtcctgggtggggcccactgacacgcccactttcccttaagagcctcagcagagccaaagaacttcagtattcaccatcagatcctgaagccatggtccctggggcccacctcctagtgctgaggtctgttctagaccctgagctccagagcctctggagctgcagggatgtccctgtggctctctgatgggcagctagaagacagacctgtgctggaagtctcattcaagggcccagagcaacccggatggtgccagttcttcaggaggttggtgtggagctgtcggtgtagaaacaccggatgctcaggaaaccccagaaggggctgcctaagtggtctctggagccctctctctggagagggctgctcctgtctgcatcccggagagggctgctcccaagccccagtgctgaggagctggcactgggcacggtgtggaagagttacactccggcggctccacctctcacagagatggtgtatagaagcccccaggtggtgtgcagtgagtggatagcagggtgagcccctagaaacaggaaggggcgctcttccaggggacctgtttccaaggtcagaggcccaagggcagcccaggtgtggccccttcaagtttttgcttcactctcctcagctcaatggggtccactcagactgcttgatttaacactgcaatctgcaaaatgtctcattcccctgatccttcttgctctggtttactttttcttttctttctaacatactctcttctttatgtatttattttgtttattatttattgtctgtcttctctgccaagacatcagctccatgggggcagggacctttgccttatttatggaagcgtccccagaatcttgaacagtgtgtttggccctggcaggtgcccaacacacaggcacgtgtgcgcgcacacacacacacgtagagggaatgaatatgtgagttaatgaatgaatgggtcaggccagacatgtcaggcagggccctcagtgttcatctttcagatgtgggcccaactcaggccaagtcaaacaaacaccccccacaggcctggcctctggggccactgcacggagccctgcgctcacaagggcctcatgcttggcttaattctctactgtttccatcttgaaattcttaaagctcactgcatccttgacctccggggctcaagtaggctcaagtgatcctctcgcctcagcctcctgagtagctgggactacaagcatggctaccacgcccaactagtttttgattttggaataaggggctctgcattttcatttgtgctgggcttgcacattatgcagctggtcctgacctcatgctaatcttggagggccggagtcagcatggatgggcagggggctttatttgtctctgcctaaggagattcctgtggctattcctaaaaagaagcagattttcaaaaccttttatttggaaatatttaagatctagacaaaagttgccaagtatggtacaaagagtattttgtcctaagccatttgacatgagggtgccaacctcctggcccatcattctgaactcgagtgtgtgttctccagttaaggactttctcctacataaccacaacacagccttccaaacgatgaaattaacatggacacagcactctcgtctaatccccagaccccagtcgcggctcatccatttttcccagtgtcctttgtagcagaaggatcccactaaggctcatgtgttgcacctagttgttttgtttcttcagtttccttccatttggaataattcctcagtctttctttgacttttataaccttgtagctggatatttttttgaaattccggccaattatttgtagaatgtcccccacattggttttgtctgatgtttcctgtgtttagatttaggctgtgtgtcttgggtgtgagtgtaacactgatgctgcgtggctgtctttgtgccctatcaggtgggatgattgtgattcgtttggttaccacactgttaactgtgatcatttgattacactagcatttgctgggtgtccccgctaatcgttcatctactcccctttctcatgtcagaattttgtgactttgtaatatcctctttgtcatctaacctttacccgtgagttctatgagctgttgttttgtatttgtatttttactttttttgagacggtatgtcactctgctgcccaggctggagtgcagtggcacgatcctggctcactgcagcctccgcctcccgggttcaaccaatcctcccacctcagcctcccaagtagctgggattacaggggcatgccaccacacctggctattttttttgtatttttatagagatggggggttttaccatgttggccaggctggtcttgaacccctgacctcaggtgattcacccacctcggcctcccaaagtgctgggattacaggcgtgagccactgtgcccagccgtcatgaagtgtttttgtttttgttttgagactggtctcattctgttgcccagctggaatgcagtggtgtaatcatggctcactgcagccttgacctcccaggctcaagtgattctcccacctcagcctcctgagtagctggaactataagcgtgggccaccatgcctggctaattttttgttttttgtaaagatgagggtctcactatgttgtccaggctggttttgaactctgggctcaagaaatcctcctgtctcagcctcccaaagtgctgggattatagttgtgagccactgtacctggccgtacccaggagttttaatatcactgctgtttcttggttgaattcattattgctttgatgattgctaaatagtgatattctcagttatttttcctgcattagtcagttggcatttcgtggtcaggaaaagctttctcctctcctatttatttactgtggtatggatttgggtatttctattttattcaattgtttaatctgttactgttattatgtattttcatgtttctattgtctcagatttggcctgtgggagctcttgaaagttggcttctgtgtccttttgacatgtttttactttttattatttatttattattttattttatgtttttgaggcagagtcttgctctgtaacccaggctggagtgcagtggtgtgatcgactcattgcgacctctgccgccaaggttcaagcgattctcctgcctcagcctcctgagtagcagggattacaggtgcatgccaccacgcctggctaatatgtttgtatttttagtagagatggggtttcaccatgttggccaggctggtctcaaactcctgacctcaagagatccgcctggctcggcctcccaaagggattacaggcatgaaccacctcgcccaggctcttttgatgtgtttttaagaatcagtcattcattgagcatttccttcctttctggtgcaagaagatggtccaggctcatcttgtatcttccctgccctagccctggaagtagttatttctccaaagagcccaacttaccttttgctgaagtggaagaaagtcccaggacagttgttaaaagtgcaaatacccaggcccaccctagacctactgaactggcatctctaggagtcaggtgtggcatctgggcggaggggaggactttcttcttttcccctccacgggttgcaggagctgaagggactggctgctcacgtggcgacacctggtggtgattcaggaacccacagggcaggttatgttcattccttgggtgagggaattcaagggtctcagttgcctttgttgacctcctcctgggtctcctgggatgctgagctagctcttgtctccttcctcagtgttctgagccctgctttccaccagtgctgctctccttagtgtggctgtccccaggccccagtctggagagttcaagctcaagagctgagtatgtcgggagccttcaggcccttctctcttgggactgagtttgctctgtgagtccctggacgtccctaacatcattcagcagaaaggtccagtgaactgtgccagagccactcagagggacattatgcctcaggaaaaattgtgtttataaagggtttgtcaaaacctggggagagcttattgcctgacattcagtaaaagaaaatcattttgcatacagcagatctgtctactatttgtttgaaagattggagagaactggaatgtggagtcacggaattatggacaattggttttcttttgccttatttttcctctttaagctttctgtgcttcccaaactttcttagagtatccgttgcactaatttgagagactggctgccccaggaggcttgctggacctgtggagccgggacagggctcaggcaggcccgggagcagccaggctgcagatcctgctgaggttgtgccgttcccaggttcagggtgagggttggggtggggtgggcgcatgggcaacccgacctcgcctgtgagggatgtcaccagtccctctcctctctggccggtgcaagccggggcagctgaggatgtgctggggggcaggaaggaagagggctctgcaagcctggcagcacactgagaccctctcagtgctagctgcagcctgagcaaagcagagcaaagctgagttgtccctggagaagtaggggcaagccattgactgagcagagtggccaaagggacattttcctgaagacaggccaagtggatagtgggaaaaatcctgcaggtgaggttggatccctgattcatttgcagaagtccactacgtgctacatcaactaatttgctccacatttgacctgtgaggaaggtgctattgctatgactaaccccaattttatagatgaggaaactgaggcacagggcggtcacagatcttgcctaaggtcacacagctcctgagtggtggaacctgaccccggattctgtgcttcgaaccacctgactatgctgataggtcccttggggtggctttgccacagcctcctgcaaacctggctcttgtcagagccatattccttggtggagggatgccagaaacagggaagatactggagggcagtggtccgaggccagcgcaccaacctgtcccccacgtctcatctcttccaggcctcgctggtcctgcaggtgtcctacacaccgctgcctggagctgtgcccctgttcccgccccctactcctctggagccctccccgactctgcctgacctggatgtagtggcaggtgggtagcccacgttggcctggctgggccccagcaagaaggccggcagtggcacttgagcctgggggctgggagctgcagcgaggcttcccagcctttgctgccctccccaggttggaggctgcccaggcctggaaagaagagggtgcagtgggtgggaagtcctgagggctgccttctgctgtgcagaaagaaggggcagcaggcacgttcccttgggcggtgcagggagtaatgtgagggtgcctccaagccccagctgcctggggacggggctgagcccaggctgggtgttctgagctgtgcagttccaagaagggtgtgtggggatggggtctgacccaggtgatacctgaggccccacaaactccccagaaccgaatgtttccctacctcagcacccagcaggcctttggtgatggtgtgtgacaaaagaactagttttttttcttgaaagagccctgaactgaacttcagggttccagtcctgcctttgacactgagtctctgtgtgactttgggctgattactttccctctctgggcccatagattatttgtgaagggagcagactaagttagctaagtgctgtgcctgtctcagctctcttcacttggttctgccaggctggtcaagcgaggacccagcccggggtggctggctctccactggtgggcctgggtgtgggagcctccatgtggtccagcctgctggggttgggaggaagctacatagacgggctagtgggcacttgcccatgggaaagattctagagtttttctcttagtgaagggagctagaagcaagcacagcattaaaaccggagcagcccatgtctcaattgagtgtgccctgtgcctgacctggggccagcccagcacagggctctgtggtgaggtcggcagagcagagctgtcttgttggggctcagcactgtccgagcttagagatgggagatcagtctggactggagtaacctggtaatcctgagctgtgtggctggagtgggctcaggggaggaaggagaggtgcccgtggtggcagagggtggggagcagggagggtccgaatactctgggactgtgttgaggtggatctgacagagttaggtgcaggccaatcagtggaggcttccagacacgcctgggaggtggtgagaaggaacaggtgccactgggctccacagctatttctgagctttgcaccaggctggggtgggcggggaaggcagggttggggatggaggtgcagtaggttggtttccttcaccccaacctcctccctcccctcccggggttatgccctgcccacaagacaggcgggggacagagccgggccgagacttggtccctgctcagtgacagcaccatggacacgagatactctggaaagaagtggccggcccccacgggtgagacacgggccaggactgtcctgatcccagaccctccctgtaactgtctcactagctgccatggtcagcttgctggagcggggccaggtggcagaggactcctcctgcaggacttggcgggtgggagggctagggccattctgttttcttcctgttgactaactggactgactgccctcaagtttcagctgctggaagctcctcttctttctaccttatccatcctggctcactgatggggagggaggagggagaggaagaggggatgagtcttagggcccatgccttttggatcttctgccccctgggctgggtcccaggggcaggggcaggggcagggccagagggatccaggcctcattagggccctctcctcttagacacaggaggagaggaagacacagaggaccagggactcactggagatgaggcggagccattcctggatcaaagcggaggcccgggggctcccaccaccccaaggaaactaccttcacgtcctccgccccactaccccgggatcaaaagaaagcgaagtgcgcctacatctagaaagctgctgtcagacaaaccgcaggatttccaggtgatgaacgggctttctctgaccccaggctcctcttcagccatcagctgcgggtgccaggcacctgcctggtttgtccagcttcaggggaagatgtgtgtgggatcctcagggccctcctgtgggggaatctgtagtttccctgggcctgggcagatgccaaacagggagttcacatcttacatccacagaataagcttctgccgagacctgtggttttgcgcttaaaaaaaaaaaaaaaaaaaaaagtcactgcagagattcagcatgtctttgcatctctgatcagagaaaaacctgatttttctaaccagggtatatccaaccagcaagctcctggctattcaggtgtggtctgtgtccagcaccttccgcatcacctgtatacttgttagacatgcagagtctactcagacctgctctaccagaatctgcattttaacaagatccttacctcaaagaagctctgtctaacatcttttttttctccttatatctatccccctgcatatagccatggatttttctgagagtcatgtggaatttgaatttgttcaagctcatcacagaataaaagctattaatatgaacactttgacacatttttatccaaaaatccatcccattttatttgcttttaactttggtcctttgcctattttttttttcttttcaaaagaattttctattttgatgtagtcacacagtgatatttaactctttacaactacttttaaggttaaaagcaagaatcttaaatctctatttataatactaagtgcaacaaattgcaaaaatatatttctattctaaatcatggtaatttaagcagaagtcctagctctaaccactgtttgccccaaaagacaaaattctagcccccatactactattccccaaacatgttcatattgcctttgttctctttatggaaataccatatgtttattttagacactttggaaaatatattaaaatgaggagattaaaaatcactcatccatcttcccattgctattaagaatatatcctcccatattatgcaatttacaaaaaaaaaaacagttggtcagtaaataacagttgattctaaagtggagccagtaaatatcttatttttttccatagaattgccttaatattgtaaaatttcatattttaaaatatcttacctaatatttggaagcatagacgttcttgaagtcttcatttacttacagctcaatggcaaaaattcttaatttatttctcagaatgtaagaaagcattgcatcttataaagaataaagactatttctggggtcacttcactgtgtaagttcgacctctgagggaattgtcaataaagaatattcaagccacttaaaaatgccagtatcaatggggtctcgggtggggcttgtgccaatggctgaatgacataaatgggggctgtatctgcccacccctggggtttaatgtgggtagccgacgaggggcagcctggcagctcttctatggagctgtggaattttatagatgtaaggggccttggtgggaaaatatgatagttcgtataatgctcttcctaattcctttttaatactttccccaagaagccagtggtgagatggtccctgagatttctgactcttggggtggatggtgggtggtccttaactcttcccccttcctcctgctctttcctccttctggctttcagatcagggtccaggtgatcgaggggcgccagctgccgggggtgaacatcaagcctgtggtcaaggttaccgctgcagggcagaccaagcggacgcggatccacaagggaaacagcccactcttcaatgaggtgggagacatggggcatgagggccagaaccttggtgggccttccaatctggaagcccagtgcagacacctggcaattcattcaagagtgtttacgtatggcgctgaccttgggtggtgagatgtgctggctcccaaggaggttatctgtgggactggagaaagggctcctgctcttacttctcctgctgctccacatccctgtcaccctatagggccagccacccacccaaccctgaaatgaccacgtctgtgaggccaggggcagatcaccccagaacttgtccaatccccagaactgtgcccaatccacattttctgaggggactaaactgctaggcgtggaggcttgggggtggtggtcctccctctccctggcctgagggatcagcaggcactgatatgtctctctttgctctgaaccaacagactcttttcttcaacttgtttgactctcctggggagctgtttgatgagcccatctttatcacggtatgtctcagcagtcaaagtgttctccgtgggctgtatgtatgcacataggtgtcagtgcacacgcgtgtgtgtttgtgcacgtgtgtgcatgtgcacgtcagtgtgaatgcgtgaatgcgtgtgtgtgcctgtcggtgtgtatgtgagtatgtgcgtgagagggagacgtgttaaagcctgacatatggatgatgtggagtaactcacagtcaggctctacgggtcacagaaatgcctgcaacagctcagctggcaggcagcagctgcgggagagcccactgctcagcatccccctggggcctcaggtcagggtccttaaatcacttgtggcaatgaacatttaaggttccatcttattttgttaatccacgtgcctgcttctgactgagattctctttctctctgggccttggctcttcccccatctcctctgaagcgcactgcagcctagtggctctaagtgtaggctccggcactagagtggattccagctctgtctatgccgtgtagggattgtgttttctgtacaagtctctgtgcccctatttcacctgtgaaatggggataatgacagtatctgctgatggggttcctgtgagggctaaacactgcttagaacagtctctggaattgagtaagtgtgaagtgttggcagttattgtttgggagggaagagctattgggttggccgtgtgggccacatgttccctgtgaatgtgagtttccatgatctttctctgcaggtggtagactctcgttctctcaggacagatgctctcctcggggagttccgggtaattgcttattttctatgaaagcagtcagttctcacttctccgtgttggtggagcctctgtggaccatgggcaggggctccagagatcctgtgtttctctgctttgggaaaatataatttcaaagaacaacgccaagccctctgcacagcatctcctttcaccccagaaaacctctccacaaaggtagaagagaaagaaagcactttttgtcactgaagaggccttaaaccagagtgagatgtacatcacaggcaatgatccactaagatgctgcaaagacagaaagaaatctcacgctaatttagccagcgggtccaacccattgcccaccacatacgttctcaagagaagctatgccccaccctcaggtcaggggactttacatttcagacctcctgagaatgacatttgtatactaaagctgacaaatggcttatttagtttcttaaaaagatgtatagcacctttggtcacaccgagttcatcccaaagtcacctggtaatcggggtgaccatctatgttagctaatttgttgtgtccagaagaccaaacaaaaatcaaactcatatttttatgacaggaagtagttttacaacttggagcaaggtgcgcacgggagttaggctcctatcttccgacagaagctgggacacaggggagccgtctcccttggtgtttatatttcagacgtcctgagaatgatatttgtatactaaagctgacaaaaggcttatttagtttcttaaaaagatgcatttcaaagagacagggaaagtgtaatatatttacaagttttctaaggtaagtgttctgacaaaaagagaggggagggaagtacttcttcccttatttccaacaagcagaatcaagacccttatttgtaatttggattttcccccacctctgggaaggccgtgtgagatctgagtttgggcagccctcctcctcatcctggccatcttgggccagtgagacccagcgctctctgccctgacatcactctcaccctgggatgggagtggggttcagatatggatccctgggggagggagaggcagtggagagaggggaaccctgccccagcctcctcacttgtcccagacagtccagaagtgaatagtcctcttctgagaaccgagagccaatggatttaacagattacgtaaagtaaaggtaactagtaattgcacagactaaaggagacctgtatgatttttttttttttttttttgagatggagtcttgctctgtcgcccaggctggagtgcagtggtgtgatctcagctcactgcaacctctgcttcccagattcaagtgattctcctgcctcagcctccccagtagctgggattagaggcgtgtgctaccacgcctggcagtttttttttttttttggtatttttagtacagatggggtttcaccatcttggtcagtctggtcttgaactcctgaccttgtgatctggctaccttggcctcccaaagtgttgggattacaggcatgagccaccgtgcctggcctgcatggtgttttaatgtaatttgatgtaattgttactaattttctcattttgaaattttcaaggatttctcaaaaggaaagaaagagcacaagcttattttcccctctcccctctatccaagtatatcatgccttccttctttaaatttgtattttaaatatgaatttaaaataaggggcttggttctgcctgttgtcagaagttaccttagaattatttattctgcccaataaataattgctgggaccaggcgcagtggctcatgcctgtgatcccagtgctttgggaggccaaggtgggcagatcacttgaagtcagtagttcaagaccagtctggccaacatggtaaaaccccgcctctactaaaaatacaaaaattagctgggcatggtggtatgcgcctgtaatcccagctactcaggaggccgaggcaggagaatcgcttgaacctgggtggcagaggttgcagtgagccaagatcgcaccattgcactccagcctggatgacagagcgacactccatctcaaaaaaaaaaaaaaaaaaaaaaaaaaaaaattactgggttggacctgatggctagatcagtgggtgagatttctttgtctttgcgctgtcttctcaaatcattgcctgtgggaagaagtcacaagataaaaaactaagtctgtttacctggagaagcattttttaaaagaatgagcttgagcccaagtcattctgtaacaaattaaatcttaattatgttttgagtcttgttctgagaacccaagggttaagtcaaaaaattattttacttgtatctaattataaaagtaatctatgatttaaaaaaaagacgactttttaaaacagactgttgtaggttcacagcaaaaattaagtggaatgtacacagttcccatatactccctgccccctgcccctgctgccccctgcagccttccccactatcatcatcccaatcatctgtggatttttaatagaaaattgtaaaacacaggaaggaataaaaaatgaaataaaaataatccaaatctaccatgcagggataacatagtcctattgtgttgaatttcctttcctcttttttttttgagacggatttttgctcttgttgccaaggctggattgcaatggcatgatctcggctcactgcaacctccaactcctgggttcaagtgattctcttgcctcagcttcccaagtagctggaattacaggcatgcaccaccacacccggctagtttttttttttttttttttttttgtatttttaatagagatggagtttcaccatgttggtcaggctggtctcgaactcctgacttcaagtgatccacctgccttggcctcccaaagtgctgggattacaggcatgagccaccacgcccagcctcctttcctctttcttttctgtacataagcattctttatcaaactgggatcaaaatatatttcattttcttttcatgtagtatcaaatgttgactgcctgtgtttccaaatgttcttcaaaaacatggtttttaatggaatcatataatgcaccacactttatttaacgctttggcggcaagagtttgatttgtgtctcctctcattgattgcagatggacgtgggcaccatttacagagagccccgtgagttctcaccactttggccgtatccttgcattttggttctggaggctgattggggacactcatttggggtcctcactgtccctcctgggggttttagaatctagaggaagggtttgatcttgggagagaaagcaggtcattcatcctccatgtgagacaggccctcgggagggtgtaacactcacctgtgtctccgttggcccattcagggaggctagatctgaaaggccccattactggacactgggctcacggcagacagggacaggtcatttgggtgacaagccaggatttctcctcaccctggtttccattctgatctggtcacttcctgaaggggaggaaaatgccttgggtttggctctgccagcctcttacaggcgtttctgttaatatttctgactctgaccacatgaacactcaaagtaccttttgattctagaatctgagtcctgagctcatggcccagcggatgagtcctttacctcccctgtgcagtccatcctgggttcccggatgtggccacagcctggggtcttctgattctgggatcaccagaggatgttgtctctcttagggcacgcctatctcaggaagtggctgctgctctcagaccctgatgacttctctgctggggccagaggctacctgaaaacaagcctttgtgtgctggggcctggggacgaagcgcctgtgagtacatttccctgggtcttccttacggtcccccacgcggcacttggttgcggaggcaccaaaccacaaacaaaaactctatttttttttctgatttaaactaatatgtggtaattaatgagaaatgtggaacatgtagaaaggtgttaataaaaaatgaatgctctgggtgcaaggtattaataaaaaatgaatcactcataatcctaccactccgagagagctattattgtctcattgcacatccctctggaaggatatatgcacatattttctttttgcaacagtgagattattctatatatattatattgtgacttgaatttcatggcctaagaatgtatcatgctcatctccacatgtcagtaagtaaagttataagttggaggtggtaagaatgagaaaaatgttgagagcaggagaggtatctgcatctttctatgtttgagaagaggagaaaaggtttggaatcatctttgtgggagaggagtgaggggttagatttaatgaaaggatttctgtacaaacaccagagcacccactctgggttggacgctttgtttgtagtggagccacttgcctcatggtgctcagcagcgcagaagcagaagagaggcaggtgggtggtggacgtgttgggtgagggcaagccaggagtgctgaaggtcaggggtgaggtgaaggtcaggggtgaggtacctgaatatggctgatggctttgtgcagggagggagaggaggacagggcccctggggtctcctgccatgcctcgtgtctcccccatcctcaccacacactggctccttggccacctggacgtgctgcttggatgaatgtgggtttctacttctccacttagctgggccccgggtgctgtccgcctcttcctttacctgggtatagtttactccttatctaattctcctcatctccttactccttatctctcctggctgttcccagactttcttccctttcctaagctccaacctcagcttcccttggagaggcagagctgcacagcgatgagtggtgagagctctgggagctcctgtggtcctcaacttgccccccatcttcatccaccttccctcccttcctccgcccctcccgctgcattatcccaccacctccttggccatgacttcacatcctccactgtcttctttagcctcctctttctggtctcttctcacacttgtctcctctgcctccttctccatgatctgtaccaggctcaagatttccccatcctaaaacaccccttccttgacccatttctccccacccctcctctccactactattttctctctctcctactgctggtcatcaccaacttttgaaagggtgcactgcatccccctttttccactccattgccagctgctcattccttctcctcttcagtaggaatcccaccacctcccctccctgaagccactggtgtaagggtcactcattaccatagcttaggagctctcctctgttgttagactgcaccactgctccatagcgttcgattctggagcccacgccttatttgaaactgtctcctcccttagtattcatgactctccttgctccttttccagtgggttcttcaaattcgatgttgcagttcagtccctgttcccttgctgtgtcctgcccgtcactgttgaggagtccgtctctttcagacaccacctgagacttgtaaattgctcttctccagcctggatcttctgagctctggacgctcagtttcagttgccttgtcatcaggccacattaacatgtcccttaggcccctctaacttattatagtaaatctaacttattatagcaaagcctgtatcatttgctgcccactccccacacctgttccccatcccgtattaggtgacatcttaggaaattgcatgattatccacttagtcccccaaaccagaggccagagtttcattctttacccctcaatccccatgcaagcagttggccagtcttgttggtggaaaacctcagtgtacgcctcttctttttcccatcccaagacaggagtttgaggtccagctcccactctctctcacttgggtctctttgtgaattacaatataggttcagctggtgtaacaaagatgccccaaataataggcattaaggaggacagaggtttatttctctctcatgaatgccacagtccagaattggcacagtgcttcggcaatgatcagagacccaggctcctggtcttttctccactgtgatcatcatgcagcctccgtcacatggcccaagatggttgctccagttcccatcaccatgtctgtattccagccagggaaatgggagtaaaggacaatggaggccacatctcttccttcaaaggcatgatccagaagttgtacacatttatgcttaggtcccattgacaagaacttagtcacatggccacatctaactacgagggagcctgggaaataaagtccatcctaatgctgtccagctaaaaattgagggtttgttaggggaggcagaaaagactggatttgggggaacaactagcagtctctgccatccatcctaagtgtcctctgaggtctcctaacttcttacgttatacttcacctatccccaccttatcaccagtcatctttttttttttttttttttttgagaaagaatcttgctctgtcacccaggctggagtgccatggtgcaatctcggctcactgcaacctccgcctcccgagttcaagtgattctcctgcctcagcctcctgagtagctgggattacaagcgtgcgccaccatatccagctaatttttgtatttttagtagagacggggtttcaccatgttggtcaggctggtctcaaactcctgaccttgtgatccactcgcctcggcctcccaaagtgctgaaattacaggcgtgagccactgcgcctggccgccagtcatcacttttaaacccaggtagaatcacgcgtgtctcctcttacaaaacctccagtgacttcccactgcttttaggatagagtccaagatccttagcatgacattcaaggcccttgacatttgccctcagcctagtttcccaatcccacttgctgttatgtatcttcatgggccccgtctgtggccacaccagatgatgtgactctttccagaatgctcttccatccctctctagccttttcccctgctggaatgccttccctctctttgcctaccaagagccaatttgttcttccagacccagttcagatgctacttcctccctgaagcttgcctcgtcttccaggaaaatgtattggtctttcctttgggccaccacccagccctttggtagtctaatcagtttatgtgtctgtcttcatcactgagattcagtttcttgatgatggggacaatatagcaaatgtgatatcttttatctcccctcttgcctagtacggcaggtcttgtacacagtaggtgctcagtcagtgcttattgtctaggggaatagacatttttatggatgcctgaaagatgattgttttcttctgatatgagctgaggagaataaacgcagaacacatccctttgggcatgctgtgatatgggcattctgggattgagggttttgcagcaaggatcctgaagcaggtttctacgtgtcaagtgtgactgagtgagaaatggggtgaggctagtccaggcaactgtccaaggagttggctgctgggcacagcctgaccttgctattctcctgtcccttcgctgctcgctagcccaagagcagccaccagatcttttgtctgttcctccagctgccgacttccccatgtgcaagggcctctgcatgagttgcctcctcgtctggatgcctccacctgttgctcatcatccaggtctcaagctgggaagcatttctgaccccacctcagtatagttacaagcccccttgctctgtgctctccaagcacgtgggttctgcttccagcctgtgttacacctcagctttcttatctgtaaagtgggggcattctaggtcttacacccagagcaacatctgtgggcaagcagcgtgggcatcacttggacactttttgaaatgcagaatcttgggccccaccccacacctgctgaactagaacctgcattttaattggaatgcacagcagtggtctagaagacattgattctcagcctctgttgctagttggaatcatctgggaagctttacaagccactgctgcatgggtactctctcccagaaattctgttttaattggtctagggtgtgacctgggtttcccaggtgagtcttttcttttccttttttgtttttgagatggtgggggcggggggcggtctcactttgttgcccaggctggagtgcagtggtgcaatcttggctcactgcaacctctgcttcccaggttcaagcaattctcccatctcagcctctgagtagctgggactacaggtgcatgccaccatgcctggctaatttttgtattatttggtagagacagggtttccccatgttagcgagctggtcttgaactcctgacctcaggtgatccgcctgcctcggcctcccagagtgctaggattacaggtgcgagccacggcgcccagccttccccaggtgtttctaatgtgccgccaagtttgagacccattcaagggaggggtgctatgaggattaaatgagagagtgcatacacatcaatgcatgtgggatgtgatttttgttattactgttccaaccacaagacacagtacatgttattggattcgtttgctgaaagtgttttccctgcatgatagtcagctccatgggaacagggtgcttattcatgtcatccccttattcattgccatatcccctgcccttcagcaccatacagacacctagtactcactcagtagctaatggctgggtgaatgaacacctgcatgttattaaagacagagtggccagcttagacctcagttactactgtactatgttttaaccgggaggtgggggagagcgggaaggagactgaggttggtggaatgcttgctgtgtgccacgtgcatttacatcattactggagatgttcctcgcacagtcctggaaggtcagtatcatggtctctgctgtactcaagaggaagctgaggctcaggtgaaggaccttgcccgagaccacgcggtagtaagtgtcggagcgcagtctgccttactgcagaatgcagcatttatgtggcgaagctggaactcttagaaaaggaaagtaaaaccctgtgctcaggagcgcatgaaggaatcgtatttggttttctttgtagctggagagaaaagacccctctgaagacaaggaggacattgaaagcaacctgctccggcccacaggcgtagccctgcgaggagcccacttctgcctgaaggtcttccgggccgaggacttgccgcagagtgcgtggggcgcgcccttgggtgggaggtctgcaggaggctggaggcgcagggctggtgggggtgggcgatggcgggcggggtcagctccctgggggaaggagaggcgtctaggaaaacaatcagaatttaacgaaaagtaatcagtgctggtggagttacaaagattcaagaactcttgagagtaatagctgcctctcagctccattccaatgtcctctgggcctggtctggcaatatttggccactctgtggacccattttcttagttctcattgagaagtcagcaccatctggactctattctggccttagggctggctctcactgattttccctccctctgtgaggaagcccgtcctgctagtggcagagctgggctggggagcagttgctctaatgttggaagggtttgcatgaaggactcctgggccccactgtcttcacagatgaaggacacagatccacaaggtgacccaccatcctagcttgcctgagactgtcctggttttagcactgaaagtgcctgttccaggaaaccctgcagtctccagcaaactgggacagtgggcacccgacttgcaaccatctcttcctcccaggaaggccaatgtggccactgcctggtttctcacagtggttggcccgatactagacccatctgtgtgtttagtaaatgctggggagttataccgaatattctagagctctggttatcaacctgggctgatagtagaattccctgggaagattcaaaacggtccaaatgccggggccccacctccagcgttttagattgactcgagttagggcagggctcagcattggtagggtttaaaggctccccaggttgttctgtggtgaggccccgctgtgagccactattttaaagcatgcattaacacaaccaagccactgtccacagcagagtcagtgagaaggtttgcaacttgggtccctggttacaacttttccataaaggtaactatttgagagtttctgcttcggctgctgacgtcaagaaatgaaatgtacaagcttacttagatcaaatcctgaagaaagcctgtaaataagtaatgggtattaattcagtactaaaacacatgcttaaaaatattctgcacttattgattgcaactagaagtgaggctggtgaacttcaagaggggcatggggaaatagaaatgtttgcttttcttaaggtgaaagagctttgtgttgaattccctgcaacgttgtttgaaaaaaacaaaatagatgggcaaacagatcataaatgtttgctaattgttgttgccttttgtattcatgtagttattagctagcgtataatctttatccccctccacttacttacccactcatatgtctgtaaacataacatgctttatacacatatgtatgtgtatacacataaacatatctatctatctgtatctacatatataaataatctggctgattcaaaaaataatggtttggggcagcatagattaaaaactcttaaaaaaaaaacaacagaattgacttcttggttaacctcaggtaaatcgctgcgctaatagatttaaaggaaaatgtcaaccaggcaccaataatgggatattgttataacaactgccagtccttttctgagtacttactgcccttagtgatgtagatttctaattagtcaggcaggtagatttgatctgaaaggctttgaatgcagggtggggacagtgaactgagctgtttgggactggtgacaaagtggcccggagctctcaggagttgctgctctgagacagtcctccttctggggagcccctgggctgagtccctgtgtgaaggggccaaagcttcttgctcaggtagtcccaggactgcctggagacagatgggggacagtcagggttttagaggagagacagcaggcaggcagtgactggtgtgtccctcttcccagtggacgatgccgtgatggacaacgtgaaacagatctttggcttcgagagtaacaagaagaacttggtggacccctttgtggaggtcagctttgcggggaaaatggtaaggagcaagggagcaggagggttctctcgggaggggactttctggtgccctgtggactgtgccgggtgagagcaagacagagtgagatgcccccaccagaggtgtgtgcacaaggagtggctgatcctggtgcgtggtgagacacccacataggcccagctctcagggactgccccgcacacgaatgtggacaggtctgcctgggggtgtcccagacagacacatagatgtggatggcccaggagaggacgttggatggtggatagtagaggaacatttgggggaaaatggagcaatagcatggaaaccagacatgaaggcataaagatagagaaactatattttaaagatgtgggagaaaaacataatggttatttaaaaaatgttgtgggggtagttgggcagagaaaggcccctctggtgggcaccctagcctcttccttgcagcccaccttcctgccctgaggcgggactgtggctccagtccctgctgacttctgtcccagcccttctctccacacaggctgcccaccccccagtgtctgtgcaccccccacaggctttcctggcagccccagccctcccaggcttcagccatcacctctctgcagagaactccgtagctctccgaaccctcccttcaaccccaggcctctctgtgcctctaaacagttccgcctgctgcccctctgagccctggagggagtcattttctctgcacaaactgccccatatccaaaagcctctgtcttaaccaggtacaaccatcaaaggcagaaaatgtggacctgccttgattcttccttcttttttctctctccacatcccacatgctatctctagcttttgactttaaacttgtccccagggcccatccctacctcgtgcccccacagccactgctagctctttccaggagcattcccttgtctctcaactcatggcattgaatttttgaacagcccaggccatttgtccaagtactggatttgttcgattgtttccttctgttgtttaacttgtttctctgactcctctctttcctgtaaactggaagttaggtctagagactccattagattcagatgaagtatttcggcaagaactcagagtagttgatgttctgcatgtcatatggcatcacaacagagagccataatgtcaggttgtcccatcattagggatgatcgcctgatcacacagttaaaatggtgcctccagacagctcccttataaatcttcccactttgtaattagcaagtaaactgtgggtgatatcttggcactgtacggatgtcctacttctcagctacctcttatctaatggtctaagcatccattgaccttcctgtctgaagaagtcatttagttgggactgcaaagtggtgattttctcattatcattctttttctcttgattagccaacatttttttctgtaaagaagagctttctccctccgcttcgttgagtattagtatggacctcaatactttttatttctaatgttaaatcagtcattattgtgttgatgtatgaattatactgaaggtggccatcaggagcccctttgagctgggctctctctcctcagagactagcacagggtcccagtgaaaatgtacacggggatgtaatgcagattttaaactcgttcatgtggaggtgtaaatgcttactgcagatcctcacctgagtgcaggttttggtgtagactcagggtccaggtcttacgccctgcgcctggcatcaggaggaatggggacagctgcttgaaggtaggaaggaaacaggaagctgcggctgtacgtttttgtgggacactagctccaaggactaggattaattcttccacttgacacttgggggaattcacgtcctgagattgttcttatttcgcattcccaacatggaaggtatttcgatggtggctagaaccaagaccgacatgccttcacattcattggaactaagcctcagagctccggggctccgggctgctcctgggtccctgccagcatctttgatctccctgggtcttctgttctgagatgcccttggctggccctggggatttctttaggaaggtaccagtgtctagggggaggtgaaaggacaaaggcagccaaggcaaggcactgtatacagtagattggcatctgggctcatgcaagaagctgcgcctcccatttttcctctagaaggaggtggagggagttgaagaatgaccttatggtgaaggaggcagctggaatgctccgtcttgaaagtttcaacctggccagcctcctcggtggaccccaggcctttgcgtcctctctgccctaagccacctccttgtggcgtccccgcttctgctgctcttatggcgtgtctcattctgcctgtccctctcttttagcctgcttgcatgtcccttttctctctttacaccctaagctgaagagccctgaggttacattctgtgtacccacccaccccagctggccttctttgcatttccccttatggacacctggtggcagtattatccaagatgtgaaccatacttgatttggccaagttcctaagaagataggagtgtgggagagtgtgtgcgactgtgcacttcatggtatggaagaaagaaaaggtcctgccctacttgtagggcaggacaggaagttttaaaacaacttttttttttctgaattcaagaataaaacccattaattgcaaaaaattgaaaaaaatcagagacaaggaaaacaacaaaaactcccactgcaccatattctgtaccctgcaccaccctggagagaattactgataacattggtttgtattacctaccctgttacttcccctcttcccacttgctgggaaaaaatcatgaaaatattgattttccttattcaaggattctgtatttgccaatttgcctactcactaaaatgtatttgcaagcccaaaatcaacactcatggcactttagtgatgatttgtggacactttcagggctttgaaaaatttgagtctcccagcgtgtatgttggttgctgaggttgaacaaggtgactctctgcctccccgctccaactctcatggagtaaacatgacatgtccatgatcaaaggacatgtatttactccacgagagttgaaacagggaggcagagagtctcaaaacatggtactgcacaggacacgtatcaaaggacacagacaaaatgtgtgtcctttgatatgtgtcctgtgtagtctcatgtttttcacatttttgtgccttttcttggcgacttcgctgtttaaaatggccccaaatgtcgtgctgaagtgctgtctggcgttcctcagctcagaaaggctgtgatgtgttttatggaggaagtgcgtgtgataggtaagcttctggcaggcttgagtcacagtgccgttggctgtgagttcaatgctgatgactcagcaatgtatattaaaaagtaaggtgtccttcaacagaagcacacataaaccaaggttacgtattgatcagttgacaaaaacattgtgacagaggctgccaggaatttaaccctgcttcttctctgaggtaatgagtcagcattcactaattcagggttcatggtgaccttatagatcataactaccatgaataatgagaatcaactatatacatgcagtttggtaaactgcttgtgttgtctcatcttttcttaggttattaaagagtcattgaaatgattttttttgatggctgcataatattctgtcagatgagtataccataacatttgacctattttttggacatatataattcaaattttcctcttttataaacaacattgtgacaaacatcagcatacaggaatctttgtccacactctgattgcttttctgtagggaagtttctagaattggggctgttaagccagggggcttatttttaagtatttgatacagatggacaaatagccttccagagagagtgtactaataatactccattgggtagtgaaggaaggtaaagaaaaaaggtaaagcaagaaaaaaagagaagcagaggaagaggaagaagcagcatggtgtggccctggctgagtgcctgtgggtggaacaggatgggggaaggctggcagggatctctggggccacaggcagtgctggctggggtgtggcagatggaccagctgctgttcaagcccccagacccacatcctggtgaaggtagccaggttgaagtgtttgcgatggaggagggccagatgcctggggcaggggctgaagtagcccgtgtgcatcctatgtgtgtgttggggcagcctgtgccttcttattccagggacctggggcacagagttggcagggctgctcagctgggtcttgttaaagtatcttattttaaaattttgtttatctaatttttgaattaggtagtacatttattctatctatctatctatctatctatctatctatctatctatctatctatcatgaaaaatctccctcttgctctgtaccccatccaacaatcaatccatttcttccttttcaaagaaaaccactgcaattagtttcttttatattattctggttttgtgatgcacgtgtaagcaaatatgactacagattctttcttcatttttttttgagatggagtctcactcagtagcccaggctggagtgcagtggtgcaatctccgctcattgcagcctctgcctcctggattcaggcaattctgatgccttggtctcctgagtagctggtactataggcatgtgacaccacttccagctaacttttgtatttttagtagagacagggctttgccacattatccaggcttgtcttgaactcctgacctcaagtgacccacctgccttgggctcccaaagtgctgggattaaggcatgagccaccgtgcccagccgactatagatttttgtcttttaccttttagcacaaatggctgcacatcacaccactctgcgccttgcttttttcacttaatcatataacttggagatggtttcacgtcactacctagaggcatcctcattctgtttgacagctgcctagtactccattgtacggacggaccatacttcatttaacctgctttccattggtggacacatgggttgttccaaatccttgctagttcaagccatgctgcagtgaatagcctcacacatatgtcattcctcacatgtgcaagtatttctgtaggatgggtgtctagaggtaggattcatagggcagtgggaacatgcatttgaaactacaatacatagtggccaattgtcctctgaaggggtcaaactattttgttttcccaccagcaaaacatgagcatgcagttttcccatagccttgccaacagtggtctatcagactttagagatttttatgaatctgatgggtgaggaatggtattttgttggttttctttgtgtttctttctgagtgggatgaagcatctttttatatgtctcaaggccttgcgtcttcattctgtgaactgtctcttccactctttgctctttcttccactggattggatcgttggtctctcttctttccttactcctctctttgctaactaacacaagggccaaatcctggcactcagccccacacccagccctgtgtggcctttgtctggggctctttttacagggaggagggggaaggtgggggcaggggccagcactgggtggaccaggaatggagacatcatcctcacccctggggacctgaagtctctgatttaagtcagatgctcattaaatgagataatgcacatgaaatgcctagcacaatgcagggcttatcatagtaaatgctctgaaaaggctgctcattattttcatgtgtagaacatggaaatctaccaggatctgtgtatctgaaactgagtctttacctgctgcccccgtgtgtgggtataggatccctggggctggctaaggggcctggtgttccttatggactccaaggccagggctggcctgtgagctgctggtttggatctggtttccactcctgtgaggtttcttgtttgggaaaaacctggtctttaggacagggctggttggaggcagactatggcttatagggtttgtatcttcactgaattttctttcactctctgacctctgtgcatggctcccctctcccatctctgatctcctaggggtcacagtcttcctacatggtggatgatctggggtaacgggcaaaagagccttctgggccataagggcctctgggaaagctggtctggactggactcagggcccccacatttagggtcatggccataatgggaggtatggagagggattttcagccagaggtgtgagttaagggtagaagggctgtggcattcagacagcccaccccacccttacccactccccagctctgggtctgaccttccattgagctttgtctctgcaaagattccctgtgtatgaaccccctgcactaggccccaaccccagggtcttacacccagccctaagggcagccagcatggcagagaatggtcactggctggcatgtggccccgggggagcccagagtccccatggagcttgatcaacttgtcccctccctgtgtcttctagctgtgcagcaagatcttggagaagacggccaaccctcagtggaaccagaacatcacactgcctgccatggtgagcctcctgcccccagcaaacccaaggaggcccctggggctctgggcttcgggaggtccagggctcctgcctccccagcatcctgccagtatcccagacttcagctcggggtagggaggggctgttctatcttcaaaaggactcttctcccaacacgcctctattccttcctcagtttccctccatgtgcgaaaaaatgaggattcgtatcatagactggtgagttctgagtcttggagtctttagggcgggctgtcctgagggggcgctgggtccctcagtttcattcggctcagtgactggtagtaagagtgtgagggagaagtttcaggtgaggtaatgtccccttggggtagccagggatggagagggtgtgggcagttcctcggaagcttactcacacctgcttgttgggaggtaggcagataaggaggaatcatctctgagggcagaaggagctgggaaggcttcctggaggaggtggggcaggtgatggcccggcaggaggggtggggttttgctaagctcaccatgaggacattccagtgaggagaggctcacaaactaagggaagggtctgaaaagagcagagcttcagggaggatgggctgcggtgctgccctgggttggtgggatgaaaaagtagggtccccaggctggaggagccgaccagattgcctgagcaggggacaccacggcagctgtgcagcaggtgaggacagcagctcacgggcgtcttagaaagaccacagcatctaatacttgttgagcacctactatacaccaaaccttgttcccagcaagcacttgacacgagtcatctcatctgaccatcaactcaccgacatcagttcacagatgagaaggcaggttgggaaagactgagtgacctgcccgagctgacagctagctggaaagtagctgaggccaggcttgaacccaagcctgctgtttccaaagcctgcgttcctaaccactagtccatgccacctcctgctagttgaggggagctgtctcttacacttgaggggaatattcggggtccacacgtgtgatctcagggcattgggcttcccaaaaagagagagttgtcctttctttgcccccaagaagtcttggctttgtggttccccagcgtgttctcctctggtctcatgcccatgacacccccaaccaggaggataatgagagactagggaaaaacccccaggccacagagccattaagctgtgtgccagttccccaggcctaaagaaaacagcttgtgagaattagaggagaggaaagagagccgccaggagggcctgtgagggagaggccgcaagggcagcgaccacgggtatgtactgtggggaagcggtttggaggaaagatgtgctttacatcccagaatgatctcttcatctccgctctccatgtgtgccgctctgactgcgggcgatgagctgtgcgtgtctctgcgtgtttgcgcatgtggatgtgagtgggtgcggttgtctcctgtgttgtggatgtgtctggcccgagtccgggtgagctgtgtcaaaggcatcggcgtactgtacaatccaaacacattacagaatctggtggttgcatctctggtttgggttgaagtggcatttttattgtgagtctattttcagacttgctgtattttccaaaagcaaccccaagccccaaaacccagctcttggccagaaagcattctgctgcttcaagttcctatccagaagagtgctttcttcccagaaaatgcagataagctcttgttattacctgaatcctggaaataggatatagtccatatggccttttctctgtaacttaatcttccatttaattcttcagaaattcctttttcattaaaaaaccaaaccaaacaacaacaacaaaaaaaccccaaaccaccccctacctccataaaacagaacctctctcctcccactctccttccctcctctcccaattcagagaagactggaggtcagaaatccaattccttttcaagtgctgaccttttctagggtttggtcatgaagactgggtacaaatgccattaactgtcactcatctggtgctgagaatatcactgtaaaatattgcaggaaatttttactttctagttttgtttttttttttttttttttttttgcggggggcgtggtgggaggatggagtttcgctcttgtcacccaggctggagtccaatggcgtgatcttggctcatgcaacctctgcctcccaggttcaagcgattctcctgcctcagcctcccgagtagcagggattacaggcacacaccaccacccctggctaatttttgtatttttagtagaaacggggcttcatcatgttggccaggctggtcttgaactcctgatctcaggtgatccatctgccttggcctcccaaagtgctgggattatgggcgtgagccaccgcaccctgcttttcagttcttattaatatcatttacttggaaaaatgatacagatctgtctgtgctgacaattcattcttcctaatgtagtgccggcgatggaaaactttaaaaatcaaagcttaatcacctccctgggaaatacaaagaggaagaaaggagcacagaaattgtgcagagattagggtaccttgtagggttaggatttcaaagaaaaattgaagcaccatgccagggtatgcctttcacaatggggctgggatgtgtcatctgaagctgcccatggctaaggcactcacaacagggagagggggtctacggggcaccaagaagaaggggaaattacccaggaggaacttcctgaaggagatgggtcctgcccagcccagtgtttctcagtgtctgcatcattggcatttggggctggaatattctttgctgtggggttctcgacctagtggttttgaccgcaggtctagcctacccgggaagcagcaggtggctgcaatcaaagctctggtctccacgtcagcatatctggcctcaaatcccagctttgccatcttggcaaattatttaaccttctcaaccttggctttctcatctgaacttggggctaattgtagtacctacctggtagtgccgatgtgagaatgagtgagttaagtcacctgatggttttagcacagtgcttggctcttagtacgtgctcaataaatgttagctgttactgtttattattatcaaaggaggcaggagtggggttcagagggagggtctgcataggatgtggttggctaataggtgaatcaagcagttaacctccttgagctcctggccacagtcccctaccctggttggggagccaagaagtgtccccctggaagcaggccctatgccatgcaggagcaatgttccaggagtcaggacgccagggcttccggcctgggcttgcccttcctctcctgatgaccttgggcaagtacctacatggctttaagcctcagtttcctcatgggtgcaacagagataataataaaagtgcttgtttctcaaggctgtgtgagcctcctgtgtgataaaggctaaaagtgccccattacatacaaagtcagatacaaaaaggaatcgtgtattaccattggctacttcaagactgtggccttggagatagtttcttcctggtcacctagttttctccttgatctggacatttctttagctcctggagcctctcagttcttcctgggtccgggaacctggctccctgaacaggccagtccctggccctgcctccttgcctctggcctcctccctgtcagcctgcagatgcgtctgtagagatccaggctggcagcctgggtttggttgcctgatgggatgctggtggttggcgagatgaactagttccctctcagagagtcttgggcaaacctcctgtgcagtgtcttcatctctgggattaccaggcctcagtaacataccaaagtgaagaccagaagcgctctctgcctgccccccgcccccctgtgatgtgtaaccgaggccgcatacttcctgggtgggctgtggcctgcagttcctttcctgtgttcaggccctctctgctcccttgctctagggaccgcctgactcacaatgacatcgtggctaccacctacctgagtatgtcgaaaatctctgcccctggaggagaaatagaaggtatgttccctcttcgttctgccctttgaccccctgtgctctcccccgtaccccctctatccagcttacacttctagttttgagagtttgcagaaaaggggagattataaggcctctattgcccattttccactgagaagagctctggcaatgaaagagatgtcttacagacacttagggttctccacacttggattgtgggatatgccactgaagggcacaaagaggataattcactcctgcagagaatattggctggctgtggccatgccatccatcaggtcctgccttggccgactgtgctctagcagtttcaaaagctattgaaatagctcttactgttctattaaaaaagcaactcatcatcattttgtaaaattttaagtaaagaaataatctgaaagaatataaaatttacctgaaattacccataagcccacccctccggacaagaactattagcactccgagacctttctgtatgtatgtatatatgtatgtatatgtctgtacatgcatggaagatgtgtgtatttaatacatgggtatgtgtatatatacattagaacaaattgttttgaaaattgctttttgatacttgacaatacaacatagatatcttttcctgttattaaaagttcttctataatacaattttaagtgaatacacatattccattatgtgaatgtatcatgatccacgttaactagttaatgatgaacatgtaggtgttttcaaatttttccacattataagcaactaaattggcaaggaatatttctgtagctgaatctttatataattcatgagtttccttttggataaatacctaaaattggaattgctgtgtgaaaagatttcaactttttttttctttttttttttttttgagatggagtcttgccctgttgccaggctgcagtgtagtggcccaaactcagctcactgcaacctccgcctccccagttcaagcaattctcctgcctcagcctcccgagcagctgggactacaggcgcgcgccaccacgcccggctaatttttgtatttttagtagagacagggttttaccatgttggccaggctggtctcgaactcctggcctcatgatccgcccacctcggcctcccaaagtgctgggattacaggcatgagtcaccgcacccagcctaggatttcaacatttttaagacttttgatatttatcaaaattgcccttcaaaaaggctggactactttatgctctcatcatgcccctaggcttattttgctataccctccccaacacagggtaaaataataatattaaaaaagaactttgttaattttataggtcaaaatagtatttcattgttgccttaattttcattttattgatagctggtgaagttgactgatttcaatttgaatatatttaaataattattttatatttatatataacatgtttatataatttatattcattctattataaatgtcttatttatgttctcagtccatatgaggaaatgtttatctttttctcatacctttgtaggagttctgtatatatatggatattaacttttcccctgtcatttatgtagtaaataattcttgttggctttattttaccaattaatagtttttgacctatagaaatttaaaatttttatgtagccaaatctgttagtcttttccttagggaataaggcagggatctagcattacttttttcaaaattgttctttggtgatacaaacactgtattttgagtaatcttttccctatatttcgaaatgctgcctttatcacctactaaattcctaaatgtgttcttgggcctgttcctctattatcttcaattggtatgtctgcttattatttctttggttttgatatctgggttatgctggctttgtaaaattaattgtaaagatttaaagtcttctctaacatctggaacagtttctataacacaagaatacagtcctttgagggtttgaaataattcacccataaaaccatatgggctgggtgccctttttgagtgggtatagtaatagctctttaaaaacttttcaatttctcctgtgatgattgttatttttagtttgtcacttttactctagtcaattttgataatttatattttcctagaaaagcatccattacgttgaggtataatttatttacatagtgttgtacagagcaaatttttataatttgaataattctctctacctgtggtgttttactttttcttatttctaatgctatgtatttgagttttttttttcttgattagctggttagaagtttattttaaaactttattggacttttaatctttgcactctttaactgtctttagactgattttattgtttccttctttaactttatagcttcttgtctttatttttaaaatttcttatttaaataatgaaagtatggtttctgccttctgtgtcatgctcaaaccctaaggttcagcagaccctaaggttatatttaactctattaatttttttttaacatttaaacatttgatctattttgaatttatttttgtgtgttttctgacagcagtctgatgtgattctttcatagttagtctatttttttttcctgactagatgctgctcataggaatttatcttttttcttatagtttagaaaattattttaatctatcttggtacaggacactttccattgaattttgtctgagacatgatgaattcttaaatccgagttgaggattgttttttaaaaattctgacattatgccatggacagctgaaggcagagtgggggagtggggagagctctagctctccagcccaccaacttgggttcaaatgctcttggctctgcttctttgtaactgagtgagttgctccagtctccgtaaaatggggctcttacaagtcccaaccctcatgaggcggttgtaaaaatcatgaggttataaaagtaaggttcttataatgtctagtacacaataaccttaaagtaacatttgctgtttatcatcattaagatgggctttctatgttgctaatctgatttttttctgtaccaattctgccttttactgcttcgtacatggtttaaaatgggctattgcatttgtagtttcttgtcaagccttctttttttttttttttattgatcattcttgggtgtttctcgcagagggggatttggcagggtcataggacaatagtagagggaaggtcagcagataaacaagtgaacaaaggtctctggttttcctaggcagaggaccctggggccttccgcagtgtttgtgtccctgggtacttgagattagggagtggtgatgactcttatggagcatgctgccttcaagcatctgtttaacaaagcacatcttgcaccgcccttaatccatttaaccctgagtggacacagcacatgtttcagagagcaccgggttgggggtaaggtcatagatcaacagcatcccaaggcagaagaatttttcttagtacagaacaaaatggagtctcctatgcccacttctctccacacagtacacagcaacaatctgatttctccatcttctccccacatttcctccctttctactcgacaaaaccgccatcatcatcatggcccgttcccaatgagctgctgggtacacctcgcagatggggtggcggccgggcagaggggctcctcacttcccagaaggggcggccgggcagaggcgccccctacctcccggacggggcagctggccggacgggggctgccccccacctccctcccggatggggtggctggccgggcgggggctgcccccccacctcccggactgggcagctgccgggcggagacgctcctcacttcccagacggggcggctgccgggcggaggggctcctcacttcccagacggggtggctgccgggcggaggggctcctcacttctcagatggagtggcccgttagagacgctcctcacctcccgggcggcggaagcgctcatcccagacggggcggcagggcagaggcactccccacatctcagatgatgggcagccgggcagagacgctcctcacttcctagaggggatggcggccgggaagagacgctcctcacttcccagactgggcagccgggcagaggggctcctcacatcccagacgatgggcggccaggcagagacgctcctcacttcccagacggggtggcggccgggcagaggctgcgatctcggcactttgggaggccaaggcaggcggctgggaggtggaggttgatagcgagccgagatcaagccactgcactccagcctgggcaacattgagcactgagtgaacgagactccatctgcaatcccagcacctcaggaggcggaggctggcagatcactcgcggttaggagctggagaccagcccggccaacacagcgaaaccccatctccaccaaaaaaatacgaaaaccagtcaggcgtggcggcgcgcgcctgcaatcgcaggcactcggcaggctgaggcaggagaatcaggcacggaggttgcagtgagcagagatggcggcagtacagtccagcttcggctcggcatcagagggagaccgtggaaagagagggagagggagaccgtggggagagggagagggagagggagaccgtggggagagggggagggagaaggagagggagagggagagggagacggagagggagagggagacggagagggagagggagagggctcaagccttcttttttccctgtcactccttttatattttcctttacttctttgctcctcgtctgttctctcccggcagttctgctttgttccacaaaaactacatcttcttgtactctactgaggattccaaatcattttctgtaatatgcaggtgaatgctttcctgaatcttatggatgtggtttccatatcctggttggctctctgccctctccctgctttattcactctcccacaagatctgttcagtgttggtatctctcacagatagggtgtgtgggtctttctctgtccatccatctcctcagatctttagctggaggacaggttaacgtgcccagtttctggccgactctacccagtgctcttgaagctggagatcgtctccagattctagatctgtaggagacctctaggagttcttctcctagaagaggagactggaggagataccatttttaaaaatgttctttttttttttttttttgagatggagtcttgctcttttcgcccagcctgtagtgcagtggtgtgatcttggctcactgcaacctctgcctcctgggttcaagcgattctcctgcctcagccttccaaggagccaggattacagttgtctgccaccatacctggctaatattttttatttttagtagagacggggtttcaccatgtgggccaggctggtctcgaactcctgacctgaggtgatccacctgccttggcctcccaaatgttaacatcgtttttaagcaagacattgttaacttagacttctagctgcttgatgtcctcagatccttccgtaaatgtaggcagctatcagaggcatgtacctgacattgtttttcattcacttcattcttttaggagatgcttattgaacatatgccttctgtcaggggctgggcatagagggttgaacaaagtattcttggtctcaccctcagggaacttagagtcctggcaggcgacaaacaaatagacaaataaaaatatgggtataagttgtcttaagtgccctcgaagagaaggacatgcatggtgaaagagaataacagagtaggggagagctgcttctgcctgacagaatcaaggaaggcttctaggaggaggtgtcttaggctgccagaggggaagccaccggcacgtgaggagtaggaaagagttccaggcagaggtgatgacatattccaaggccatgtggcaagaaagaaatgaaaagactggtttggctgagttctctgaaacatttaaagggcaacttttaattatagaaaatttcaagtacacgcaaaggtagagaattgtacagtaaactcccagataccctccctgagcttccacatctagctgctctctgccttctgatttccttgttggaactttggactagtcccagaaacgaccttcctgaaggcactgcgaacttcctcttcctgccccagcccctcccttcctcgctgggggaacaatctgttccgggatgtggccccttcactaattgctgttcagatagtttctaaggagggctgtctcctgcacaggtagagagatttgggggtggtaatgcagacagagggtcacctcacaggtcagtactcttggtatggaaggaacctcgtcttcagttttctgactggcactgtctctcatctctcaatccaggggcagacagtggtgggggcacactgtggcatttctgactgttttccgacagttgtgtttcatgacgctgcagccgtgcctaccaccagccccctgatggagagttaacatcccccgacctgtcttcatttctatgctgtgtgagccctcacctttctctgtgtccgcatgagtgtgttggtgggaaggtaagaaagatgtttatgtggtcactagatggcgctcaggtcacgggcaacccagcatgctgcggaaggcattcaaagtcgggaccaccttccatcacagatggttctggaaagaaatgagaatcttcttgcaaccagctaaccggttttgaacatgcagttaaatagcttgatttaagtggcagtaaaagagttaaacttgtgcatccaactggagctgtccttgatgactctcggactctgccgacccgttcctgcagaggtgggtccctttctggggccagggcctctctccggccttgaggtcgggcccttgccttgctcgggccaagcctccccgacttgcctgcagccccctcagaacgcgtcgctccaactttcctttcagcccttttttatgttgtttctccacgttgtgggcttgtagcccattggggtgatagacaacacttctatttcctcactgctctcaaagaccaaatgaaactgaactgtaaaaacaagttctttctctgtatttccccgcctcagggttcaccagatgatttggttcaactagcagtttttgtttttctgtttttgtttttgtttccagtgagggcaagacctgacactaaccttttaaacacctctgcccacaaatttgcctgggcgcactagagtgttccttggaccctgtgctctgaagtattaagtaagaattttgttttttaaaaaagagtgctttccttagaagctgcaggtcttttgagaggtaacaggcacgtgagctctgtgaaacatacacagattctttgataactttatacataggaaactcatgctccataaatagcacttgtatcctagtgttttccatagttaagaaatccaaagttagtctccttttgtctctggaatgtagatgatgctgatttcccagcagttttcagtttctcctcttgcctggcgcaagcgagagtcaggcagccagccgccatgggcttggggatgtgccgagaggcagagggagctggcggggcagaccgcaggtgatggcctcagcttcttcatgcatgttccggggactgtgtgcagggctgggacttgtggctcactgggctgggaggtcctgctgtctatctccttcagcttcccccaggtgaggcagctgggcttcgttgctcgggccacagaactgggagcattcatctgtgttttgggcttccacagccccagcttcctgggctgagggaaaacacaataaaacacttgtgttttggcagaacggtgatgtggactaaatagaggctttgtcttgggtggcttcactggtcactgtgctcttgaactgtctgcagacacaggggcgagagcccgggatggaccttcacacccagagactgcgatccgcccccaagtcaggagtcattgacctaagacaccaacagggctgtgtcttattacacattcccagtgcctcctcctgcacctggttaggcttgctgaatgaacaaatgaatgaaagaatgggtgaattaggttgggtgctgtggctcacacctgtaatcccagcactttgggaggctgaggtgggtggatcacctgagttcaggagttcgagaccagcctggctaacatggtgaaaccccatctccactaaaaatacaagaaataggtggtggtgggcacctggaatcatagctacttgggaggctgaggcagaattgctggaacctgggaggcggaggttgcagtgagccgagattgggccactgtgctccagtgtgggcaacaagagcaagacactgtctcaataaataaataaataaaaagaaagaaagaatgggtgaattaatgaaaaggtgtggttgcgaggcaggctgcttcgcagccacccacttgatcctctgagccaccagagccatgtgttggtcagatggccgatgggattagggggacatctgcatctgggctggacaccagtctgcagccagaattcaaaatcagtctgggtgggaagccgactttgcctctgtaagaagcacatgggggttggaactgtgaccttggcctcattagcccgagataacgggccaggcctgttagtaatcatttagaaggagcttaaaatgtgatctgtttgcttccggtggtccctggccactgctctcctcgggcctgcagctgtgtctgtgttggccctctcgctgttgcagaaaactccccatgagcagagccctggctcgcccacagaaggaaacctcttgctttggagatgaaggtgaccatgaactatgatttttgcagccctggtgtctgctggctggcattcatagctgaggcctcgctgaggagggctgaggggctgggccgggccctccttgctgtctttgccctgtcctcactctggatggccacgctcccttctctcttctccactctttctgtgtctttgtgcattcttccttcacaaagttttcctcaacccttgacttctgactgcagtcacagagctaggggcaaaacgagtgttttctggaggacagcaacaggtaaaggtgaacaaggaagggaagtaatcagcaagttcaccaaccacatcccgggtgtgcacgtgacctcagactgcgttacactttactgttggagaaggagaatgggaagatcagatttgggaagaggcagaaatcagagaggacagtggaggaagactgaggggtgtccgtttccttggcgcatcgcatacctgcctagcagtgagggacagattcagagtccatacatgtgccagagcatttccttccgtgcttttcttatttctagacattccttaccaacattcaggggcacacccaagtgtgtagcgtgttcagcttgtggacagtgtctggctctgtgattccctggaagcggcctgtgtcagaagccagatgccagtgcctgctgttgtgaaaacgcaacgtggagccttcaggggggtgatcctggacacggccactaggtggagatgttgtgccttgaaatgtccctgctcggcgcgcctggtcccaagcacgacctgcctgcgggcttggagtgtggggtgtgccttgctgcctagctctggcccttttgtgtctccccaccctcccgttgtgtctgtactttgttcccctcacttatctggctatcatatggaaaagcacattttcttttctgaattattccttgagtgtattgaatcaagtttcgggtctggttttcaactggcaaacggaacacacagagtgatgggcaggccaggtgggacccccagggctcatggggtgttgggggctgcgtctggaggggccgtgatgatttagtttatgataaattcacagctgggcagagggtggggcctcgggccacatctgtttcacacccgggagctgtctttccatctgtctgcctgccagctctccatccacagcctgttcatgtaacccgtccttctcccagccatgcccaccctaaccccttttccatttctttacgcttcagaggagcctgcaggtgctgtcaagccttcgaaagcctcagactgtacgttgctgtcaccttggggacaaccaggggagtggggccttgggttttggctagaggggcgagggtgctggaggcatggggtttttgatttgcctgaggtgggattgagattcccccacaaaggtaagtccctggacttacctttgctgtcacctctcggcctctgtggagcatgtaaatcatctggaatgctttaaggggcaatttcctcccacttcccccaacccttcctaaatgggataggcttgggctgatgctcgagttagaccactctgtctggtagtgaggggtaggggcaggcatgggggtctggagtggggcagggggagtgtgaggtgtttcaggggccaggaggaggccaagaggagttaaaaactcttggagttgaaatccccaaggtaaatcataattgagatgattaacgcaaataattagtaatgctcctgttagcccacctacctgggcctcccacctctcctgaaggccagtgccctgtctgtgctggggtctaggagacagaaggtgttgaaggaggtggggaggcccctggctgagaggggaggtgaggctccagccttctggtccctccctgtcctggccccttcctcatccctagggtctgggcaggggctcgactcacagtgcatgaccttaggtctagctcaaacgcttctttgctgaggccatttgttttgtgcctactttggcccatccttgtgtggactgattgggtcgttccagagggttcctgtctctggccctgctttctacctttggcattttggaaacaacctcttccccattcctctgaaagggacactgtggcattttagggttttcagagcatggccagtaaagtcccatctgggaaactcagctgtgagctggaaaatgatgttagtaaaagagagcctccagaaaaggatgaaagaatgtggagagatttcccctcttcaggagtgtaattctcgaactctcctctgacctgctctgttaaaaaattgttctttgtacaatgtgtgtgtggggaggagattctgggataaggcaaggccgttagggcagagggtatgtgcctgggggctaccctagggaggaggaacggctagctgggctccatccctggcctcctgggagatggtttctctggttaccgggctctgggacctcttagcccctccccattggctgcagggcctacagtgcctatagaagcgtaggatggagagcacatgcaggacatgctgggggtggggctggggaggggcacgagcagtggagggcctcaaaccccaactttgtgtgctggctgagtgcatgggctttgaggtgacaccattctggaccctgccaccttgtagtcttgtgtttctttgcatctccaagcctcggtttcctcatctgtaaaatgagactaataaaaatatgattgcatctcagcatgatggtgaggagtaaagagacttaggggagggcgtgagagctatcgctcgtggcgttcttctttatacactgacaggagctgcatctggtgcatgtgggggggaactgagggccaggggtgggctcaggttggaaggtggctgggtggagcattgggaagccccactgggccgacccctctgattgccacttgtgtctcccagtggatgactacctgggcttcctccccacttttgggccctgctacatcaacctctatggcagtcccagagagttcacaggcttcccagacccctacacagagctcaacacaggcaaggtaagccggctggagccctggcaagggcaggatgccagatgcccaggtccctcaggagcccaggcctgcatgcagggtcttccagcccctcctgggggcccacgacctggcagccaacccctcagggagttctccttctgccccttgacactgcctctgcctgagtgccagtctgatccttccatgttcctcgccttgaagcacccaggccccgtctctctgtctttgtcttttaggctgagttggcatctggcactgtccatctgggtggcttgtcatatcccccgaactctctgggccatgctttcctcacctgcaggggggatgaggttggctgagggacctcctgggtgcctgagagatgagctacctcagggccagagggtgcccctttccttcccctcctcccctctgtctcccctgctccttgtgacctgacctccctggcagggggaaggtgtggcttatcgtggccggcttctgctctccctggagaccaagctggtggagcacagtgaacagaaggtggaggaccttcctgcggatgacatcctccgggtggaggtgaggggtgtggctctgggtgggagctgggcgtcggggcagggaagggatggccaggctgggactggccttgaggtgtcatggccgagggaggaggaagctctgcccacacgcatcgtgcctttacctccccgggcctcaagtctcagctgtaaagtgggaataaatcaacacttgccctgcttccctggagggatgatcagaggctcagagaagataaatgaaaatattcaaaaagtctagagcttgatgcaaaatgagatgcgattttatattaataacataaggatagctaactgttaagtcaaataagcactgaacatgtatcaggcactgtgctgctgacacctctgccattactgactcctcccagcaccatgaggtggctgctgttattattattatccccatttcacagatgaggaaacaggctcagatatatcagaggaacaaatggtagagctgggccttgtgtccaggaggtagctgtgtggagtctgtgtggtgctttaagctcttagacacagtggtcagatcgctctggtttgaatcctggctctagcacttaccggctgcatcagtttccctatctggaaagtgggggtaatgattatacttatctcataagacagttgtgggaattaaggaaattaatacacatatgcagtaagcacttactaagtgctagctgttgctactatttacattcacctaacacccaattgtctgacccctcttctctcagtcgtaggattgagttcctgccctgtccccatcccgtgctcagagcctggaggggacaatgagaccctttcatcccaggcacatgacagtggcagcccgtgtatcctgaagagctggctgctgagggagagaccctgagtggcatggggcaggagctctggtcaggcgcctggtggcttaaaagccttaagcccctctgaatggcagataaggcccgggttgcccctgcgggcccagtgggagcccccactcagctgatgtggtggtaccatggctgctggtttggattaggggcagcttgaccttggaggagtagctcttattagggaaacgtggccagacacatgcagacctggaatgagcttgttcagttagcaatgaaatctggatgctgtttctttcttgggctacttgccacccgtcagtccagccaggagctattgggtgccggttatggccggggcctgccagacgtatgtcccctccccagcctgggtgcctttctttgctcctcccgtgaccctctggtctactctctgctctcagaagtaccttaggaggcgcaagtactccctgtttgcggccttctactcagccaccatgctgcaggatgtggatgatgccatccagtttgaggtcagcatcgggaactacgggaacaagttcgacatgacctgcctgccgctggcctccaccactcagtacagccgtgcagtctttgacggtgaggcagtgctcctggctgggaccccgatcacaggatcatagagcagggggccacaccttaaatcccgcctcccatggaaagctgccagagtctactcaaaggccctggtcctggccctggcaaacctgttccagctgtccccttgctctcctccaggcaaggggccctgctactagtgcccacagatgcagctcctgggaccagctgtggtcagcattgaccctgacccatcctgatcatttcaaggagtcagccagccttggtttggacattttagggagtgtggccttgggtttcccagggcagctctaacatctcctcagttttgacatgcccaggagccctaatgagagctgcagctgtctgctcaactcacgaagggagctcaggcacctcttcagacactagggaacacgggtacgggccactccacgtgtccaagggggttcttagatgggaagggtgagcaggtgcctgtctctgtcccacgtgtggtccctttcccagctctgccagtcctagccctggagtgcccaggaggctggcactcttagcaccccatcccacccgccctccactcctggcacagcgctcaggcccgtctctccattccagggtgccactactactacctaccctggggtaacgtgaaacctgtggtggtgctgtcatcctactgggaggacatcagccatagaatcgagactcagaaccagctgcttgggattgctgaccggctggtgagtgaaaacttgcccaaagctgcacatgcctatgcatgcacctgctacccccgctgcatggggtgtctcagaccaccacccactggtgcacacactgacacacggctgtgcctactgacctttgtggttggtgtcctctgtgccttggcaataccaggcttgtggtcctgtcctgcatgcttggaagagaaaagaggggatgtgagcaatctgaggcagccccagtgtgcagtgggacacagagcaagggagcagaaggaaaacctatgccacgcagcagggcacggcctggctctcgctcgcttactcactcattacaggcctttggactcgtaatgcacacaagggcttgtgctagaaacttctagccagaagctagaggcgagaggtgagcaagcagttggctctgtcttcagggagtcagtttattaaaggagggcataggctcacttgtgcctctcatacagggctttccaaacttaggtacaggtgacattccaggggcaaagagatgtggggctccgagcagggcaggtggccaaggagcatcaggaaggcatcataggccagtgagggggctgtgtccagtgcaaggagatggggggtgggaacccagctaggccaccattgcagggacctgggggagggtgaccaagccctgggaaggagatggccttggggggaaattgcaggacttgagctacaaggccttggtggccgactggatttggggctgaggaagggctataaggaggaactcaagtggctggggaattgggaagctggggagaagagcagagcatatgaggtcaggttctgttttggaggtgaggaggagccttctggggaaccccctgcagatgctggatgctgcagtcctggcacttggccagaatggaggagaatcacaggtgggcagaggtgtagaggctaagggaggtgaggaggctgggcgggaagctgatggtcctggcagtggctgtaggggtttctgtggcatggatggggacagctggtgagaaagtggaagagacatgtgcaggccctactgcaggagcatgctcagatcagcaggtggagggaagggggactggagaggcctgggcgtgtctgtgggtggggaggtgagcatggcttgaaggaaaggtggacagagaagggaaagaggccatggtggtcccaccttcccagagactggcagctctaggggaaagaggagaccagcgaatgctgagatggggagaacatggagttgatgctatatagctccagtatctgccttctgggcccatcactggctcacagcaagactccagactccaagagggcagggaccgtgttctttccagttctacgagattggtagtccaagtcctgagcacgtgtccttgctcaggaaggctgctgggtggggaggggtgtgtcgggggctgagggacagtccttggcctctcagctcagggctgaggacccatggagagggctggagaagagctcggtaagggcctgtttccctgggaggcagcacagggagtgagcaggccacaggagtttgaggaaggagctgtctgtgattagaggtggcaggacgaatcctggaggagggcgctcttagtctgagcctcattgggtggtagaatctggaaaggagagagggttccaggtggggaaccagagcaggctcggagagggccacttacctgtgggaagccaggcctggtttgaggtagcagggaggagtcagaagccatcaagttctgcccaagtctgcagacaccccctgagctcctcatgactacatgtgaggctggagttacaggcatgagactggatgtatttgggcgtggggagccttggaaggttcttgagccaggatagaccctggtttgttgggcctggactctgccttctttgctctaactgttcactcctttttggttcagtagcagtgacaaggcctgggggttgggtccagcatgcaccctctgccctgtggtgacacacctgacccttgcctgcccattccacaggaagctggcctggagcaggtccacctggccctgaaggcgcagtgctccacggaggacgtggactcgctggtggctcagctgacggatgagctcatcgcaggctgcaggtaggggggacctggcgcccctggtgcccacctctcctggctcaactgggcctgtttcgctgggagtgctcgtgtgtggcagtgagcagtggcacgtctcccagccacgcttggccagcagtccagcccgtgctgagtccaaaggtggtggagccagtgcaggagttgaaaaggtgacattgagagcaggtcataaatctccctgcagcagcggcagctgcgggcccggcggccggctcacctgaatggggagcattgtgtctctgatccccgacctcttatttccctgatggaatctccaggaggagctggctggggggtggggtgacggcgcccctcattccctcaaggccatgtcggggatcatggtttctgtttagctttctattgacatggctgattgttgacttcaggaaaaaagggcccggggtgtggaggcccagcagaggggtgcatctcacatctcctctgctgccatgtggttttggggagccacccatgggttttgacccttggttttctcaacttcaacctggcatgaagaataactactttataatatcttctaaacaaagtgcctggcccttgggaaggatttaataaatggtagctataattattgctcagaagaagaaatgtcaggagacttagctcctggtctctttatctgacttggtaactttgggaagcttctcttctctggactttagttttctcagctgttaaatggacttaaataattgcccctctgctctccacagggttaatatatgcaaatgtgtgaatatatgcaaatgtattctatgctcccatacgcctcatcacccctccctcagcctggctgtacagccctgctgaacgcatctgagaaactgataaccatggtcactgatccagcatcccttctattgtttgtggctcagttaggaagtgtatctttatcaaaatattaccccagagaaatgctcccggcccagtagtggaattccagacaggccattcacccatttcccccaaccttcctgaagcctggcaggctcagtgccagatgcccagagcatactgacaaaggtacaacttcagccctccagggatggttggatgcgaaaaatgggcagaggaggtaaagtgcgttaggaagttagaggtgagcactgtaggagctctaagcaggtgcatctcattcccacaaattgaattcagggaagcttcctggagaaggggatgccccaggtggactttgagggaggagcaggagttagcctttggagaggggactgccagggcaaaggcacagaagcctgaaatgcctgctgcctcctgggtgggggaagtggcaggagaggctgttgcccaattgggcggccccgagggtctctgctaaggagagctcagccctgggagcaaggccgagggaaaggtgatcccagggtctaaatgctgcaatgtgaggaatggactggtggtggcggcgaatggcaggtgctgggaccaggggaggggagactggacatacggcaggtgagctgtgatgatggtgtaactaagacagtgatagtgggaggggtgggggctagggcagcatggactatttaggagggattatgatgacaagcagtcttctgtgccaggcattgtcctaagaattttacatgtattaaccaaccatgaaatcttatgaactagaaagtaggctgggtgtggaggctcacagctgtaatcccagcactttgggagactgaggcagacagatcacttgaggtcaggagttcaagaccagcctggccccatctctactaaaaatacaaaaattagccatgtgtggtggcgggtgcctgtaatcccagctacttgggaggctgagacagcagaattgcttgaacccaggaggtggatgttgcagtgagctgagattgtgcccctacactccagactgggtgacagagcaagactctgtctcaaaaaaaaaaaaagtaaatgaccctcgttttacagataggaaactgaggcacagagaggttaacttgcccagattcacacacctggtgagtggcagaacccccttgctgtgctgctctgtaatggacagaacctgatgatggggtgaatatgggagccacaggagggttcagaatgatcccctgatcctggccaggggggctaggtgggcatgggggctgtgctctgagagggtcagcaggaggaggagccagttgagggggaggtgaggcattcaggacaggctgtgttgaggtatctgtgaggaagctggcctgtggtctggaggtgggaggacagagtggggttggaggggcacatatgggcacggtcagcctgtggtggctacagccactgggtgagctccccagggcatccccggggccccagatcccacctgcaaggtgactcatggtgccatgttggcaccaccttgggtgaggtgggtgggccaggactctgggttctacccgtggccctgcacatgacccccgtgttgtttgtagcttggcaggtctgaggagcctggaatatctgagacctgtgggccctgagtccttggctgccctcagtgacctctgcagggctctgctcttggaggatctgcctacaaacagttctggcgcctttgagtcactctcctggggttggaagagtggctgggcctcccagcagggaggctggttccagctcaggagcttgggaggggaactgggttcccgtcctcttgagaatgcataatgcctctctgggggggaattccaggcagcaggagcaattcgctcagctccacctgaggccactgagtggcccagcacctcagctagagggcttcctccacctctcactgcagtgctgagcaccatcacagctgataggcagagcagccgggcatgggggccctgagcgaactcaggcccatagctgaacacagcagctcaccctttctccagtcagcctggcccacttctccagcatcggtgttcctcattccatctcagcccttttcccggctcatcttccgggagcctcccccttccccagggctggtggtgtccactctgttcctccagcccagccctcttctctgatctctagacctatgaacccaaggtgctggacatgtccacgtggatgtcccaccagcacctccgtgctgcgtctggggctacacatgttgcagacaggtttcatcacctcccagcactgtcttttcctgggtccccagaatccacgctggaaacctgagccagctctgactgccctcctcctcttttctctgccccagccctggtggctctgcctcacccatgtccttcctccttccttcctctcccacccctcctttagtatccccatcgtcttcaagctgtgtcatgcctgcctccatgtcagccctgcagtggctgctgctgcatccaggaaaagcccctgctctcatcctggtggacaggcctttctgtccccaccacctgcctcacggagccctaacgcttctgaagctctgcgctagtttgtccggccctcagcacccccacccctacaggctcccccttgcctctgtgtctttgcacttgtgcacatgctgctccatcagccaggacgcccttcccactctttgggccttactaacgcctgctggccctgccaggtgcagctcagggccacttcctccaggaagggctcctgactctgaggctgctcaggtggggatctgtttgcgtctctgttctgcggacttcctgagagcagggccaggtctcatctctggaggcagcatccagtccaagcccagggcagagctgttgctcactaggagtgaaatgaatgccccgaggccagttcatctttcaggccggacactgcccagggtacaggtatccacctggccccgcagaggcaggcagggaccttgggagcagcccagcccactctgctctcagcctgctgagccctgcgctgggcctacctgcaatttccaagtcagccggcgttggcggggcccctggctttgcttagggctgggtggagcgccatcagcctcctcttcccggtctccccttctttccgtaccccctgccttgggctttcctgaggagggaaagagccgagacagcacggagacagcttgttagtggcactcacaggtcctaaatgtttcttggggagtcttggctgggctgtggcctccatgaaaatctccctttggtggtctgtactgcagcccctcccggctcccgacccgggctgggcgcataaatcaccctggttggctcggctctccctatccctctccagacccgcttgcccccgctctcaggcccactcaggcctggttcccaggcaggcccccaggctcccaggccccccgccccgctacccaccgagcatgcccctccaccaccgaggagcggcctggggcagcccatccgcggcaccctcggggcagtaaatattatattactacagggtgtgcagtacgtgacctgagacaggccccggggcttaagtttcccgagatggagtttgcgtactgctccccccatcctaaaaattcaattaaaaaaaataacaggaaaaatgtagtgcgccgagggcctgccagagcggtgtatctggcggcggcggtgccgctgcgctccggcggtaattggttctgcatagctcggggaaattggcagaaaaataaatcagccgggagccgggagtcagacgctgcagggaggggaggtggggggtgctgcaagtggtgggagcagacctggtggagcgggtttgactaatgtcctgtttgggagtcaagggggtgaggtgggggcagggcagcccccataccctcagtggagaatggaaaatggagaggagtcccgcttggttagggagtgcacagactgccccgccgcatttctgcatggcccttgtgtgggtaccgacccctggccttggaatggcgaggaggagccatatgaaggactttcagggcgcctccgtgggatgggggaggtcagagttctttgcctctaaacaggattgagcttaaacctgacctcctgtctctcagggctcagggctgtgtttctggcattgcatgtaccccccacctcctctccaaaggcttcccaaagcagagtgttctgggaagggttctgttgtggctccccaccccacctcaggtggatacatctgagctgctggcctccctgcagtgcctgcagtagctcttcaggggttcctaaatttcttccttgaagaatgtggacacagcacagagcagacttgtttcagtgcagggcactcagcgctggagcctctactctaggaggatccaggaggcaggagcaggaccccctgggccctccgagagcctgtagtcagtggggcagaggggaacacacatgcaaaagaactcactggactggagttgaggacagattccaaactggcagtcctggaatcgagggctgggggctccagatcaggaggcgcgtaggctgacatgggtgaggaaggcttcctggaggaggtgagggtggagcacatcacatagagatggctgtgtgtgtggagcgggctggagaaggcacccagcaggcaggcggagggggtggggcctgctgtgagaacctggcacatgtgcatgcctggacctgggagagccctgggctcatcaggcgcattccatctgtccgtccctcacagccagcctctgggtgacatccatgagacaccctctgccacccacctggaccagtacctgtaccagctgcgcacccatcacctgagccaaatcactgaggctgccctggccctgaagctcggccacagtgagctccctgcagctctggagcaggcggaggactggctcctgcgtctgcgtgccctggcagaggaggtaattaagcctgggggtgcctttcttcttctgctctcctgctgcctggaacatcagaactggcagggacaaggcgaatgtctggattattacccaccccggttccattgctgggtgaccttgggcaggtgacttaacctctctgaacctcaatggaccaatttgcagaaggaagagagagggtacgatggaatactgggtgttatggggcccagcacagagcctggcacacaataggtaactaataaatgccctctgtttgccaaagtatgtcagagacagagctgggaccagaatccaaggtacctggttctaggttcagtgccagggccagcttccccaggttcccgactcctacttcctgccagccagtgcctgtctgcacctggccaacaacctgccctgcctggaccctctgtttcctgttgtcctggatgcctctgaaccccaggcccaaggaggcttcattttcagtaactctgagttttgctgaatctgatcagagagaaccggctctggtttgtctttggggaactatttccccacctgcagaccctccccctgaggtctctgtggccagatgcacccacccggttctgtggcaaataggcaggtccggtatttgtctggaatgagaagcgtctgctcataagtgttgggcagacacagctgctgcctgctctgaccagagccctgtgggactcccagggaggaggtaggggctctccccaggagtgtgagaagggcagggccaggagagcggttgctggaggaagctgtggaaggggagagggaggctgctcaggaagggatgtgggtccctggagtcagcagggcctataggcacaggctggttccctggtggacactgtgtcgctcagctgtggaccaactcctcacagtggcagcagaccaacccctcaggctggtcacgggcttccctctgtaatctcagcccagactgacccgtgaactgtaagcacaaattgtgatatggctggaaggggttaaggtcgaacagtgctgtcactgtaagggccccgtggagagagcccttctcaaacttgcatgtgcatcagaatcccttggagggcttgtgaaaagcaggttagggcccacccctcgagttcctgcccccctggaactggggcaaacctgaaaatatgcatttctaacaagttcctggaagctgctgctgctgtgggtgccacactttgagaacccctggtatagtggttaggaacacatatttggagtcagaaaaacctgcattggctcctaagctctcaaagcctgaatttcctcacctgtcaaatggggctgcctgtcctgcctcctgggcttgctgttggggttcagtgaagcgacgcatgggcatgcttcacctgtgctgcaggagcatcagctcagcaggaccctgggtggagacctggggctcacttgggctcactttgctcatcatccttggaagcaaatggacccttacccaatcagcctgctctccagagtgtgcagctgggagcagttgtcaatcatgctggaggggcttaggggcctcacagttttgttctggactagtcaccattttcagagtccagtgtcttcaggccatgggagtcctgctgctacgggaggagggtgtgtgtcctctgggaagggcataccttctgtggatctgttcccgctcttggggctgaggaaggcgggtggtgtcctaggcgtaatgttacctccctggtcaaatctagttctctgatgtttgccccctgggaatgtctacctggtagcgaggacctaagaatgtaaggtttgaggtccaggcaggagtgtctcttcccagaaggatgtactcagctcagtaaccttggtgggcttctcatgtgagctgggggcagccttatgctctgttctctgggggctcaccgccactcaagccagacactggccagccctgggaggtctgggggaaggccagggtggacagtgtgtgggatggaagctgggagaggagaggcctctgtggcctctgagtcagaggtcagctcacggtgtggctgtggggcgtgggcctggtgtgtcaccatccccaccccgaccaccaccctctgttcagccccagaacagcctgccggacatcgtcatctggatgctgcagggagacaagcgtgtggcataccagcgggtgcccgcccaccaagtcctcttctcccggcggggtgccaactactgtggcaagaattgtgggaagctacagacaatctttctgaaagtgagttttcttttttcccaagtcatgatcgtatttttcccaacataaggcctttctcccatctcttctgtttcccctcctgttcttgacctatcttagttcttaggctgtggtcttggaaggagaagaggtctttgggtaaaacaatttcccttttcctcggttacccccgaagtccccaggcccctgcacctagtctaggaagttagtaggtttgagccggaatcactggcgctgggagtgaatgaggtggagtctgtggcccaggccatctgggagggctgacccctggggctgtgtttgtccttccaggcaggtcccttatagggaggcctcatcctcagttcccaggcactagcaggccttgcatgacctggcttccacaccaacccgagtgccctggactggagctggagccactctgaggctcaagtcctccctgctgggaaggctggtatctggggcttgggacaggcacaccacaatctggacccactggagagctgggagcatgtaattctgtcccctggtctcaccagcccccacctctcctgccctttctcctcttctaacacccatccctgctccctcttcctcctttccaggagggtcaccagctttggggacgggtgacagggaggtgagtgggtgcttggggagagcccatctgtgctcctctctaggctcatgcgcggacatagagccaaagctgctgtggtcatggtgtggcctggcgtgcaggacacaatgcgggagatccctccctgcacgatggctgcccaggcccaagggagggccctccttgaagagctgtcagcaaggctgcccctgcttggggaggagtggccctgagaagcaggcctgctccttaccttttttttttttgagttggaatctcattctattgcccaggctggagtgtagtggtgtgatctccactcactgcagcctccgcctcacaagttcaagggattctcctccctcagcctcctgagtagctgggattataggcgtttgccaacccacccagctcttttttttttttttttttaattttagtggagatggggtttcaccatgttggccaggctggtctcgaaatcctgacctcaggtgatccgcctgccttggcctcccaaagtgctgggattcaggcgtgagccaccgcgccagccctccttacctcttttcatttgccctgaatagctctactagcattcaaggactcctcagcctaaggcaccagactttcatccagcctagtccacctccccaaagcccctccacgctggaccttccccttccctacatctctcctccctcctcccctcttccaggaagtcgttgttgacttactttagcctggaaccctgaagcagagccccctgagtgatgctgatgcattcatatattggccagtcctcttgttgtcccctggggggtgtggagagggcaggtttcagtagcacagaggatgccagggctggttggagctctatgtggccttgggcaggttgcttaacctctctgaattgcctgttgtcttatcatctgtaaaatgagggtgggtggggctgcccactttacaggttttgagggttgagttaggtgacacaggtgatgggtcttgctggaactaagtgatcaatggatgttagtttctctccccacctctccccttttccttttggggagctcccctgctctatgcgtgccatgactggaggccaactcaaggccagggatagtagatgtctgcacacagttgtgtgagtgagtgtgtctgtgtgtgtgtgtgttgggcagcaggctgcccccatccacctgctcacatgccacctggggcatgtttcccattagattctaacctcctgtgcttgtcagagcctaacctctgagagtctacctcctaagccagttcctggcctggtagggcagaaaggaaaggaagtcaaggagtggccatatctgagtggggctgaccggggaaggcggtctgcgagagtggcgggggcggggcggggggtgctgctgaattgtgcctggtggacttgctgggaggggatgagctccaggttctgacctcttggccatgtagcctcagggaaatgcaaactgaaaattttccctggtttcaagcaaaaaaaaaaaaaaaaaaaaaaaagatatagaattgtttctcgaagtcttccccactgagtttatgagccccgccagtagctcctgagcaagctctacaaaaatgttggcagcaagcagagaccaagaaaacattggtgtttcttaacttaaaccaaagttggaaaaaatgagcaccagcagagagagagaggagccccaaactagacatttctttatttgctgttgctattttgggtccagcaggctggccccgtctcggggaggacaggggagagagccgggggtggatgggggaagtgggggtcaggcattcctgccatctccctggggctggtggtttggagggtaaaggcagttaaccacccgggggagaggacagccgaagcgaacagccatggagaggtttccccggggcatgacacgtggactcaggggctcctacaggcttcattgaagatgaaccaaaagaaggggggctgtgtccgcaggagggaagcgtgaggtggccctagccttggcatgtcctctgccccttcctgagcctcctacctgccctgggctctccctccagggatccaggcctccctgaccagcgtgggaccccttacctcagctgccctttcatcttctgaacccacccgttttctcacttggctatactgctctgagctcatgacactaggcctgggtacttaatgtgttgcctcctctaggggacaatgtgaattttaagagcaggagcttctgctcctcaggccatgtctgacctttggtttcaatcaaatggtgaagtaattgtggagaataatttttgtttcatgttgggttgttgtggttattccatttggcagagcttctgaaagtttcaggaaaaaaagcagttgaagaccagtgaatagtggttgacatgctgataatcacttgaaagggtagggatattagatgatacagtaaccaaagaaataaaatactaaacatggagggggaggctttaatttcttctctttccagatctgtatcattgtatctcctttagagacaagttttagaactgtgctgtccaatatggtagccacagatggctatttaaatttacattaattaaaagtaaatgaaacgaaaactttatctccgcagtcatactggccacatttcaaatgctcggtagctacatgggcctagttgactaccatattggatggtgaagatataaaccattttcctcatagcagaaagttccattggcaagcactgttccagaagaaaatggaagcgaggctgtggtgggagaaggggagaggagaggtcctgggctagacatggttcttctctgcagagcgctcctaggagggaatgatgtagcctttgcctttgatggggaggaatcttggtgaggggtagggggtggggtggacgtttcttaattgcacactccccttctatgcaattctggtaagcgctcccacaggggacactcccagtgagggtgtcagcctgctctacccaggcttggaggactcctcctccccagcctctcactgggacatccggatcctgaaggggactgtgggtttctgtccttctctggtacccagtatccgatggagaaggtgcctggcgcccggatgccagtgcagatacgggtcaagctgtggtttgggctctcagtggatgagaaggagttcaaccagtttgctgaggggaagctgtctgtctttgctgaaaccgtgagtacctgccagcccccacctctgcctcccactacctggagctgccttggccccctgctcacgcctcattcttcctggccctccagtatgagaacgagactaagttggcccttgttgggaactggggcacaacgggcctcacctaccccaagttttctgacgtcacgggcaagatcaagctacccaaggacagcttccgcccctcggccggctggacctgggctggagattggttcgtgtgtccggagaagacgtgagtcgtgggcagggagggctggggagagccaggccaggctgcccaccatggactgcaccctccttttggaggcaggctggggtctgttgatccctctgcttgctcctgcgctggtcataggaacttccgctgaactctcccaggactgaggcttgccaggcagcagtcctttccagaagggcttggatggtcagacagtcctttattcttttcattaaaaaaatttttttttttttttgagacagagtctcactctgtttggaggctggagtgcagtagcatgatcgcagctcattgcagcctcaacctcctggcctcaggtgatcctcctgctcctgccttctgagtagctgggaccacaggcgtgcgccatcatgcctggctaatttttaaattttttgtagagacagggtctcactgtgttgcccaggctggtcttgaactcctgggctcaagtgattctccctccttgaactcccaaagtgctggggttacaggcttgagtcaccacgcctggccaggcctttattctctctcttttttttttttgagacggagtctcgctcggtcgcccaggctggagtgcagtggcgcgatctcggctcactgcaacctccacctcccgggttcacgccattctccggcctcagcctcctgagtagctgggactacagctgcctgccactacgcccagctaattttattttgtattttagtagagacgaggtttcaccatgttagccaggatggtctcgatctcctgacctggtgatccacccgcctcggcctcccaaagtgctgggattacaggcttgagccaccgcgcctggcccaggcctttattcttaagccttcgttctgtgtggtgcccactgggtgtggccccatcctcaaagacacccaggacaagcccatcacctcctctgcacgtgaacccttctcgtgtctgggctgctcacacatcccctgagtggtcctttctctgtcagtccctctcagatccacgtggtccttctccatgtctattgccgcctttgcctctctctcctctccttttcctgtttggttggcattcaactctgtggtgtttaacttttttttacttaaaaaaattgaagtataacatattatacagtcaagcactcaaatcttatgagcacaacttgataaaactttatatttttacaactatccatcaagcctcgactgcccatcctccttttgctgtcttcagttggcccccttttctctttatcttgggtgatgtgctcttttgtccccgattatctcggagtgtccctaggtctccttttcactgtctgccttggtctcttgcacccttccctccccaccccccatgtctctcattgttggttggggtgaggctgacataggcaggggtgctctccaggaggtggtagatggatgggggcctctccagcagagcagcagagactctgaccagccctcctccacagtctgctccatgacatggacgccggtcacctgagcttcgtggaagaggtgtttgagaaccagacccggcttcccggaggccagtggatctacatgagtgacaactacaccgatgtggtaaagcaggcactcaggggcaggtggggtctagacatttggtctctggaggcacctggtgctcagggacaggtggggcatgtttctctttgccccctcttacctccggagacttcatgctttgatttccaaagggaaagtgtggggtgcagtggtggcaggacactgactctggggctctgcccttctgtctgggacttggaggacgtatgttgtcaagttgcatcttttctgcctccctgctcacatctgtctgtctcctctcattgcttgcctgttcggttttgtccttagaacggggagaaggtgcttcccaaggatgacattgagtgcccactgggctggaagtgggaagatgaggaatggtccacagacctcaaccgggctgtcgatgagcaaggtgggcagcatgtggaacctggcgagccccatccccggcaagctctcaagccatgctggtggggacgactgaatgccagggcccttcactgggctatttcacccagggacgcttcttgaaggcaccccccactccaagctgcaaattaggaccgagagtcagtggccgctcaagagtctgtgaccatgccccaaattcagagatggtcccaggagagatggggggaactgccaagcaatgagtgaccggttccccctcccccaggctgggagtatagcatcaccatccccccggagcggaagccgaagcactgggtccctgctgagaagatgtactacacacaccgacggcggcgctgggtgcgcctgcgcaggagggatctcagccaaatggaagcactgaaaagggtgagccagcaggtggtgggtgggagtgaggcctgtggtcacaggtggccagtaggcacagatgcagacctgcatgcccacagacacatgcatgtgtgcacacagcatgcacagacacctgggactcactggaggtgctcacagatcacacccagcatacccaaagatcacacccagcatacacacagatcacacccagcatacccaaagatcacacccagcatacacacagatcacacccagcacacagatcacactgggaacacccacagatcacactcagcacacacacagattacacccagcacacacacagatcacacccagcacacagattacacccagcacacacacagatcacacccagcacacagatcacacccacagatcacacccagcgcatgcacagatcacacccagcacacccaaagatcacacccagcacacacacacagatcacacccaacacacccacagttcacactcagcacacacagatcacacccaacacacccacagttcacatgcagcacacccacagttcacacctagcacacacagattacacctagcacacccagcacacgcacagctcacacccagcacacccacagatcacacccagcacatgcacagatcacagtcagcacacacagatcacacccagcacacacagatcacagtcagcacacacagatcacacccagcacacacacagatcacacccagcacacacacatcacacccagcacacacacagatcacacccagcacacacagctcacacccagcacacacacatcacacccagcacatgcacagatcacacccaccacacacagatcacacccagcacacacagctcacacccagcacacacacagatcacacccagcacatgcacagatcacacacagatcacacccagcacacccacagatcacaccgagcatggatcacatccagcacacccagcacagatcacactcagcacacacacattacacctagcacacccacagatcacacccagcacacacacagatcacacccagcacacccacagatcatacccagcacacccacagatcatacccagcacagatcacacccagcacacccacagatcacacccagcatggatcacacccagcacacccagcacagattacatccagcacacccagcacagatcacacccagcacatgcacagatcacaaccagcacagatcacacctagcacacccacagatcacaaccagcacagatcacacctagcacacccacagatcacacccagcacacagaaatcacacccagcacacccacagatcacacccagcacagatcacacccagcacacccacagatgcttatagacagacacactcagatgcccatgattacagaaggtcacatgcaaagttcacacaccaacctggaagatggaaagacacccatggactttgtcttaggctgggtttcctggaggcagaagctaagacgtagatttggctgcacattattggggcagtgccctcgggagtgtgaggagcaaggatgcagcttcaggcaggtcagctgtggcctgagctgtggcctggggaagttcacaactcggaacaccacagaatcctcacctggaggcagggctgggctttgtatcctctcagccatctgtctaggcttggggttgctggggtgagctggggcacatacctatctcttcagtgagggggtttcctttagcatgggggttccctggagcaggtggcttctgggagctgggagctgtcgatgctgatggcagctggggatgggtgcgccacacgtgtacattggctggtgagggggctggggtgggccccgttggcattcatgcaatgcaagcacacatgcccacagttgagcacagatgccatgggatactgtcaggcccatcgtgcacatggatgagcacacgcaagcacatgcacttgctccggggtcacacaggggcctgtgcactgcacagcctctgtgcccgcctgtcctggaccttcttggtctatgatcttccttcctaaacacacatttgaattttggctcaagaaccagacctcccttagtccaggagtagcctgtggcatgacctaggttccttcctttctccttgggggcagagaacctagagaggactcttgctggctccagggaggggcaaggcttttggacaaccagctgttcctggtgctgtgaaccagacagattcaactttctccctgaaggggcacccagcagacagaggcaaagcctgcccaggctcatgtgccttgcccaccaccccacagccagcatccttcctggagagtggcacagctggcctccaggactggcccttgtcactgtgctcctggcccagacctgaggtggtgtctgacaacagtgccaggtcaccctctcccaggagctgaatggcaagggggctcccgggactcccttcaggcccaggaaagggaccccatgaacgaggtacaggggtgcctccatagctgagttgggtctagctcccaggggtgaaattggctgtggttgggaaataggatcttccttttacctctgagctgcagacccactacaggatgtgaagatgaaaaaggaaatgacaagaaaactttggattcatgaaatccacccagaattcaaacaaataagcaagttaaaagcccagtgttttcgtcactgcgtcagcctaccttcctttctggctgtttggttcttcccgcagcccatggagcctcctctcccctcctgatttttctttttcttttttctttttttcttttccttttgagatggagtctcattctgtcacccaggcttgagtgcagtggcgcaatctcagctcactgcaacctccacctcccaggttcaagcaattctcctgcctcagcctccctggtagctgggattacagacatgagccaccatgcctggcctcccctcctgattttctgacctggggttcctgtggctgcagaaagcccctctcctctaggtggccctcccaggttttcccacctggagggcactagtgtgggagctggtggggagttgtcatggaagacaggaaggcaaaggtggagccgagcacagaactccccccagccttcccaccggcctctgagtctgccccttctcttgtgcagcacaggcaggcggaggcggagggcgagggctgggagtacgcctctctttttggctggaagttccacctcgagtaccgcaagacagatgccttccgccgccgccgctggcgccgtcgcatggagccactggagaagacggggcctgcagctgtgtttgcccttgagggggccctggtatgtggggctgcacttgtcctggcttgggtagggtatatcttggtttcccagggctgttcgggctgatgtgggagaggcacagggaccccaggttaggacttttggatggaacgctggctggtcatcctggcgtcagtacctgtggggtggcatgtggggaaagcagccccagtctgggtgttcttctaaaatgaaaaagctccttccttggcactgaaacacttgctgctactactttgaggtgtcaagatgaaagcagaggggaagatggccttggccgtctggctggcctgtgcctggctggctggtgtgaagatgggcgaggaggcccatgggaggagtgagagagttcttgtggccccagagtgtccttggttgcatgtgcatcctcttgaggcagagaccatctcatggtcatccccagcaattttggggaagaggtgtgccttagaagctgagccccaggatgactttcctgcccagggtgcgctttctgtagccagtggaactggggtaggctcaaggttctccagggccggggtgacgggctccccaaaagagacgagcaggtgtctcggggacagtctgagcgagcactcggtactggcacacagccagtccccactctgctgctctggggaaggagctgctccctctgaaatccagccaggactggcacctccctaggggtttgggctggggccctagggagcaagccccatgggacgtgagggtgtccatgtgaagccagctgtgtggttggggtcaggctgggcacctatctgtaggacagcctggctttgaaggctggaggagtgctgtggggtggctcaggatctgttgggctggccactggcagggaggtgaagccagcagtggccctgagagggagtgggtgggctggggaggctctgtcagtctcaggcctcgatggtgggcaaggcccaacagtggcagtataggagaggaagctctctgggggcctgaggacgtcagaggagcctgccataggcttcggagagagcccctcccttgccctggggccaggtcaaggggaggctgaggggagatagcagagctctcggctctctgggctatggactggtcttccggccagggtcgggcaggataggatggaattgctgcccaggtcagagcagctggggagccttctggggtggggctggtgttctgtggccccctctgctttgagtcagaaagggcctggcctgggcactgggcaggggctggtgatgatcctgcggctctagctgaggggtggggtataaagaccttggcaggcctcagagtcagggccaggtctgagaaggccaggaaagcaccctgtgtaatcaggatctgttttcatcagccagagctctactcaaaggggctgagaagaaaagtggtttgtgggctcacagagctgggaagaacccgagaggtgaagcaggcattaggcctggcaggaaacaggttcatacagtgtccccaggactcgcacccctgtcttggccttgtctcacacgggctctctctgtgtggtagcaaagatgctgctggtgacgaaaggccaacatcatccctccagccagcaaagtcctgctagataaagtagcccagcccacagcgccacactctgttttccatgcagctggagacccctgagtgctgccttctcagtaatgtcagtgaagtcttcggcatgactgaccagctcagcctggtggtgcccagccagcccctgcacctgggtgagggatggagcgttctgattggccggcatgggccatgccccttctctgtgattgacagtgccaccagattggggagaggagcttctgaaaacaaaaacaaaaaacaaaaaccaaagcaatgttgggcaaagagctccagatggtccagacggtgaccagagcagtagggagccagtatgagttgttgacaagaagagtgctctggtcagagctaggctttaggaccatcagtcaagcagccatggaggatgcttgggaggcagagcctcccatcaggaaaccccaggagtcttgtgtagagatccaggagaggtgaccacctggcgtgaggccgtggggctgaggtggagggaggtgggactgaagggtttggggagggaagggccagaggtggacagtggggaccctgtggttgccaggccgcaggacggggtggggcgggctgtgatgagttcacggttggccctggcaaggctgacacacacggtgaagtgctgtgtgagggagacagagctgacggctgcctgccaggcggcccagggcaggaaggctggagcggggagccgagggggccgggagtggggaagaggtgactggagacacgtggacaaagcgtggatggaccctggggctggctagggcctggaggaagaaagtgacaaggctgggggacccaggccaagctttcatggctcagcgcctgggagaatgagggggggcacttcccagaagcagagagaccgatctgcgtattcttcttgtggaagagactgtcctgagggatcactgaaactaggcgtgaagtcagcagccatgggcgggtgatggattgtaattcacctgtgacttgcctatgatacatggaagagaccaaagtggcaaagccccgagtcctgggacagcttggctggcagagagaaccagaaagggaggcggtggcttcagagggcagatcccacagacctgcagctggaggaccagagagttttggaaggtttaggtgtgtctggcatttggacggggccacaggcccacttgactgtctggaagactctatacctgagtgacacacactcacacactgtcttacacaccagcacacacaccaacacacactcatacacaccaacacacacactctttccactcatacacaacacactctgttacacgaacacacacaccaacacagtctctctccacacattcatacacaccaataagcacactaacgcacacatacacactcatacaacacccccacacactaacacccatacacactaacacctacacaatcacactctcacacataccctcacacacaccaacacactctctacacactcccatatataccaacacacacacacagccccactctcatgcagcccccccactctcacactaacacgtacacaatcacacacataccctcacacacaccaacacactcatacacaccaacacatagacacacacacattctgacatacactctcttacactcacacatacacaatcatatgcacacacacccacacacactctttcacactcacactccccctccacagtcacgtttccgtcttcctgctgggacccagaatggtttgggctcccgctgctgagctgctgtctttgtcccgggatgtcctgatgccccagcacagcactggggctaaggtcctccctgcctcctggggaaggtggttggattttctgggtgctaggacccggcttctgtcctgagagctggtctttgcccacgggtccctgatgcctggtgattcattggtgggatgggtgaggcctctgtggcttgaattctgctttccctgcttactagctgtggacgggtcactcatgccattagcaactctgttacctcactcgtgcaagtaactgaatcccagggccattttaaggatgaatgacgatgcatgtagtgaagcacttctcagacttagcaaaagcaggcaccgtctggggatattgttaaaatgcagactctgattcagggtctggtgggccccgagaatctctgtgtctaacaagcctccacatgatgctgatgctgctggtccaggggccatctcggagtagcacagatgtgaagtacaaagtgcctcatcaagatggggctcccattggccccctacttgggtgcccttctgagagaggcagagcatgtgcattcctgctgggaggtgtgtggccagggtcctggagagggaggtatggcaagatgacatgttctccctgctgcttggtgggggaaatgtggtctttacttctaatgatcccctgatctgatggtggaggcctggctcatggggaactcctgtctgatcaagaagagagatgttcacatgtgagtgcaactaaacccctagaatctgcgtctttgaagtgttggaggtagaataagagtcattccagagtggcagtgtctaatgaggggaggcttcttgaagaaggatgttgggaggcaggccttgcaggggctggggaaagaccgtgggtggaagccaggtagccttgctggtaatctgacagttctggaccaggtctgtggtgcccccttgcctcctgccaccttttccctgacccaacacgtccaccagcgagctgggccttgcctgccagctcccctctggaagacgtcttgttggaaggcaggccctgtctgctcattagcacgggcagcctttccctgaaaccttctgcaggggccaagcctggctccttccacggagcgggaggccctggctccgtctgctaatcgtctgctgtctccatcccgagcattattttattttcgtattattctttttccagctaatatcctggcatttccaaagacaccgggtttcataatcttcctggcgttcccagggagctgggaagcagagcacaaagccgctattatagcgcgttccatccagcctccctctccaccccacaccccctgtggccacagcagccaccaccgccgcctcccacccagtcaccccctcctgacgccaccggcctctctgggaactctggtgacggctgccgggatgagctcacagaatccatcctgttgcccttgccctgggcctgccctccatgatcgaggatttttccaagccctgcctctgtgcttggcttgagtgttgggaaaggttctctgagatgcctgggcctggcagggaggggagggacagaaacgtcggcaacgtgtgctcagagtcttggagatttttgctgctggaagaaactttcattttctaaaggcgtgcctgatctgccttgggagctgtaggagcatcttgatattggatggaaagttgtgcatgtgtacgcacgcatgtatgatctggtgtaagggccatggttttatccaatgctccaggggatccaggaccccatagaggataagaattattaatattcactttaccacgtgctaaaaaccaggctttatatgcgtcatctcatagtgaccccagaaggctggattctattattagccccattttacagttggggagactgaggctctagagctgcactctcccacacagtagccactagccgtgggtggctacttaagtttacagttaaagtaatcagaataagaaaatttgattccccaatcagacaggccacatttccagtgctcagtagccacacctgccgagtggccagctaccacattgggcagtgcagccattgacggtttgatcattgcaggaaggtctgctggacagtgctgctctggaatgactccgagccctaatgtcaccttggaagaggcctgagtggggatgtccagcagcacagcacgagtcagtgcttaaccaaggtccaggcagtggctcttctgcccctctctccaggtgtcccctgaccagcagccaaaccccatctggcgctttcattcccccacttctatgagggcatcatgtctctcctgctccatggagtccctttgtggtggggtcccagggtgggaggattggatgctgctggctagaggcctctgccctgggcaggcttctcctcacctgatagccaggcagcttggcagtcctggggcagtcgggcagctagagaggagctggccccccggccccaaccctgggaaacctccagagggttggtggaggccagcatcccgactgcagtagagaggaccctcagagacaggcagctcaagcctgggccggcgaggcaaggccagttgggagtcagaagtgcagggatgtgggtcagggaaaggctggttccagagaggagtaatttgggtcttgagctggctgaaaaggaggtcagatgtggatggggagggaggggcggctctgcgcctgaaggaagccatgctgtgggcaggggacccaggcttggttcccagagctggcactgtgagcaagggcaggccctgggaggtgcgaggggtttacctcattaggaaacaagacctatggctggggctggggctggggtgttgaaaggcagctctgtggatctctggactctgtttcttgaatattcacgttgagcacctgttctatacctggcattgtgctagcatgggcggcttgagggctggatctcctctcaagcagaggcctcgctgctcttcctactgcccctcagtaggggacaatttgggtaactctaaatgcgtggaccctgcatctgtctcgctcaagatttgaaccccaaggtctggaggattcgattgcgtgtccatgtgcctcaggcaaaatgccagcgcccagattcatggctgcagaggagtgtgttacagttgggcacatgtgttgagtatcacccatgtgggtcattgtacatgcatgagggtcttcatctgtcattgctagagtgaccatataatttactgtccagtctggaacactattaataatcacactggaaaagcaggcgtaagtaggaccattccaggcaaactgggccatagagttgtcctaattaccaaggcaccctggcgtgggatgaaacctgctccagtgttctctgcaacatccgcatgtggagacatggaaaccctagagggacaagcacacacgcatacacgctcgcgccagcccacacgtggcatcgtggattctccaggtttcctgattccaccctcagctccccaggggccagccagtagttttgcaaggagtttagcagctgcttccaagccctggctccagctgtaaattaaatggggttgcactctcgcctgctattccacttaaggttgcaatcagccctgattagaaagggagtctgtgtgttcctgtgttccgttctgtcttttaaagggttcccctcctttggcctgggctcctggcctgtgtggggtttccctgcaagctgaggctggagcagccagggaaatgaagtgggccctgggttccccacagccctgacttggcattcaaccatctgtagctccagaactttgctcaggtgctttgagctctgatggggtagtaggagcctgggaagagccttgagagtgggcaggaggaccccaggttctgccagctaatttgctgtgtagccccagggaagaccttaacctctctgggccccagttttcttgcttatcaggtgggaatgctaaaaacacaacaaaaataataacctcttcttatggagcaggggtcagcaaactatgccccacaggccaaatctggccctctgcctgcttttgtaaataaggctttattggccggtggctcacacctgtaatcccagcactttgggaggccaaggcaggcagatcacctgaggtcaggagtttgagatcagcctggccaatatggtgaaaccccatctctgctaaaaatacaaaaattattcaggaggctgagacaggagaattgcttgaacctgggaggcagaggttgcggtgaactgtgatcgtgccattgcactccagcttgggagacagaaggagactccgtctcaaaaaaaaaaaaaaaaaaaaaaaaaaaggctttattggcacatagctggtactcattcacctatgtagtgcctgtggctgcttttttgttacaacagcagccgaacagttgcagcagagaccctatggcccacgaagtcaaaagtagttagcacttggccctttatagacaaggtctgtcaacctctgttctagggcatgtaccgtgggccagccattgccttctgccctgtccacatagtatctcatttaacccttccagcagttctaggagatagggtctgtcagcactcccattccattttacacttaagcaaactgaggtaaccgagaagccaagtagtaattgtttagctgtgtttcctcccatgaatattgtgaaaaattttatggataatggttgggttgtgcagggtttgtagtagtgtacactacatcatcatgttggcatttggatgtcccagcaaagcctatagtgaagagagtgaagatggtgaagacctggaagatcaccctagaactgtgctggtcaatgtttaacaaccaggtctccagaacaaaacaaaacaaaacaatccccagccctggtttgtagcatttgctgatttccatggtgtagctgttcctgccatgaccaatttcaagctagcaatgtggcaccactgaacacagagctgggaagagacgggcagtagcacactgatacataatatttccatcacagatacatgagatggaagcagcctcaggagcagagataacgggaaaaggtagtacaaaaattagaatgggccaggcgtggtggctcatgcctgtaatctcagcactttgggaggctgaggtgggaggattgcttgaacccagggaggttaaggctgcagtgagctgtgattgcgccactgcactccagcttgggtgacagagcaagactccatctcaaaaaaaaaaaaaaaaaaaaaaaaaaagagaaattagaatgatttcaagtatttaccaccttgagtttttaaatatagtttctttagtggtaaatgtatatgatttaatttttactaatggctgtgtttaacaactggcttgcagaattcctgaaaatataatctgctctcgtgaaccacatgcgctcactccagcacctgctgctctgaggggccccctgaccccttttacataagagatgggggatggcccccaacagtagtgccccttccaacagccctgccacaggtgctcttcaggcccatcctgtgtaggagttgagtcctccccataaagtgaaggagggtagccagcctccagctggtccacacccatctgcttgactctgctggagcagggaaggtctctgtggcctccctggtggcccctgagatgtttcctttctggccactgtggggctttcccctgcctgctcagccccaggaagcctcactgcttagcctgtgacttgttgctgtgtccacccctgctctggcccttctgtcaccttactgtctccactttatagatcctgagccagaactctaggccctgtttagaccaaggcaccattgcaaacagagggtctgcagacagagggcacagacaccccgtggtgcagaaggaatctcagacatgctggtgggctcgatcttggtactgatctgatttaggtgggttgaggagtcccctttgtaggctgtgtttccccagaacctgactatctcctcctggctgtggtccttggatattagtccttggcagactcaggtgagtttggccattggctctggggacccctgggggagccctgtggctctgggaggcagagagttcctcatattcctatgctcaggctcctccagggagccgtggcttccagccgggcagcagcgggttggaggccacccagttccctggacaagcagcaagatcccttacacagctagcccaagatggagtgcgtggccacagaccgtgtggctgccagccccagcctgggagttgcggtggcatgagctatcaaggcaggaatgtgactgtgggaaacccaatgccctgggcctggccctggggctgggcaagagtgtgtgtgtgtgtgtgtgaatgggggtgaagggtgggtgggcagaaaccagggcatcagcctctcctgcagcttggctctgcacggggctcagagtgggagcagaggcaaagcggccctccctgtcctggccttgtccacctggccaagcctttcctctaggctccagtgtgctgctgccgctctcccagttccagcaccctccttcccctcctccaggaagccttcctgaaggggcttccaaaggcctaccccattccatcccaccccacagatggcctcatcctggggtgtaagtgagtccacattaatccctttttccatagtaacatcagacccgactctgagcttcctgaaggtaggaggtgctgtctgatgcaccttgcctgtcctttgccctgggaccttaggcctgggtgctgcacatgtggcttagggcgagggaattctggtgattgactgcatgtgataaatcttcattggacgcccactacatgctcgatgttggactgggtgcaggggataaaggagtgtgtatgtcttgcctgcatacatggagggtagatgcaggggagaagctgggagaggctgggtaggggctgctgctgaaggctgggcagccaaggaggtgcccatacctcagagatgatgcagctaaggaagagcctgagttagctcatttgagaagacattccaaatggagaggacgacatccctgcataaaggccctgtggcagaggaaaggttatgaattcaagaaatttacagaaggccagaggagaggagtgttatttaacaagagcctagagagatgaaagagttaaaccaggtacctgccaaggaccgtggggtatcatttcattcagttttcactactagttctctacagggcacagtttccccgaacctggccacaggggacattgggcaatgtctggagacatttctagtgatcgtaactcagtggagatgctactggtatctaacaggtagaggccagggacgctgctaaacatcctacgacgcacaggacagcctcatagcaaagaatattccaggcccaattgccaaggttgaagagccgtgcattttccacagtagccctgtgtgggtgcttgtgaggctatgcgtgttagaatgcaattttcaacaggtcgggcagggatggcctctctgggcaggtgccactggccccgtgagcagcagtagccatttcacaacttgaatgggcaatgcctggcacagagtaggtgtttcgtaaatgggtggcacatcagaggagagactgacgggagggagatgcttccccaaagttcccagattgggttttcaagaggccttgttacttgctttgagagaaattccccaagcttgagccacgctgatgtccacacctgaaaaccagaatgtacttcaaaatcaagaaggcatgacattggcggatccccaccgggccggcctgtgtcatctgccctcctcaaggccgacacagttgtctttccctgaggcaggtgcccattgttcgtgagttcactcacttgttcaccaatgatgtgttgagcacctgctgcctgtgaggtgctctgctgggtgatgggtgcacgctgggcacctggctgggctctcagtgggacaagcagatgggtgctcgcaatgtaaagtggtgagtgcagtggctggggaaattcagggcgaagtgggagtgcccaggaggggtacctaacacatccttgcagggtgaccttgatgataagactgcacagaaacgtcaggggacacatggggcaagggcctgggggcaagaaaggagacctcagagtgttgcagctggtgtgagcaggtagggggtgtaggggtttgggggtctgtgggtttggtagtgtcctgactgccagagactcaatttagaggccacagcaggccaggagggaggggtggccttccctctgctcccagggtctaatggggatgtatggagagcccagtctcccctgggagggccagtggaccagaggatataaggatgttggccaggcgtgtgggtggaagtttgcccggattgtgaatcagggtggtacaaagagggactgagcttagtggcttccctcagcctggctctggggggtgtgtctcccctggtgccccagtaatacttcttcctaaaaatccccatctgtctccctgaggtagagggagaaggtcagcacttgggtggcagatggggtgagggtgggcagcaggcccctggaccaggtgtggtgtggctgggcccctcctctggagccaggtcaggttttggaacccaggcagtatgaggggcattctcagtgggagcgttggttcctccccctgcaggacagtcacttgcagggccagggactcagtgaggtccacatggaaatcccaaggagggagatgctgcttctgattgcaggcaggaggccctgcccttggacagagacccagaacgtgctgccagaacctcagacagaggccttgggagtggtgctgacaggggcccagtgaggggggccatctagaggaggtgcctggtgagtggggatgagcactggcagccatccgcgagcagggaggtccctgcaggcgctgggagggagagaggaaggatggggccctggagccggaggcgcctccctccctatgctcaccctagccccctacctgcgggtggggcacatgtgtgtggccggactgaggtagacggaccacagagtccatcccacctgcctgcagctgagtccaccccctatcctccctactcccactgctcccaccccttaccggtgccccagcagctagaggtgctgagatgcaggcatcacgcactgttgcacctgcgggctggccaagccctatttccagcgtcctaaccagctttccttagtgtccctgcctcccaagtctaagaggcctgctgggcctccaggtttgctttgcgtttggtgttgcacaccctgcagccaggggggtgttctgtggtcattcagggctgggcttggtgctccctccagtgggttgccagcgctgcagggccaggccaaacgcctctcctggcaggggcccagggcttccatacctgttcacgagggaggatttcaggcctttgggtccgtgagagagagcgagagagggggaaagaaactccatgtacaaaccaccactgcctggaggcactgggagaggctcttgctggtttgcttgattcttactgaaatgtccacttttacaccttggaatcattttcaacaaatatgagtgatgtgaacaccactcccagcacatgacaaactttatagtttatgacacgccccctccccaagccctgtgccttccctcgtaaggtcattgatagctaacatttcttgagcatttactgtgaaccaggaagtgtgctaagaactacatcttctgtatcttctttaataatcaaagcaactctctaaaatagatactgtataattatcccaaatttataaagtgattgattcagagaagttaagccacttgcccaaagtcacacagccagtagtaaacagcagggccagaactggagcccgaggaatctggtttcagagcccatgttgaagttgtggccaaaggaagaggagagtccaggcatctccctgtcagaaatgaggatgtcctgtggtggaagtcagagcccacccagggatagcaggaccttggagagtcccctgggagaatagagggactcagcctttcccaagtgtgtgttttgcaggccctttgcagcaagggagcagaggaagacccagcctaccttaggatgcaattcctttttgacccagagtgaccagggcaggctttgcttaggtgtcctaagatgatctgaagacggggaggcctgggatggttgacggcacctctggctgtggaacagcataagcttgctatgggagtgagtgtgtctgggacagctttaaggagcgtggtttgcctgaagccaagggccgggtttgggggaagaaagccttggtgtcggatggggaaagatagggcgggtcactgggggtctgaatgggagaaggctggactggacctttcaggccaccgaaggattcaggccgaggagctgcatagtgaccgagggtgatgaagctggttttggcttggggatggctggccagaggtgggagaacaggtgtctagggaggcttcttggacaaggggctctgggactgagtcttgagggtgggcatggtttggagagcaggggcacagtagtggcagtggtgtcttgtgttggaggcactggggggctttgtagcttcagagcctggggagaggttgaaattcttgggaaatggttccagggtgaaggtcagggtggcccagcagaagaatcctgggaactggccactctgggtgggatgaatgggccgtctgaggaagaggccagggttttctttcaagggtgtgtacacgtttgtgagatgtgggactgaacaaggaagtggagtagagaccgttttattacttaaccccacccctctgaaatggagcaggcgacagtttgggtagtgggcaggagggagaggagagaggcacatggagaaatttgagtgagtgcagagggagcagacagcacggggtgtctagtaacggccaccgactctccccagtccctctgtaggctgtggcttgggcttctggccctgggctgaggaagtgcatcggagagctgggtgtctggcccagggaagtggtccagtcttggtgctccccaaagtggtttgtggctcagtggttggagcccagtgctaatgagggcgaggtggcagggctgaccatctagctttatacacagtaaacagacagcttggcttccgagcctgactgtccacccactcctgtccccacctctgtcctcagcctgagccttgctcaccctcagcagagtgggaactggtgagagatggtgggtgtgtggtgcagcttcctccagagcttgggacccagctcgatgttagcagggggtggcagagatggggacccagagatgctagcctggaacctccacatttcgattccactggacttgtccctagtgggcagatccccatttgattctcccctggagagccccttcgggtcattccttctaatctctttgcctggaacaactaaaaattccgttctgactcatctggtcttcactagagagggagaagaatttcctacagtcctttggtgctttgacattggagtctggtgattttttaggagaggttgagctccccagaatgaaattagaggctgagagttcagctttcggcagcggagagatctcctggccctggggatctaactctctgggctagtctccctgccacccccaggcctgggggcagaatctgccataaccagcttcgtgtctccagggcggcgtgatggatgacaagagtgaagattccatgtccgtctccaccttgagcttcggtgtgaacagacccacgatttcctgcatattcgactgtaagtgaggcttcgaggcctctatggggtgataagggtgtgtcaccttatgcttctgtttggatggagttatacgatcagatgtgtatgtggggctctggggagctgagtctctgtgctttttggtgggtcagtgctgtgtgtatgtgtgtgtgtgtgcgcgcgtgcgtgcacgtgtccgtgcctatctgtgtggtgtgtccacccactcaaatctgagatcaggcatttaaggccctgcgctctgtggctgtcccattgtctatttggcctcccctcctcccctcttcctctatctcttctccccagccctaggctggcccaaggacatgttaattagtcaggtgtccgctttcaagctgtggtctgttctcctgacctcgcacagtggcctgtgtggtttccctcattcagcccctctgtctgctgccctttctagggacagactccacctccccccgagccccagctcttaaccactccagccactcactctggcacctctgttttttcccttggtgaagatgggaaccgctaccatctacgctgctacatgtaccaggcccgggacctggctgcgatggacaaggactctttttctggtaggtgggagagaggcaggagagtcagagactgtgggctgagatctgggaatggagacatctggctttcgggcaacaaggggtgctgtttgctgggtgcatggagatgggtgctgtcaccagggtcctgtggcttcttggtcgtcaggtgcagcaaactcttgtccatggcctgctggtcttcttggtaggatcaggcttcgctgactgtcccctctttcctgaaagccccttggccttggctctagccgccagtctctggagggtccctgcagcctcctccctgacctgctcctccttgatgcttcattgccctataagcctgatgctccaagaagtcttgtctgtgtcctctctctgggcaccggggtcccccaacttctccaccttcactcacctcagttcatcctgtgcaaacctccatgtgaccttgctccccagctccccccacccagatccaggctgcctctgcatttcctgccatggccctggggttggcagccatctgttacccaggctggaaattctcagtcacccagtcctgaggattctacctcctgaatccctctcagatctgttccctcctctttaatgtcacactgccatctgacactggccttgcccctttgtatctaggtcattctggttatcttctgatctccctggcaccttccacactgccccagacacacctggtcacatccctcccctgatttcaagtatagacactgacagataacctccaactcagcacagcagacaagtcccttgtgatgtaaccctgtggtcctcacctggttcaccttttgctcattgccctctatccagtagctccagccccaccaactctgtccacgttgcccatgtctggcctttgcactcagtgcgctctctgtctagaacacatttgctccctatttctaaccagcaaactcctagttatccttcaagacccagcccagatgccctctgacttccccaagccaagctgtttgctccttccctcagcacttggccagtgccttaccagcacctccctcagaggccttcccctctgcacagatcaacagtggtctatctctgccatctccttcctgctctgaccatgagctcccccaggaaatggtctcgtcttactttgaacctgcagcacttgatggctaaagaacaaacacttgctgagtgctcactatgtgcccaggcgttttgctgacactatttcatgtaacccttacaattgccctgtgaagtaggtggtcaacatccccattttataggtgaagagacagatactcggataggttaactaaatgcttgcattaaaatagctaccaagtgacagagcttggaagggaacccaaggctatcactgtctgagtgcctgctgtttggttgagtagaactgagttccatgggagtgacttcctggtcacagcagggctctgcagctgatggccatctgccggcttccttgctggtccactctcctccgcgatgtggggtccagtctgtgtccttctctccagcagctgtggccctcagtggcccatcctccagctctgtgcagccaggtgcggggtggatgaggaagttctaccccgttttgctttggggccagggtcctgagagctccctctgcaagtgtatatagcagcaacccgccagaatttacaggcccaggccagacaggcatctgcagtggctaacttgtcctgggaaacttgtccaggagtctgacgattagaacttactctgagaaaaaggacatggacgagtttatagccttgcttcctctcccttcccggaagggcgtgagaggtgagggtgccgggagcgggtttgtgagagggggatggccagggggggcccaggcagaagcccccttgtcctctgtgggccctgcgggccgagcaccctgcagagaggggagggaactcctccaagggcccagcactgggagcctatgctcccctctggagacggcattggtagggcagtggcactggtctgcggagacgtcacactttccatcctggccccaccccctcccccaaataaacatcccttgagctttgagggcactgcccagggcttcctcagaggccactggcttctgaatgaaaggcccgattgagcagctgctggaaaggaaaacagcagccaacatgggtgaacctataaaacccagagtgtttattttcactcccaaaccctaaaccaaagcaatttctcccctggaactgaccctggggcggctggcggccggaggctgtgcatggccaccggctggcatttctctgaggaaactcatgtgtgaatccggaatgtctggggccaggggagggcctggcacagtgtctgtcactggtgcagcttccagctgcctgccgggtgtctggggcagagagggccctccttgaaccactctcccagtgcctctgacctgtggctctctgggcctttccccgggggctcctacagccctctgctgtgctctttgcttctctctatatggtgggtctcggggctgcccggacattggggccatggctgctccttctccctggtcgaatatttgaggagataggcaggggttgcccagaaaacacttgttgaataatattgaacttgggagagggaggctgtcctagagatattgccatccagacggcctgagggttgcaccttaggtggggtttgagtgtatggctgggatatcaattctctggaccagtggaagggcatctgtggtatgtgcttgtgtgtttattaatgtgtgtgccctgtgcagcaattagtcataaaaaacataaagtgatacttaattcagtgacttcttttttttttttttttttttttttgagacagagtttcgctcttgttgcctaggctggagtgcaatggcgctatcttggctcactgcaacctccgcctcccaggttcaagtgattctccagcctcagcctcccaagtagctaggattacaggcacccaccaccatgcccagctaattttttgtattagtagagatgagatttccccttgttggccaggctggtcttgaactcctgacctcaggcgattcacccgccttggcctcccggagtgctgggattacaggcgtgagccactgtgcccggccagttcaatgacttctttttgttgttggggtggggttcccactgctttgtgaacatctgttgtatgtactgggtttgctttgaaatgaaaggctatgacttgagaggacttagaacacgtcaccaacaccacacctagctccgtcctgcccacccctttggtgtggagtgggtagcattgcttccctgaacggtagcctgagctgagttactcttcattgtagattggtgtttctcacagggaaccagggaagaaggtgtcaatttggccccctctgccagctaagaactgctgttgtggttggagggatcataagctctgcttgtagagctgcccgcccagatggaggaccctcaggcagctctatcatgaggtcaccacgttccattccaagggatgaccctcagcttaggaggggcccagaaatccctctttgaggccctcccaggtcactgggctcaggcggtccaacttggctaactgagccaatgagagatggctgatagaccagatgccacgtcatttattaatttacaggggtgagtacctctcaagaaagtagaaggtcctgtgccctctttgctggccttacagctccaggtaaggtcacagtggtgggccaggtaggtgatcctatgggatggtcctgccagaccaggctgcagtgaggtttgatgagccggagctgcccacagctggggccacgtcttgatgaccggtgccttagtttccctcagattcagactcagtcctgggtggtgctggggatttcttgcttttgggtttcccaagtctgaactccagtcttccttcccaacccctttttaagcacagctttttgttaaggttggctctggctggggcaatccaccagacgagcttaaggaggtgttttccaaagtgcattggaggcttgtgaaatgctccacttaaaaagggttcctgagtaagagagactgggaaacactgcacgcttcgagatttacaatgcacagtggcatatgagaggctctgaggcggctgcagggagggagcctgtttaatctgtttaagcactcattagctccccagaaaacccaccactcaaagaacacattttgggaaacactgatctacaggattccgtccaaattgctcagcaggaatccaggaccatttgtgatctgcccctcctcccctcctgcctccactgtccccactgccctggtgctcccttcatcccctcagccagaccaatggcttgctgatccccaagtgcctaaagtctttggtgtgtttacccttgccatgcttgcgcctggaatgcccccttttccttggtctgcacggcctacctcctcatccttgaggcctgctttgggaagcctgacttggtgccagcaggcgacatcaggtgctcctcacccctgcccctgtatactccactattaagtagcacatcaccttgtattatacctgtttaggttacaatttccaaccagtagtcacactcttaagagcctggattatgtctcattcatcttcctattcctagcactgtgctaacctcccacaggatagccaatcaataattgtatagtgaatgatgcatacaaataacgcaagagtgaacgtctttgtacatacatctagctttttggtgaatctggatgactcccaggaatatgggaaaagggtataaatggttttatgtttttcagggcatagtgcccaattgcttttctgaagggttgctgaattgcttccagcaataaaggagagtacctatttcatcaactctttgcccatactggctttttataattttgaacaatttttcttaattttataggaaaaatattgctggagtctagttttaatttgcgttgccttgattattggcaggcgatcccaccctctctgaagggccctttcctatgaggtggcatggtggaaggagcactggactaggagtcagggggtctagtacatacgatcatggccgagcgacttggtcttcctggggaaagctcccttttaggaaaactggggtgatacttcccactctgtccccgaccctggtggtctgagtggttggtgggaaggccgaggaggaaagcttagtgtattgtgaacgcagaaggtcctccccggagctccaggaaggttggagcagcagggctcagcccgaacagcctggtgcagggctctggatccagctaaggaatcgtctgcctgaggcctggtgataggtccctgactcccttgtggtgatgcagtgaggtagaatccttgtgtgctcatggctggatcctccctggggcagccgtggtcctcagagctgcaatccaaagtgcttgcctcagctagggcacgatgtgcgctgcatatggcttgtgggtgtggccctggggagagccctatgctgtgatgcacacgcaaaacccagcccctcaccttcccctccaccgctttttgggaatctgcctctccctcctcttagctttcctggaagagggatttgtctgtgagtgtgtctggctgtccttcatctgaccaccttgctctagcaacacccctactcccctttttcctttttttttttttttttgaggagtggggtcccgtgcagggagaggccaggcccctgcacacagtagcccagtgtctgaggccccaggcctccaggcctgctctttacaatgcctttgttgtgtgttttttcctcccatgggcgggtggggcacgtgtgtaggtctgggtgatttttgtttgaaagccaccccctccccgttctccccccagcgctgagctcattgcctgggctgatggggctgctggaaggagtcagcctgctcgggggccagcgtggggggtgctgccaacaccaatacagcgtgcacagccgctacaatgtgcaattgtgatctttgtgtaaacgcggtcggtctggggcccgcatgcttataaaaataaagcgtagggaagcacggggcggggcgggaacaaaaggggctttttcgctggctctctaatatggttttatttatcggaatgcgccctcctttccttactggaacctggagaggttctctgccgagcttggagctgatggtatcacagccagacggtttcattaaatgcacagatgcctctgggccctgccaggggcaggacggaaagggctcagggccggccctgccaggtccagtgcatggaaaggagagccccatgccagagaggctcccaccaggtaggggtgggcagttctctctggctccttcccctgccaagggcctcccattgccctcttctgttccacagaatcaggctcaaaaccattttcctgcaggaagtcctccatgatttgtgcctgatggctgtcaggctgatcccaggctggtggctgccttctattaaccagacccagcattgctcagccagtgggtggccatggctgagtccgccccttaacttagatacctcctgctcttaaaatcagctctttgggcaacaggtacaaccttggatcctgctctctccatcccttgatgggtttcctgccattgcccaccccaaccttcccacctctttcctggtcactccttgccagcccctttctctgccacctgtgcagtggccatggtgtcccatttggtcttcttgtggccagggagcctgtcttgctcttctcccctttgtgcggaagccctgtctccccatcccagcccctgggttgtgtttgaacctgcatccttctgaggccagcgacacagaggccattacctctgaggccactgaggccctcttgaggtcacaaggggagtgaatggcagtgctagggctggactgtggggctcagagggcacaggccattgcaggatggagtagggtgccaagggtattgagtgcatggttaggcactgggttcagccctcaaggtgacatcccattaggagaagctgaagggagtccccttctccaagccctgtgttcctctcccaagttatatgcactcagaccctctcctgcattggtttccaaaatgtggtcccagaaggcagcatgagcatcacttttaggaacttgttagaaatgcacattctccagcccaccccggccctgctgaatccgagtctctgggggcagcacccagcagcctgaatgaaccttccagatgatcctgcagcatgctcacattttcagaaccactgccctagagtctgctctagtgacaccaacttgcctttgggacaaggtagagggaatgagttgtggctgggtcccagggtggcgtggccaaggctggcaggctggaaaggagtttgggggtagcagggagctgcaggggcctttgggtttctcgcacacccctactgctaaatagctgctgagtctgtgcacttccctttagcaccccacacccatctaagccaccattattcctccctggaccactgcagtgacctcagaactggtctccctagacctcatgctccctccagtctgttctccatgtggcagccagagtgagcttgctgaaacgcagacctagccacgtcagtctggtggcatcccagagctcacagacaccagcagctctgctctgcttccccttcctcaaggaagccagatccctccctaacacatttcactgcattttatgtctattcttcaaggctctgacccaaattgtaattttacgttagcttgtgtggatattttatatttagttcaaattgtattctcagcccctagcacctagcacctagcctggcataaagaaggcactcaatacatgcttgctggatgaatgaatgaatagatgaatataccatacaggcactcacttcccccagctggaccctgcttccagcagccacagctcaggaagcggcagaaaaggggatgctctctggatcttgtgcccatttgccaggacccaggctccatgtccccaccgtggcctccagctggcctcatggtggggctaggagagccccatagggaagatgcatcccagcatgaatgttgttgctccagagtggcagccacaaccctgctccagctttgtggccccacatggctctggagaagacatctctcagggtccctgctgtgtcctgtctcccctccccctctccggcccatgcagatccctatgccatcgtctccttcctgcaccagagccagaagacggtggtggtgaagaacacccttaaccccacctgggaccagacgctcatcttctacgagatcgagatctttggcgagccggccacagttgctgagcaaccgcccagcattgtggtggagctgtacgaccatgacacttatgtgagtctgcccagctcctgcctcgtcccctcacagggagggaccatgtgcaaaggtggggtctccagggactcgtggctgcccagccagatgggtgctctcctaactccacgggccctagaacaattaaaataattttagagtcattaaaaatggattgctagcacagatgccgttcccacagcagacattgctcatcagtggaagggaacatatccggaaaaggcgcttggttgtgggtcaggggcttgggttttctctgcctctgcctcgcctgtgtgatcccaggccagtcccttcttctcatcgaggagctgcgtggaatccttaaatgtacatcaaacacttacgttactggctgagtggcccttcacttggggttccttgtttaggtgggagcccagacacccacacagtggagaatcctccatgtgagagcacgggtccccgagtgcctctcaactctgtgccacaggcagggcctcttaccacaactgtcccacaggacctcctgtggtgacaggcgagctctagggctgtgctgtccaaaaagggagcctctagctgcacgaggctgcccagcactggaaatgggactggtgcagctgagaaatgaaattgtaaattttatttcattttaacgaagtaaaattaaaatttaaatagctgcaggtggctggtgctcctgtattggacagagcagctctaggaggctcccaggagggagagagtgctatgggctggaatgtcaggaaagcctttgggaaagacccaggccctggaggaaatgtggggttggggtgtcagtgcgaggcagaggcctggaaggaggagaagggagtatgaggccaggggagcaggagagtgctgacgtcagggcagcattttccgaagaggaggctggatgctgccggaagagatccactgggcgcaaggtaaagaggcccggcctgcgctggaggtggcggtgggatgaaaggggaggggctgggtttggaagacattgtcagtaagagttgccctgaccagacatcaggttccctgggtgggtgtggtgaacaggggtgggggaaggtgctgctgtctatatgcctcaccagatggcaggggcagctggccatgggtaagctggcctgggctggggatgcaacgttggggtgcttggaaggaaaagctggtaccatgggaaggaatgagcaactggaggaagagtccatgtgggactgtttggagaagggcacaggccctggcaccttcggagcaggagggaggcaggcggcagggctggcacttctcggggggactcggcaggactgagtgcaagtgcagaacagggcgggagggcagcggtatgagctgcaggctgccagagccctgagggggcttgcccctgcatccagtgtgacagatctgtcttctgggcggcagggagttaaggaaagtgcctgaagaaaaggcacctgccttgatgaaaacatcattttgtccaggctcatttaatttgatgaacgtgatcacagtttccccatttgcaaagtgggtgggaatttaagggtgaaatgagcaggagatacagaagtccctggaactgcaaaaacctgtactgctgagcgcattagagaaatgccaggaggccgtctctctggtctccaatagtcttagcgctgattaaattgtagcagggcaaacactagttggacagtgttgaactgtccagagggacttcccgaccatgatgggaattcaaacctagtgacagtcaccacaggctgctcacagcttgttttgtccttgagtcctgctaaggagagcagaattcaccattctgtgggagggggtgcccttactactgaggccctttctagttcagaaggcacatgtagacctgatctctctgaggctccctagagccctgggtaagggatgctgattcttgtctctctacgcttggtctagggtgcagacgagtttatgggtcgctgcatctgtcaaccgagtctggaacggatgccacggctggcctggttcccactgacgaggggcagccagccgtcgggggagctgctggcctcttttgagctcatccagagagagaaggtgaggctggtctatatccagatccaggaggcccaggcaggagtggggtgggggccaaccctctgtgggagcctggaacacctcctctgaagccaggcctcctgctgagacccattttctgaaccctaagtcaggacaccatctaacatcggaatagaatttggggatcaggaatgtctgagtcctctggtcactggatttaatcttccttgggtcatctcctgacgtggtttctgggaggaggacctctgtggtctgattaagggagccttaattgccacaatgtgagggactccagggacaggcaagggcaggatccccgttgcattgctggcttcaccatgacctagcctcatggccctgggccagccactcccctgctgtaaaatgagaggtttgggttggacctgtaccttcaaacttcctcttagtatgatgtgaacccgaatatgtagactgaataggagtagggctgctctgggtgaagtgtctggaggaatgggcacagtgccagcctagcatcccttctaccctcaaggaatagaggctgcaaaccatggactgtctgatcactgacatagtccatgagtgtcatgagggtgatgggggccttaggtgacaagcacatgaccagagctctcttttcttcactccagccggccatccaccatattcctggttttgaggtaagtcttgctctgacctttccttcttcaaactgattgccagtctccctgtgtttggcatctctctgggttaggaagggtggccaggcattaccgcgatcctgcctcaagcccccggggaagctctttcaagcagaggagggcccgggctggagggagctcaaagtctctgccaagctcaggcctttgctgcccttctctgcgaagtccaagaaccacagaatcccagatggaaggatcctcataattgtccagcccagtggctttcagctggctgagcattagaatctccgggacagcactgcccagggaatcttaatgcacatccaggactgagaatcactgacttagccccagggttctgaaagtgtggcccattcttgagtcctacttcaagcccactgaagcaattctgagggcagcccagcaacctctgtatcaacttgccctccagggccttctcacacatgcacgagtttcagaagccctgattcagaccacatttcccactgaattgttcttaccaagacctcattttctttcctcttcctggacgggggcttcattcccttactgctgctctccttccttcttctggaggtcttggtagaaaatgttgagctttgactggtacccaggtgcactggatgcattacctgattacatgccaagttcagctgcatctatgagaagtagtcatctgggctgtgtttggacacctccattgtccttcacaaggcagcccacacaatttttagagagttcttgggaggccctcccttcatgcaagccctccttcaccagccctgcccctccagctctccctccctgtcctaagctcctgctctcagtgctgcccgctcctgggggttctaggttggttctcctcagcttgccaaggccacaggctcccaagcccttcccatcacctgctgctcttctctttccttttgttgcttccagagattcctggcgtccaggcttatgctttagcctttcccagcgtccctctgcactgacatccatcacaccttctttcccagggaccactttaggggcgtggctgggaagtgcatcattcttacccttggtgggaggtggtttctgttggctcctcttagtggtggcatctggcatgctgacctctggccccgcctagtgctccttgatactaatagagaactttttccccttccaacccctctcaccatctcctggatgtgccacatcccatggctgtgggccaggtgcaggagacatcaaggatcctggatgaggtgagctgggcgtggtggttgggatgggtgggccgaggtagagggaaggtgaagccagccttcaagcacacacctggagccttccaggttcctggtgcccagcaggcatctgtcacatggagacctgtctggattttattccccatgctgtgtgtggattcagggctgcccagagtgtgtcctgggggtgatcctggtctaagaaggcttgctgtcctgctaggaggccagatttcacccagacaacatgaatagcaatacagattcttaaatgattaagtaccaggtggcacattttgaagaataaattgtttggaaggggccagagtagtcaaggaagcctttctggtggaggtggcattagtcaaatgtctttatgcccatcagcacttaggaagaaagtgagaaacatggctttggctcaaaaggccaaggaccagtttgggtcctggctggtttgggggatggggcgagctggggacctcctagggacgggaagaagtttagagtttgcatttagataaagcaaggctgcatcctttgccatgggaggagagatgcacgttccctatggcctcctgtgcatctgtgggtggattgtcgtgagccaggccagagggtgggtggcagagacctgggtggagagacaggaaggagagccctggtcagatgaggcgttgggaaaagggcagccacttcctgccattagggaatccccagaccgacagcggacactatttgacattttcagtgcaatttggacttgaagtgcagagtcaggatgtgggatccacaggccccgcaccccttacctcacttccttttgctcccagaccgaggtggggtccgccaagtgagctcgctgtaattgcgcctgacaggcggcctcctgcttctggctgcagttgcaaaagactgccgatttggaaagggaggtggagtcctgtccagggaagcagcacggagccctctctgttgattgagtgcactttgtggccaaaacccacagcctgctctgaagaagacccagcccagggatgagttattaaaaaaaaagttaaaatccttaataactggattcgtaatatgtaacagtgaaggctcagattccgagggcagggatctggctgcagtctcgtcagaaagcaaatcaaaactgcagctcatgggccagagcccgaagagcaccgagtgccccctgcagggccaagcaggctgcaggctgagggtgggtgtgggtcagcagggccaggggagagcaagtcctaggagtgtgctaggcacagggctgggccaggccagcaggttcaaagggtccaaggaggacctatcccagtgggatgaatgatctgctggtccagggaccagccccagaagatgaccttgtgacctccctcagtcccaggggatagccctgggacccctagctcagcccatgtccttctcacttgaaggctaagcctgatgccaagatgctgagtcctcttcgctttaagaagccccagggctgggtggtccttctgttgccactggtcctcctgtaagtaggaccgcagcagggtgtttctgtcttctttgctgtgaccaagctcctgccttgtatctcccatctggctgctcccaggctcctggcccgatccctgtgaagagtgctcaagcctttctggagggctgggagcctcctcctgagcccctggccatgggagcccatgagagtcagggggcagtgagggaagatgggtgtgttggggagctgtctggctgcaggaggtgtgggtttgagagactagctaggaggctcttgagccagttgagataggggcctggactggagacaggccagtaggaacggatggggcaagtgactctgaaggatggtttaaggatatcctctcttgtgggaagtgcctttcagctagcgcagccaggtgcagagatttccaagccacagtgcctgtgaatgagatgaaatactgtctgcccttgtcgaaggctcccagagcaggacagtgagggtaacttcctggaagaggtgccactgagctagcttttgaagttgggattggtagaaaatgtggggaggtggcccaggcagcagtgtcttgggctgggggcatgtcacctcctggatgtggcctgttggacaacaaacttcccctctcccaggctttatgcccatctgggacacctctctctgcagctcttggtcaggaagtgaggctgttgcatggtgtgtctgaggctttgatgatgtccgggagatctgggtcctcgcagacagagcagatggagggaagggtttccttttcgctctccggtctgcattttctttgtctttccctctcttcctgagtctcttcccactctcctttcgtgtttcactcttcctgtttgctccttggccccagcttcctccttctccccgcctcttctgagccctctgtctggtttcttttcctttttgtctggagaacaaaggcagtccttgctgccaaggggaatgagttcaaagaaactgcaattttagatttcctgagaactggagaatgtgtgcatgcacgtgtgagcgtgtgcgagtgtgtacactctcgagggcacacacatgcacgcacacacagcagctgaggtgatcgtgggtccctgaatgcccagggccccctaggatacagaacatgtgtagaagaagacccatggggcttgtgatcctgaccatttcggggaggtggggaggggagggggtgtggtttagagaattacccttgcttctgctgctgctctcctgctggggcaggggatgccctggtgggagggatcgtatgctttgtggctgattttactgccagttcaggggtgggggccaccagataccactccatccacccatccaggctgcagggtatatggcttttactctaagatgtacccggggtactctcctgtacccccaagtccactggaaggaaaaatttggtgttttgcaatcaggaaaataaagccagtggtcccccatcccccattcctcccccaaggccttaatttaaaacactgtttttcctgggaagtgtaattagagcaacatgttgttcctaacgagctgggtggggcaggcagacaatggagccctcccagcctgcctggctgccccctgcctggagctccccgaggaaccaggatgtgactgcagcgtcttctgtcctctgctgggtgaggtgagggtccataggctactgatgacccggctgatgcaggaggcttgccaacacttcccttgccctgggagcgactcctgtctaacatggtggcccctagactgggctgggggtgcccctttcatggctcagggccttggttcttcgtggtaaactggccagcgggactgatagactgaagtgggcttgaggatggcttcagctctggtaggggagagagcttcacttgttcttggggtcttcttggtctgggctggcttgatcaacactctgcacacctgtagaacccatctctgcagccgcccctggtctgccctgcatttgaagggagcaagacgggagctggtcaaatgtggcttcctctgattaggcttatcagagtcctccatcacccctaggacagtgaatcaggatgttctggtggcactttcagtctacaccccatctgcccagcagtgctgagaggcttcccagttgcagtgagggtcgcagcaccctcactgagaattactgtcctggagagggggtgctgtgcccctcaagtgggctggaccagaaaaaaagttgaaaaccaggctcaagagctggcagagacctcaggactcctgcctgggagatgatcagagatcccttaggaccataggaatggggtatgtggggaaagggtcatgtagacggggttaagagagtcagagtcaggttataagacgtttctggagcgtcttggggagattttctagagaccttgaattaggccctaaaaatgggttagattcagttggcagtaaagaaagcccattgaaccagagggagtaatgagcaggcctggggaggacccagggtcaggctagagcaggcacgggtgctaggaaggaggacagtgcgtgttggattcattcctttatcctcccatccacccactcttctgtcttcaccctccctcttccccttcagttatccattcataatcatttatttattggacgggggaattcagctatggtccctgtgtacagaattgctggtttaaccaaggacacaatcaaatgaacacgtggagatagcatgggtgatggattgatgtgtctttctatgggaataagtgtaagttgctatgggagctacgggggtacttaagcttggggcaccaggaaagatttaaatggacacctgctgtctgaataggaagtacaggaggagtaggggtagaagtgcatttcagacagagggaccactgagctccaagcctcaaagctaaaagagcatggtgcctcctgcaacctgctagcattcagaagggcaggggttgcgtgtgtcccaggaggtggttcatcactacttggggtcatcaaggggaaatttatctcatgagagacatgcccagagaaggcagcaggagctggaagattagaggtcttgtggaggctactttgaagagtctgcacttcatcctgagcagatgggaagacattggaggacttgaaacaaagagtgacattattagaaagcctgccttggctgcagattgtagaacgcgtgggctgttgggagagggtgtcaaaaccaagtgaaagggggatgctggtgaatccaggcaagagagggtagtggcttgcactgagcaaaggagatgggtgggcgggcgtgagagatgttcaggagacaggattaccagtgtttggtgatcagtcaggcagggcgatgaggggcaggaggagccaagggtggcgtgggagcttttggcttggttgtctagatggtggggtcagacttgaagagagcaggttctgagggggaagatgaagaatccagttttggacaagttcagtgtgagaggccagtaggacacattaatgaactaagcagtaagatattggggcttagcagagatgtttgggagcagaaagtctaggagagggctaaggagcagatcagggcttggtggaggaagatgggaaggctgcagaggaggctcagcaaacagggtgagggccagcagtgtggatccagagagactgtttgggaaggagatgaggttagctggccagatgctgctgagggggtgagagagagaagagcccacgagtgtccttcgggtaggggactctggagacaaatttccggggaggggtgctgagggcagaagcagggtgcactgggaagcaggtggtgtggacatgagggaggagaggtagtggatggagacaggattagagagaggagaggagggagcctgcagagaggagggcgcgggtggatttgggagatggggatgtctttaaattgggaaggagcagatccaggagatagtgtgaaaaattggggaggagcatttggacgcatggtcagagggggagccacagaggcaggcaaccctgggaggtggcaggaaatggcagggaagaagcatgtcctgggacccctggggacagcacggtggacagagatggccttgggatgcatgctgtggcctcatgctgaggaagctgcctggacacacctctaaccactgtctctgcctgtctcttccttctgcctccgctgggcccgacgctccgcagctgtgtgctcctgccttcttcctccagggccttctccaaacggtattggagcttaaccttctccaggttcttgttcccctgtcctcagcaagcaggctcctgaagatgcggagcctggtccccagcctttagagaggaatgtcatcaccacggagctcgagggagccccgagggacagaccgaggaaatgagggataaagtggatactgcccagcgtttgggggcctagagaggaaatattctgggaggaatgtattcatgagttttccttagtgattttaagagaacaagtgtatgagaaagattggtctttctgccactccactcaggggatcctggggctgttccctccctgatggtttttttttttggcccctctttgtcttgggtttttggctctgggtccatattgggttgggcatagccataaggggccatgaacagaccacaagcaggcattcaagtgcaaccctgtctttaaagaggacaccctgctgtgctgccacctgcagctggtggccttggagtgcccagggaggacatcaaactgggggtccccatagcagccaggtcactgcagaagctgtgtaggccctgcctccatcctccaagggcacctttcatgtggactgtgacatgcatagcagcccctggagctgtgcactgcagcagccctgtccatcacccctgcttatcagacggtcaggaatgcaggtgcttcctgcatcatgtcacctgcattgtgggtctggaggaaaatgataagtttttttgctttatgccctggtgacttagagatagtaataaagccagtgttgccctgaaagatgcttctaatggctcagctctcttgaagtcaccctggggagatcaacaccaacaccaatggcaaaaacaatggtactaacaacaattctagtaatagttacagtcacagccatttactaagcgcctcctgtgtgccaggcgctcttcagatgtgttctctcatttaattctcggagcagcttatctcagatcttcatctgagaatactgagtcactgaagttgagtaatctgtccaaggcctaatggcgaggaggtggcagagctggaactagagttgaggtctgattctaggactaagcttccaactgctgtaggttgggggaaacatggtgtcatcagggtgtcgctgcacaggagtgtggcttgggttggctgtgaagtgattcatggaggtggggggaagctgatatctttctctgctttgactgctcccaccatctatggcagagcgtctgtatggatgtaccatcctcgcagaaggaacccaacagaagtcacttggagaatgaatccaatgatttcattgtttaataaatgagattacatgaggcaagctctgtaaagtgtctatcacagtccttttaattatagttaacatttccggagtgtcaggccctccatgtatggatgtgcaggttgggcactgcacaaggacactgtgtctaaggggctgcatttctagcacagacaccatatacttgtatttattataacaatttcccaataggtggcagtaaagtgtcttgttctaataaactcagaaaatatgacaactttctgacatggaagtaaagagtcttaagcacatttttctctaattgtcacaaagacaccacatgggctaatagtcctgttgaaggtttacatgaagctctaaaggttatacaggtattaacttcctcaaccctcaccctaacctttagaggttgacaacttttgctaaccattttatagatgaaaacattcagctataggaggtgaaataatttatttaacgtcatacatagtggagttaggactcacacctgtgttcctaactgctgttattggtggttaactatctaaggcagtacctgcctcccttgccccaccttgcttcctcatgtagttctttgtgatcattgaggattcctgcccaactctttctggcaaactcttagtaggccagaattgacacacacttgctcgtctctgtagtggagagagaccctccccagcagtgtgctttggtgctctggggagccccttctcccattgctcagttgttctctttctggctcacaatgcaagtattctgtcctcacaggggacaggcgtgagaggtgggggtttggggctggaaggtgtctaggggtggggaagaaataccaggacagatgataacccggaagggtctgagccaggaggcaggagaaccaggctggcgggcaggcacatggtcctctctgggactgagaggggctgaagtggatctgccaggatggaataggcagtgtgtgcacgcatatgctgtgtgcgtatcagggaggggcagacccggagcagctcagggggcatcagagcctgcattatgggaggaggggtgacgggattcagttggaacaaggtgacctgaaccctggatgaaggtgctggaattgtgatcctggagaagatgatgcctggccgaaactgacttagctttttcgtttctgcctccctgtttgtccacttctgtctttccttctctgtttctccctgcacttggcatttctttctgtcctatctgtccttctctcttgtctttttgccttggtcttccttccacctttgtctccattctacctgctgtccactgcagtctgaggacacagacctgccctacccaccaccccagagggaggccaacatctacatggttcctcagaacatcaagccagcgctccagcgtaccgccatcgaggtgagccgtccgggcctgggcgtgggggctgggagcagcctgcccttccccttcctggccccagcctttcctggggcccggggccttctgagccactctcctcattctgtgtgcttagatcctggcatggggcctgcggaacatgaagagttaccagctggccaacatctcctcccccagcctcgtggtagagtgtgggggccagacggtgcagtcctgtgtcatcaggaacctccggaagaaccccaactttgacatctgcaccctcttcatggaagtggtgagccccacctccctactgtccccttccagagtcctggggctagaagttctacatgtccccgagcagcctggggcttgtgctccaattccctgcgggatccagggtaggacccctcactttcctgtgaacatggggagaaatgctcataccctcctcactggaagggttcaggcctctgagtaggacaaacggggccaacctgctcctcctatacccaaatcctagatcagcgaaagtcccaaggagacatcccctggctgttgtccctctgggacaggtttcagtcccctggagcgcccttggggacctgctagggcttggctttccaggattcctccaaaccttttctgaccatgtcctcccccagcctgggccccctcaaaggagctcacccccacagccctcaggccctccaggcctctccacctccctgggatgcctagacctagtggccagagtaaggcaggtctgaggaaaagaaaatggtttgcaagatgaaagcgctgtagaaattccaggcccagtggctgtcaacagaagcctcctcttggccgagccaaagccgcccctgaaggagagcatataaattatttcaagttgtgttcaaagtgcttttggggtgtgtggggggaagaatctgggtctgtaagccaactcttgagtatccacttggggggactgtctgtaagaaatgttgagtcccgggccaactcccctcgcccgctccccagccagtgagggagcgcagcctcgtttccacttcaggctgaacaggatgcatttggaaggtaaagctgtggggggaaagccggcctctgcatgcagcattcaaggggccgacagaaaaggtgtgtggcttcgctcgactgcccagctctgggccagccaccattttggatttctggctgtggggattatctgcggtttatagtcattttctgctctttgggcttgacctggagacttcccagagggggattcaggccagtgcgttcttcctcctccacccagatgctgcccagggaggagctctactgcccccccatcaccgtcaaggtcatcgataaccgccagtttggccgccggcctgtggtgggccagtgtaccatccgctccctggagagcttcctgtgtgacccctactcggcggagagtccatccccacagggtggcccaggtaggggaaggggagatgatgggcaggtcagggaagggggagcctcagggccaagctacccttcctagttgagatgcatcctgaaacccttctcttacggagacctgaatgagaagtggtttctgctctgctagaccacagggtggagaccttccttagggcagagcctagctctgggtggggggcaccaggagcaggtgactgatacccgttggagctgaggggtgagggctcaaagtgggcccagggggagggagagagagggcagggagacaatgatgcggggagggaggaaagaaatgtgaggagaggaagacagaagtgggagacagagcatgtgaaggaggatgggagagatggagatgagagagggacttattgggaagtaggaagagagagataccgactgagaaatgtggagagactgcagggtcttgtcttggtcccttggttgagccctggggctggtgaggggcgagccttttgagagagcccctctcaggcctggatggctccctcccctgcagacgatgtgagcctactcagtcctggggaagacgtgctcatcgacattgatgacaaggagcccctcatccccatccaggtaggatgggcatcctccagggaggcctgggtcacctttcccctccattcctcatcaattcccaccccttctcccctacccttcattatcacacagcctctatacacatccccttctgggctctgcggttggacactgtccagtagagagacccagatgggagctttcagtctggctgaggggggtggggtgtgctcatctgggcaagactcaatcccttttcttggatgcatatgtgaaaaataggccatctaccctgggggccatggtgagggctttctcctggagatcaccagaaaatcagggtgaggagcaaatgagagaaggacgacaggggagggagtgagtgggccatctctggggtcctccagccccatctccctatctgggacaggccccttcttagggggaaggttgttctgtgggcttgtgcttggtggctccttggagacagcttagaaagaagaggctgtgtccaagccaagagtctatctcgccccattcctccatctgcagggaaaaggaggaaggaggcagggaggggccttattctaaggtctccagccctgggggaggtaggagtcttccttttgctgcatactcagcaactgagggccagcctgtgatgcagatgccaatgccacagagcatggcaggaggtctgtggcaccttgtgctgaggggcagcgctcccccgactgtgggccatggagtggctctggattctgtagggttgagcccatctggtccttcccacagtagacatggagaaaggtctcactgtgagcaccagccttgaactcaccatctgttccaggttgtcaccctcctctctgggctttgcaagatactggtcatacccctggcaccctggggctcccagaacttctgggccacccagaggcagagcctccaggcctgtatagacaacacctgtgtcctcgggccttgctgcatctgtagtttcactgatgctaaaagtcctcagaagccctgtgttccatctctccagcctctgtggctctccagggttctgccctgccagcctttctgctgggaagacctcctgccccctgtcccttgtccaactcttgatcattgtttaagacttaacttaggcatggtcgcttctttgggggagtctttcctggctcctcttctcctgtgagacttgcctatctttgggtcactgtgctgctctagggcctgctgtctctgtcaatgttagcatattccccaggctaagctcaggggagcaactgcggctccttcctctttgtattctcaatgctcagcacaaggcctcgcttagcggaggtgttaatgaaagtctgtctgtcttggcaagtgggtagatgggtgcatgggttgatggatggatggacgaattttctggctactgtctgtatggatctgaggaggaatctctctcttggctggggaaacccaaatggaaatttcagatgtccctatgtgaaatttagctaaactcagtgctagtgcctctgggctgcttgggtgtttatagctgaattaggcagataatttgccccaaactctggctgcctgctcctggctcctgtttcccggctgctccatgggcctgtctgagattgtgcagggaagtgcagggcctgcccagcaggatttccgttctgtgtgtgctgccctcaaaatgtctacacactcagatggggagggactattttaggtcctgctggccacaagcacagccagaggcagacgatgaggaggcccagcctggccatcctcccggcgttgacatgagggaactggggctgggatctgagccagagctgggcctgtgctgtttgtgggagcacacggccactctggctagagctgctggccagaccagcagcactggtgggagctgggatggggctcctggaggtgtacccacctggggaggggctgggcctcccctggcctgggacaggggaggaggaggaaatgacactgatttgctctgatgggggaggcttggaccttgccctcatggagctccctgtctgatgaaagagacaaaactctgttctcaaaagcctcaaacccagcagggagaccagttctgttctgcagggagccctggccctctggggaagccccttttctggtatctgactttgttccatgtttttctctgagatctattgctctgatttggctgatccaggaaatctttcactcactcgcctctcctccctgtccctggcactctgaaggacaggcgctccaaggccaacccaggaggcagctgaccccgggtgcagttccagtggtttgctagataactatggctgggctttcttcctctccctccttccccagtgcagatagcatgaagggccctggcttctggggacaggagggacgagaggtctggcagaatctggattttggctggcttctgtctgccccaccggtgtttctcggcagcctgttccatcctcacagttgatgcagccctggctggtgctggatgtgttcactgtgtcctggctgtggtcctaggacccctcctagctcaaacctgctcttgccagagttacccttccatcttggtcccttcctgtcactttcctccgtgacaccttctctctgctcccaaagccttcttaccagcatctgcctaggtcctgggatgagctggccacacatttagaacatgtcaccggagacccttgcctgatgttcaggccatgggctggcactcaccacggagtatttcttaggtttctagaaatgttttggtttgtgtcgagagtggccaattctggaggtgactcaaaacgtgtataaggcaggtctgtgctcagcatcccagggctcgtagatcagtgtctgtctctaagggtaagggtggggggccctgtttagggggtgcctggcctgtttaaactgttctccatggtgatgaggattgggatgagaaatactcacacgtattaactccaccacttgttcttggtctgtgcagccatcctatgtgtagactttagagtggcagactaggggtgggggtggtgtgtgcacatgagtgagcatgacaggtgggggtggtaggagcaggtgtgtgcacgagcttccatgggtgctggccagaggtgtgtctaagcttggtggtggcattgcaggaattgtggccttgactttgaactttctgagggcaggcctgggtgtgtcctcacacagggagagcagaagtgtcctattccatctagttctctgctttagaaaacgatatattcattttttcagataataaaatgatacgtgttcattatataaaatttggaaaatatagaaaaataatgaaaaaatagggcttacctccatccaaacacacaatttgaatgcactgcacccaacatttcattgtcattctttcctcttctttttaggtttctctttctgtctctgattctgtctctgacttcatttctacctttaaaataaaattaaggcctttgttcactagttgttgttgtttttttattaaggcagttcttggtgttatgattatgattaggggaagaaaaacagtgttcaggaacacacagagagcctgccaccccctgtccatttcctatagagggtcttgaagctccaaatagaggctgtgcccccagaaatcgcacctttgaggcactgagatgcccccagagccagctgggtatggcaagggcggctcttgcttagcattccgagagagcactcctaggtagaggggctcctcttcaagtcctcagagaaggagaatttcgggaggtgggaatatgtgagtgttgaagaattagagaaataacttttaggaagttccgactctggtcacaaagagacaagggatgagggggtgtccagaagatctcaaatgagtgatgtcaaagtgaggagatgtttcattaacaaggagaccaaactcttggagtctcctggccctgcaagttcaccataggctaagcaaccagggaagcttctccgggaaggcggcctctgaggcgggtgggtgaacaggggaggacagggaggctttcctggcaggcaaaagggctcgggcaaaggcttggaagtgggactctgtgtgtatgttttatgtggcaaaggggtacgtgtgtgtatgtatgagtgtatgtggtagaggtggtgtgtgtgtgtgtggtagaggtggtgtgtgtgtatgtggggtagaggtgatgtgtgtggcagaggtggtgtgtgtgtggcagaggtggggtgtgtgtgtggtagaggtggggtgtgtgcgtgtgtggtagaggtggggtgtgtgtgtggtagaggtggtgtgtgtgtatgtggggtagaggtggtgtgtgtggtagaggtggtgtgtgtgtggtagaggtggggtatatgtgtgtgtgtggtagaggtggggtataagtgtgtgtggtagagatggggtgtgtgtgtgtggtagaggtggggtgtgtgtggtagaggtgtgtttgtggtagaggtgtgtgtgtgtggtagaggtgtgtgtgtggtagaggtggtgtgtgtgtttggtagaggtgtttgtgtggtagaggtgaggtatatgtgtgtgtggtagagatggggtgtgtgtgtgtggtagagatggtgtgtgtgtgtgtgtgtggtagagatggggtgtgtgtgtggtagagatggggtgtgtgtgtggtagaggtggggtgtgtgtgtggtagaggtggcgtgtgtggtagaggtggtgtgtgtgtgtgtgtgtggtagaggtggggtataagtgtgtgtggtagagatgggatgtgtgtgtgtggtagaggtggggtgtgtgtgtggtagaggtggcgtgtgtggtagaggtgtgtgtgtgtggtagaggtgtgtgtgtggtagaggtggtgtgtgtgtgtgtggtagagatggggtgtgtgtgtggtagaggggtgtgtgtgtggtagaggtggcatgtgtggtagaggtggtgtgtgtgtgtgtggtagaggtggtgtgtgtgtggtagaggtggggtgtgtgtggtagaggtggggttgtgtgtgtgtggtagaggtgtgtgtgtggtagaggtgatgtgtgtgtttggtagaggtgtgtgtgtggtagaggtggggtgtgtgtgtgtggtagaggtggagtgtgtgtttgtgtggggtagagttgtgtgtgtgtggtagaggtggtgggtgtggtagaggtggtgtgtgtgttacaggaggtggtgtgtgtggcagaggaggtgtgtgtgtggtagagggatgtgagtgtgtgtgcgtggtagagatggtgtgtgtggcagaggtgggtgtgtatgtggagtagaggtggtgggtgtgtgtccgtgtgagtgtgttttttgtgtgtgtggtgagcgtggggtgccagcaggagacaggcctggcctgctagtgtgcaggaggcctcgggagactgtttcctcactctgtcgggtgggtgctggggctggccggctctgggactcccaggctcccaggctcccaggcgctggggctggggctaattttgagcctgctgctccagttatagtctctgggatgccgtgaaggtgggaacgtgctcccagaaccggagtggcaaattatgcccgagtcccaaaggggaacgtgtaatttctgaagctggaccagatctttggagcactatgtttagctttattttgctctggtgaactgccggtttccctctcacctttctaaaaaagaactgcattaaaaataacagtaaggcttctgtggggttcaggatgcaaatgggaggggcagagctgctgcctggcgaggcccgtctctggccagctaggggtggcacgtggagttcacccagtctattccaggggtcacacgacatgtggccagcaccccagggccatccagcagccctggctaggtgcccaaggctgattctgccctcctgcgtatgcttctggctctgaacagccctgaggggcccctcagtgatgtgtcttttcacagagcagggagggatccgagtccccaaacgtccctcctgggcccagcagggcttcaccttccgtgggtttctttgggcatcgggggagtgtcttccaggatcttcctgttgaggaaggcagggcagcctggggtttcgccccttggagtcctcccagagccccctgctcaaggcttagaggttgaggggccagccccggcagctctgggtcctagctggctgcttcccagcacctaccctcctgacccgtttgctctttctcgaacgggctgtgcttctttcttcccctctacctttgcgcttgcgattccctctgcctagcatgcgtcttctcaccttgcccacctgctagcctggtactcattcacccagagccccatccccttatcctagagtatcgtagtggtctctgaacaagtcttcctgccttcagccctgagccctgaggccctcctcaggctgcagcccaaggattcacagtacagggagattgattcacagtactgggagattgtaggcaaggagctgatgctcagaaaaggatgcagaaagtgatttgtagcatggagtggaggtgggactataagactcctaaagtccccactgatgtcaggttttggggaagacatatgatgccctggttcttgtcctggaggagggaagactgagtaacctgctgtagctttgggaaccatgccctgcagtgttggtgtggctcagaggttaggatgctggggttggagtgtccctgaaataggcagattttggagagggagggaggacatatgagagagtgggcaagagtcaggcattggctgagccccttccacgtgccttgccttgtgctgggcgtgcacagccttcgtctcattcatactcactgtcgccctgtgaggtgggctttgggcccattctccagataggacgctgacccagagaggtcaaggggcttgctcaaagtcacacatctggtgaggtgttggagccaggcttgtccaactccaaagcacatgttctccctggaggaagagcagagggtgcctggtcagagagcgctacctcttggagactgtccagccttccctaaagtgggttctctaatcctgttgctaaccagcatgtttcatttgtagcttgcagacggtctgtcgagcttggcccccactaacacggcttctcctccatccagtcctcatgtatgtactgtttacttatttgtgggctccttgtattcccttgtggggctgggggtaggggggttaggagggaaatgggaggggagagtgggagggaagaaaggaggtatttcctgagccctagcagggaagtcacctatctttgcctcactgaaaaggaggggtgagagaaagctatggagtagatgctcagaaatggacacccctaggttacttcctgggatttaccttatttacctgtgtgagggctgggggcttaggtggggctgcatgggccagtggaagcggggaaatctctcaattagactctgacttctggagtgtgggaccccagaaggctcttctgggcgtgggacctcagacggcaggctgactttctgtgctcctccctgatgtgtgaaggatgtgtgtgactgaggaaccctggctggcccctcgggtgctaagaggtctgctggggccaacagtctgctcctgcagtttccagcagggctcctttctgcttgcctgagtggattccttaggtgtcatctttctgggctgtgggtccctctaggaagatgactttgatgtctggccttcagcatgcgctcctgaagtcccatggtgagggccagtgggagcccctgacctgtggagggtggcgtaagagacagaacttgctaaaggcagcgagttacattctacttatggtgtcaagaggaggcactgttgtactgggggtctcatgagcttctagaaggaggctatcgatatacatatttttttctgatttatctattttaaataaaatatggaaaacacaaaaagtgtcaagtaggaagttaaaaccacttttattcctaccagtttatgataggcactgttagggttttgatgtgcctagattttttagatatcttttaaactcacatgaatactttttaaaaacaaaattggaatcatacttttttataatttggattttttaaatttaaaagtatatatgaatatttttccatatttgtatgtgtgtatatataatatatgtataatatgtatgttatgtatattatatatatattttttgagatggagtctcactttgtcgcccaggctagagtgcagtggcatgatcttggctcactgcaacctccatctgctgggctcaagcaattctcctgcctcagcctcctgagtagctgggactacaggtgcgcaacaccacacgtggctaattttttgtatttttagtagagacggggtttcaccatgttggccagtctggtctcggactcctgatctcatgatctgcccgcctcggcctcccaaagtgctgggattacaggcgtgagccaccacacccagcctattcttatattctttaaagatatgactgcatgtcacatgaacattcgtaaacttttaactactccctatcatttgccatttaatttgtttatttctcctattgtcttcttttgtcccttaaaggacttattttagttcactttatatatgtccattcagatgatttctttgttttttttttttttttgttacgcccaggtacatctgttcaggccatttcttgttaaagtgtattcctaggcattttatggtctttggtgctgttctaaatggaatatatgttttcctcatgactttgtcgaactatcgctagaatataggaaaacaatatttttgtatatttactttggaactgactctttattaaggcccatttattagttctgactattgttaattgattctgtttggttttccaagtaggtaagattgttttcttcaaataatgataaacgtgttagtttctttctaatagtaatgcctcattcctttttccaaataccatttgatatttgagatgctgctgagcagacttatttagtcattcattctaatgagactgcctctaccagatttccattaattgggatgatgattgatggtttcagacagatatttgattttggcaaggttgtgtcctttattgtttgtttgtttatttttttattgtttttgagatggagtcttgctccgttgcccaggctggagtgcagtggtgttgtcttggctcactgcaacctctgcctcctgggttcaagcaattctcttgcctcagcctcctgagtagctgggattacaggtgcccaccaccgcactctgttaatttttgtatttttgtagagacagggtttcaccatcttggccaggctgatcttgaactcctgacctcaaatgatccaccctccttggcttcccaaagtgttgggattacaggtgtgagccaccgcacctagctgattgttagtttattaatagcttaaaaattagtcatggaagtttaattctatcaaatgtcatttggcatttattaagatgataattttattttccattgtctgttaatatagtgtataattgtgctatattcctggggtaaacccaaatcggtcaattggtcatggtattatagtttactacagttgcagccttcttatccaatgcaatcgagacaggtagtcgattggctaattgataaagttgattaaatagggacttatttttttttttaattgtactttaggttttagggtacatgtgcacattgtgcaggttagttacatatgtatacatgtgccatgctggtgcgctgcacccactaactcgtcatctagcattaggtatatctcccaatgctgtccctcccccctccccccaccccacaacagtccccagagtgtgatattccccttcctgtgtccacgtgatctcattgttcaattcccacctatgagcgagaatatgcggtgtttggttttttgttcttgcgatagtttactgattaaaagtcctgcaaatgtaccacaaacattttgtttttaaccatgtccatgtaactttatttgccaatcatttgacatgtgccacaccctctttttgaatttggatgtgctgacttgtgtgtcatgtcatccttttggtataaatcatatccaaaatgcattatccaggatttttagttttaggtttattaaaatttgatgagaacttaacgatacttgcaaaaaaaaaatctgagtgtagagtcctcttaaagtttaagatgcccttccaccttttatgttatctcacttgtacttgatattcatcacttaaaaaaaaaatcaaaagcaagccaggtgtggtggctcttgcctgtaatccagcactttgggaggtcgaggtaggcaaattgcttgagcacaggagttgagatcagcctgggcagcatagtgaaaccctgtctctacagaaaatacaaaaattagccaggtgtggtggcacatgcctgtagtcccagctattcaggaggctgaggtgggaagattgcttgagccccagaggacgaggttgcggtgagccgtgatagcatcactgcactctatcctgggtgacaaagtgagaccttgttgcaacaaacaacctcaccaaaacacaaaagccttaaattagttttcatagatacaatgcccttcctttttatattcaaattctatgtgtttttaaatatatactttgtttatccaattaccatattagtacaacccagctcatcttctggagctgcagtgggcatcctagaacagctgtggacagtcagtggttctggacctcaggcagattgttggcagacaggacagacagcatttgttaatcctggctaagaagttttaaggagagcttctattatgtattattgagttaggtttgctactacttaggatttttacgtctctattaataagtatgactttcgagttgtctttgttacactttgatatcggggttatactagtcccttaaaaggcttttcaggtgtacttctactttctgtgctcttaaacaggctctgtggcatgataattattgttgctgaaaggccctaaaatacaccagagccactgtttatgaacttaaattatgcaatttggaaattatatgatacaaatatttcaatagtttggctttatgtacaaaatgtgtaatagtaggaaacctaaatttaaaaaaaatgaccgacaatcatgtaatttaaaaggtggtgaaattgtatctatggtttcctaacatgggatagccatcattttttctctaaaatggtgttatatgttttgaattatagaagattttcaggaacgcatatcttatataattgtataagatgcaactgtcttgtatgcattcgtaaaactgggctcaacacattttctggaggggattctttgatcattttgtacttcttcaatcaatttggtagctgagatgtcatcagatactgcctgttaacactggtataaatttgtacatattactataatgaaagctttgtatctattctgttttcatcttcattcttaattttatgtatttatgttattttccttttttattaggcttcatatcgtttcatctattttatagttgttttccatccaaagaaccagctctttaaaaattctgctgatattataatagattagtttctttaatttctacattcaagtcatttttaagctctctcaatctgaaattcctattatatgtattctagatatcttgggttatcactttatctctttctctctctcttgtttagaaaagactgttaaagggagctatttgtctatattttcttctaaaaattctgaagttttgcttttcacacttcagtatttatttcacctggaattgattttgcgtgcgtgttaattgtgaggtagagtttttttctcatgtaactaaccaatgaattaatatcatcatagaatgatctgtgctttctcattgatccacagtgacagctgtgtcatttgttgggtttccatataagtgtgggctatttgtgggctctctattctgttccattggtctgtttgtctttccctgggctattttagtatcttatttactatagctttctaataggtcttgatctctgataaggaagtactttgttcattttcagaagtatcattgctattctagtcctttgcttttccacttcagttttagaatcagcttgtcaacttaaaaaaaagttgagatttgtgacagagttatagtgaattgctggatcagtttggggaaagcagacatttttattatattgccttttaaccatgaacataatatatctttccatttatttaggccttctttaatggtaatttaatgcatttttataattttatccaaaaatgtctagtacaacttttattatatttagttctagcaattttatgcattattgttctctttacttgaatttttaaaggtacattttctgactggtttttgcttgtatataaatgaaatcgattctcatatacagattttatatccagaaactttgctaaactctcttatgaattatactggcttgagaattctcctggattttctatagagtcaatcatataatttgtgattaattacaattttaattcttctgtctatatttcttttacttttttattttattttcttgtcttattgccattgactagaaccttcagctgatgttctatgtacttggttatagagagtattcttttctgctcctaattttaaaatgaatgtttttatgttttaccactgatcatcaaatttatcaggtgaacctagttacctgttagaatcttactagttagctgttttttttcatgaatgttgttaaattttattgaatgtttttaaagtatccatcgaagtgatcatataattttgctcctttaacctgttaatgtagtgaattacattaatatataatacataattatataatatatttacatatgttaattaataacccaagttatctaaaatatatataacaggaatttcagcttcagagagcttaattacagtaataaatatatctatattagtacttaaacaactttgcatttctgaaacaatctaagctgatcatgatatattatcttttttctgcattgctgggctcagtttgcaaacagtaagtttaggactttttttgcatcattttttgggatgatattggcttaaagtgtttctttttcatactattattttcaggtttataaaatgacttctgttgtgtaagccgtaagattggcattatccgttgcctaaatgtttggtagattcactcataaaactgtctagacttagtattctttttgggaatattttaaattgctgttgcagcttttaaaaatgtttataggacctttgagattttctgtttctaagtgagtgacttttggtgatttaaattttctaggaattatctatttcttcctaaaaatattggtgtaatattttttatgatctcttaatttttcaaaaagaatttcttctccatctagttatgcctcctttcattctcaagattatattttattattcttgccagaatttatcagatttttttcagtctattcaaagaatttttagttgatcttctctattatttccttattttataatttattaacttcttttcttctattttattccttccattttatttcttttcttccattttgggggagtttattatattttaacctctatgtaaacatttaaggctctaaaattccctctcactactgctttatgcatcctgtaggttctgacaagtaatatttttgttatttcccattctgagtattttcggatttttattatttctttttgacacctaaattgtctaaaaatatggtttttggaagttactaacttatattttaaattatcttttgttattgatttctaggttaactggaatggtctctatggtccagagagtgtagtctgtgtgtaacgatataatacttagaaatggcctgacacttgctttatggtctagtttaaatctgtaactgtcctgtgtgtgcttgaaaagaatgtgtattgtccagatgtcttaaatattcaatgtgcatttagaacaggcttgttaattgttattaaaatctgtactcctgatttttgtgtgtgtgtggtttatcaatttctgagcgagacatgaaaatattctgctttgatgtgacatttgtcaatttctccttataattccacctacttttatatatttgatgctctctatattttttctctctctatagagaattcttatatcttcctggagaattgaatcttttaacaatatgtagcaagcctctgcccatttctgtcttttaaaatctctgctaatgagtttttcttaaagtctgttttgttcatgttaatatagctaccccagctttcttttggttagtattttccttgtatagctttttccaccttgttactttcaacttttctgtctttaagttttagctatctctcctgtgaacagcaaatagatagattctatttgtgtttaatgcattctgacaatctttactaatatatttgaatttgtttctgccatcttattttgtatctctatcagccttttttcaattaaaatattcccctccttttttccatcccttctcttctttttagtttcaaaactatatatgtttctatttctttagtgattagtatagaaattttaacatggcatatttaacttagcaaagtctaaatttaattggtatttatatcttcctccagaatattacaaggaacttagactgctttaactccaatcacctatcaatttgcaaacttttgtacaatattttagttttatcttttttacctacctttttaaagcattattttattttaagtaatcatttttttcttttagctatattcacatttacttttttttttaatatccgtcatctttttcctgaagtagggcctattgaaattcctataattgaggtcagttcattataaactttctcactttttaactgtttgaaaatatttttttcacccttatcttggaaataatagtttcactaacagttattttctgtcagcactcttttctggcttccattgtgctattgttttcacaaatctgaggacttaaaaaaattttattttaaagttaagtttagttttggctgggtgcagtggctcatgcctgtaatcccagcactttgggaggctggggcaggcagatcattgagctcaggagttcgagaccaacctgggcaatggtagcaaaaccccgtctctacaaaaaatacaaaaaattagctaggtgtggtggtgcatacctgtagtcccagctactcaagaaactgaggtgggaggatcgcttgagcccaggaggttaagggtgcagtgagccatgattgtgccactgcactctagcctggcccacagagtgagaccctgttgcaaaaaaaaaaaaatttaaaaagtaaaattagtttaatttaatttttaaaagatgttatttttattcattctgagcaattctcaaccattatctcttcaaatgttacagattccattctctcatcatttctggaactctggatatacaatggacctcttctattcttcatgtctgtcaaattttctttcatattgtttatttctttggattgcactctggctaatttctgaagatgtatcttcttgttcacttgatctttagcagtttctaatctgctattttaccctatctattgagttttcagtcttaagtactatatttttatttctaaaagttttattcccccaatctgcttgtttatttttgaaggtctcctgtccctttggcatatttttaatgccttttatttatttaaacagtttttccttaaagccctatttctgactactctgacttctgttgtctgattctgcaattggttggctctagctggctcttgctcatggtgcctagttccttatgtgtttgattgtgaactcatgttccttggaactttatctgagaattctttggggcctgggtggaagttacattcttttagagaggatatgtgtttacttttaccagatgtctggagacactataaacacagattaacttaaaactaaatgttcagtgtgtggctttttgggtccactagttagtatgcattttggctccttatttctctggatttttcctttctcatttgcccttaagaattttctttacattcccatcagctcagccatgcatttaaaatggattttagaaatatcttttctgttaatttaggtgttcttacttggagggtttctctggttgtctaatttgtcattttgctggaaatcaatgtctttattagaggtttaaatttgaagtcatggttttcatcatgcaggtttatctccttcagggttgtgtactctaatttcttgtttgcagtttcctcttaagacttcctatgaatacacatgagccatttgttttcttctgctttttactcaactctttaagagcattgggagacatttgtctttgtcttcagatcgctcttcttcttttgcccttaatatcttcttttttttccttgtgtttatccttacagagggaagtccttgcttgtcaaatactgggagctcagttagattctttccataaattcatgggcccttctaatctcaaactcagacaaaaagaagaaggaaatagtttagatttgcagtagtttcactttgctggttagaaatccagcagggtgggagaagtaagaaggaaaccaggatcagaggcagctatgtggggctattcttctgggctgaagagtttatttcctatgtttgttatggtagtcaggggttagctagggtaggccagagggccagagctgctgcgcctaccaatgaactcctatgtaggaatttcttaagtaaagtagagttgaccctctcccactaggcccaccaggcagggtgttactttagggaagtttctacagttttggctgagtgaatccttaaccttgtgggttcagacacctgttgggtcaattttctcacggctagatgtgtaaacttacatgagaaatatagctccctggggcatgtgaccttggtggctggtccagcccatagtctcctataggctcagtgagtgggaagccaaattgtgattaagagtgagaaatcagaatgaggagagagagttctgtaatttgaactttagtgccagctgacttggcactgacacatccatctccaaaggtaggggcagctttagtccctaagcctaggtctgctctcccctgatggtgctggtgtggacacctgtcagtgtttactccttactcctgtttgcctgttcttcaggcctgattagtacctttcttcatggatatgctctttctctggattaatacattcttcctaattatggttaagtcttagtgtaggaggcattcttccctgttgaggtgactttgcctctccttgctctcaccgactatgaagttatttcatggtctaattctctaagggcagccctatttcccttaattccaggttggggggatgtgggatgccttattgcagctcatgagtactgacaacaatttattccaagactttgaagcaaaggttttctgagcaaaggaatcaattacagggtgtggctcccaagtgaggaagcattttcagaaggcatccaaggcagtttgtctctgaacttcatggttgcacctctgagcttgagacttagagggggagtattttaactttaataacattcatggttttacctgtacttttgtacatatcagatgtgctaattaggaagtcacttatcttttccttaaagtaggtttcctaaggacatgtatttggcaatattggtttagcaagaattactgtatgtgcttgaaagtaactgtacttctttaaaaatatcacccgttcagaagtgttgccagtgaagcctggcctccccccactcctattagttctgattagggaggtttgatgcccgtcactggtgtaatctggaccttcctttgtgactcattctttctctcattttctcagagcaaatacaaatcgcccatcaaatgacaagtgaaagcacagggggaggcgaggggagggaatcagggccgaaatctgttagctatttggagtaattggttatttgctgtgtttgctggttgggaagcagagcacatacttcacggtctctcctgttacgggggctggagtcaccctccgatattggatcctcgttgccggagcccttggctcggggcgccttttccctgcttggcattcctgtggtctcctcgggagtgcacccctcctccctcgctgcacactgcaggggggacagcctggggtgaaacttgtctggcaaacttcagggctccatcagggaggaggaggccctggcttccaccatccggcgctccttgcctccacctcatcctgacataacccctccaccaccccctgccccaagaggtctttcccctggtctgagagggatctcttttcccatctagagaaaaaacactcatctcttcctagagggatattcttggcttcccttggaaatctacagcataggcaactgtctctgaggtctaacttgatgtcttcctatctctattggtcctatgcactggctactccctagcctgggtcaaaatagtgcttggaagttggtacagcgctagctgctgagcacaagactcccctgagtgtgcttggtgaagcttattaacccaccttttgtctttaactcttctctacattaaccaaggcacagggaaatcagagcaaattagcaacaagttcaaaatataaaatatttgaaaagtaatgtgattttgtatatgaaaatgcatacagtaactagaaagtaggttgactttggcacatagtaggttccccccaaatcctcttaaaattgaatttaggagagctaatattagtgtctgtagcttgatgaatgcttctgcagtcttgggaaggccttcaaaaatagtttttctcttaagtagttgtaactcttgttaagcaaaattgtctacataagcagaaggaagataaggtatgctgcccaggccctattggaattgtcacagattctgaattagtcatgttttgttgctttcttcatatgtttgaagagtctgatggaagcttctttcattcacctactggctaggttccattcctctaggctttctgcatagttgtgtgggatcatggtgccctcagagaatccagtcatgggcccccaaggatctatcttagactcctgaattgagaaagcaccagcaacctcgggttccccacagctccccgactctctgtgagtcccccatctggtggagcaggccaatagtcaagtgatcaggtccccttgccatctgtttgactttactggatgtcaggcccatgtagtctctgggcctttggaagcaattcagcattttggttaaaggtctttacttctttcccacctctgctgatccagaaatcagagtaggtggagtaatgatcccctccacagatgaggaggctggactgcagggagtgtcaacaagaggttgaaagcccagtgttccacttgtagaaataattaagtgacttttgttataagtgtgtggagttctgctgaatcaacgtggtggctggctgtgggcatatgtctttgtggctttggggggcataagtgatttggtatacacagggtggagtagttttgaagtcggagtatttgcatgtctggggttttgtctggtctacatgtaggcatgagtaattttatgttatttatgtgtttattcatgtgtgcatgagtaaatagtccatttcctaaatctcaggacatgaaagaattagaggaacctttgtaccgtgattccagtactacagatgtagagctatggggtagcagtactggagatcaaactgatgacactggcaatatcaacaagaacattaatcatggtaaactttacaggttacagcatatctttgtagatatctactctgagccttacagtaaccccagtgttgggttgttatgttactatcttgatgatgatgatttgtactaagagggaaattactttcagcacagtctaggatgtctatctctgggttgacataggcatgaagggctacttaaaattataaacaataatagaccacatttttttttaagagttgggcatatagttctgcatagtgacccaaggtttaacgttataaccttggtgacaaatggatttgaccagaaatttttctctttgatccaactggtcatcctggggagagaaaacaagttctgtacctgccccctgtctcctgcttcctgacttcacagaaaggaattattattgccagtttttccacccgtattcatgaaatgtgttaggtctactgaatgatgatgggagattaaatatttggaacgtatcatactgatttgggtcttcagggggattaaggtgctcattagactggatcaagcctggagaaatagatctccgctattttctctggctgcccaggaactgcatattggctattagctgaaactggagaggcttccagtccatgccttggtcggacttactgggttggctgactgcacaatgaggggccttgaaccttgagcatgggggagtggtgttttaatggccagacttcttgttaaagcctaaggtgacacttcaaatatcaaaccttttgtgtttctttttcctccttgccatgttccaaaactggatgcttagctattgcaaaatgaggtaaaaaacacatttggaatgagaaaacataccaccatttcccttttggagctttggaatatgggattccattaacatcagagggttagttggctttggcacctctgagttcagacatggaatagctgtcctgttttttgtggggctctttcttatggctgtgctaacttattcctggacttcccggggaagagaagggagaagtgggcttgaaataactccatcagaagccagatgagtgaaatagcagaaatgacattttcaagtcacatctgtgagtgtgttaaaaatataactttatttttctgtaaatcaacttaatctctcctgtgagcccacatttttcctgatggcagaaaaaccccggtaatcatcaacattttaggtttaaacttaggcagtctgggctttctatcttcctccttaaccctgggaggcagctcagttctgggttgggcttccataatgtcatgacctccacagggaggaagtcctggtcaccagtatgtgtctactctgacatttagagacccactgatttctgggcacacaggccatactgcatcttctcatttcagcccccaaatccttctagttttcctggctctttctctctccactaactttcaagccctacagggagtggggcaccattaagcagctctcccatgacactctggggtctgtgggaaattccaagggcttaggctctgtctcccatgacacccatgcagccatctccaatcaactgccccacagccaattcctctggcaacttccgggtggctgctgctgcctggacccccaaagttatagaggggtctgttccgtgtacactttggagctgacctggaggcagggtgtgcggtgccttatcagaaaccatcacaagtctctagttctcgcttcctttctccttctacactttcatttctttcgcctatgatggggaaaaactggctggacaaaacattcttttaaacctattattttaatggcacatgatcagcctttgtaaacttaaaagccaaggatcaccccctctttccccacattctgctgtttaggcattcctgtatccatcaaatattgacagaactgcaattatgtctttcaggcaatgttctaagcattgaggttatgagtgttacaaaagataaagggggctgggtgcggtggctcacgcctgcaatcccagcactttgggaggcagaggcgggtggatcatgtgaggccaggagtttgaaaccagcctggccaacatggtgaaaccccatctctactaaaaataacaaaaattagctgggcgtggtggcacacacctgtaatcccagctacttgggaggctgaggcaggagaattgcttgaacctgggaggcagagcttgcagtgagccgagatagtgccactgcactccagcctgggcgacagagcaagactctgtctcaaaaaaaaaaaaaaaaagaaagaaaaaagaaaaagaaaaaagatgaagggctctgccttcatggagaaggagatacaataaacaatattaatacccacgtaaaatctatgggatatcagatggagataatcactgtggagaaaaagcaacaaagagggaataggaattcttgagacgggattgtgatttacaatatgggaaataatgagggtgagactgaggctgcactggaatcaagacaagaaggaaatgaggaagtggcttagggatctatcagggggaatagtgttcctgccaggggaaggacatgagggtgctggaagtgttcaggaccaggaaggcttgttggctgcagcagcatgagtgaggaagaaagttgaaggacgtgaggtcagggaggtgtgagggctcgatcacaagcgactttagaagttattacaagggctttagttttattctgagtgagctgacaaatcactggagggatttgcacagagggtgacaagatccgatgtacatggctgttgggttgagcacggattcagggagcaggacggcaaaggtgaaggtggggaggccagttaggaaactgctgcagtcatcccacatgggatgatggggctggactggggcggtagtgacagagtggtctggttctgagtatacactggaggtagtgccagcatgagtgactgatggattaagtgcaggtcgtgaggaacaggagtcaaaggtgagtgcagggattttggcttgagcatctggaaggagagagttgccatttgttcatatgaggaaggatgtgggaggagcagactgggcagggatgttcagagataggaatctggacttagctttgcaaagcctatcagatgtccagtgggagatgtcacatgggcagctggagtccagggaaggcacccaggctggacagagctcaaggtgggactcatcaatgtatgtgctatttaaagagctaagacccagggagaacccaagggagtgagagtggatagagaggatgggctcaagcactgagccctgaggcactcagatggccaaagcatgggtgacaagaaggaggcagcaaagaagactgagcaggtgtggccgctgaggtgggaggacagcactgtggtgctctggacagtggagctctgcaaggcgaggggagatgcttcagggacagaggagtgaccacttctgccaaatactgctcctggattgattattgaggcctgagtcattggtgaccttgacaagaatgttttgagggaggacagagaatggaaacataaaaattagagacaataagtgtggacaactctttctagaagtttttctataaaggggcgaaggtaatgaggtggaagcccaaagggaacgtgtgggcagagagagagacgtattctgtgaatagtggggcactggtgcctatgtgtgaaggctaactggaatgacccagaggggagggatgttggtgacacaggagagggtggggagagtcacggagtgatggccttgaatggaccagagaggatgagccccaggcatgagggcagaggttggccttgggctggggtgcaagccgagcacccacaggagcagaagggaaggtagcacgtggcatgggtgctggtgggggcttggggaagtctcttctggttgcttctgcttttaggagaaaggaagcagggacatgggctgagcatgaggccagggaggaggtgctagagggctggggagagggccagtgtggcaggtggtatcaggagaaggggcgagtaaagggccagggaagtgagatgaggtgccgggcggcactggggctccttgaagctgtgccaggaacttggtgtgagacccagcagctggtttcatggtttccttcagccacatttggttgtggggggctgatgtgaagtggagaagagctggatttaaccccaggtggcactggccagaagtacaatggaacaagagaggtggaaggagtttaggagaaggaaagggcaagggggtaaacaaagcattgtaggaccaagaaaatattagttaatatgtaaatcatgattctgccacatgcctaattgctgttaaaggtgcaggccattgattagaagagggtttacctgtgggatgcaggacgaaaatgggggcaaaagtcactgagcagccggccagctggtgtggccgggaggaaggtcataggccattcgtctcagcagctgtgagtctgctggggaacagcagctgccagacatcacctggaactttgaaggaagagggaattgcagccaagaggggaacttggggaaaacagtgtggtaagatttaggtcctgttggtggtaaatagcttgttctattaaaaaaaaaaaattgaactcttatttccttagaaagaaacacttgagattcctgcttttattcttttgtttgatgttatatggttgtatttgatcatttgttctttttaattttagcaactttattgagataatccatgtgaatacaggttcttatttaaagtgtacagtttaatggtttgtagtatattaacagagttgtgcaaccatgaccggaatccattttagaatatcctcatcactgcaaaaaaaaaaaaaaaaaagtactgaagagcatttattcctcacaataactgtcaaatttatgctattatttttccatgacagattagataaatggagtcctaaagaggttaagtagtgagcagtctctcccaaccactcccagcccctggcaaccactaaatattttttgtttctatatatttgcctattctggagcttcatataaatgaaatcctacaatatgtggtctattgtgattaaattctttcacttagcataaggttttctaggttcatctatgtcataacatgtatcagttcttcattccctttttattaccaaataatgtgccagtgtaaggatatatcacattttctttatccacgcatcagttgattcatatctgagtctttccaccctttagctgttatgaataatgctgctttgaacattcatgtacaagtttttgtgtagacataagttttcatttctcttggatatatacctaggaatggaattgctaggccatatggcaactctaacgtttaatgttttgaggaactgccaaactgtttttcaaagtgctgcaacattttacatcctcaccagcagtgtacaagggttccaatttctctatgtcttcaccaacacttattatctgactttatgatgatagccattctagcaggtgtgaagtggtttctcattgaggtattgatttgcatttctgtgatgtctaatgatgtggagcatctttccatgtgctattggccatttgtatatcttctctggggaatgtcaacttaaatacactgcccatttttaaattggatgatttgtctttttatcattgagttgtgagttctctatatattctggatacaaatcccttatcaaatatatgatttgcaaatattttctcccattctgtgagttgtcttttcactttattggtagtgtattttgaagcatcttgctgttgttctttatttaaaaatttttaatttttaaagctatgcaaggaatacttgcatacaatgaaaaattagaaatttttgagttatacacaaaaaggaataaaacatgtacaattttaccattcagagtgccactatgaacttctggggtttagtccttttgttaaaatgagatcacattattttttaaccctttataaatctcatcagttgtgagtaacttttcatgtcagtaaatatatttttccagcatcactttttaggttgtgtaatgtttaatcatatggaggtaccgttcagttccaagcagttcaggtccaaacagttccttattgttggacacttaagttgcttccaatttttcacttttaaatgaagtaaaatctttatgcatgtccatgattgctttctttggatagaattctggaataagattgctgtgtcaaagtgcatgttcttttaggctatggaaacgtgcagccagtttgccttctggaatgattgtggccatccgtgccccaccagcagtttgtaggagattagctcttggccaagaagctaaccaggtctatgcaacaacagcaatattactattatcagtaagagcaataaacacttacgttgcatttatgtgtaggcacagttctgagcactctctctatattgactcattgattcctcacaataactgtcaaactgatactattatttttccattacagataattgagtccaagagaggttaagtagtgacccaatgtcacaccactgagcgtggcaggatttgaacactggcagtctagcttctgggtcctggctctcacccaccctgctttactgcttctttatgtctatatcacatgaaaattattggcagaggcacctatatgtgcaagagcccagaagggagaaagcctgatactgtcaaacacaatgctgactattgctttaaaatattctttataatgctaagaaagcttccttttatttttaatttactgagaggttcatttgagaataaatgaaaaattctaacctcttaaacatccattttttgtttttgttttgcatattataaactaggggctggcaaattttttttaaagggtcagatagtaagtattttaggcttgggggacataaggtctttgttgcaaagactcaactctgcaattgtagctgaaacctgctacaaaatatattgatatttaaattaccaaactaggtggctggccagtaggccatagttttcaaatctctgctgtagatgatcctgtgggtttcctctcctgactcactgatgctgaaccactcttgtattctggaataacccagcttgaccacgccagattgactgctgccatctgttcgttagtgttttatttaggatctttatgtctctcttcaggaatgagattaatccgtgtgtgtgtgtgtgtgtgtgtgtgtgtgttgcttcgtcaagttttgcttcataaaacgaatgtaaaaactttcatctttttctatgctgtggaacaaagaatgatttattctttgcaacactcatagaattttcccccaaagaaatgatcttggcctcctgtctttttttggaagtagttcattgagatcttttccactttcttttaaggttattgatctcttcatgttttctactacttttgaatcaattttggcaatttttattttcctagaaaatcattcacttcatctacattttctaagattctgtcattggtttcagcctcataaacctattgatattttcattgtctgctataatatcttttgatttgatttttctcattcctaatagtatatctacttttaaaaattagatttgataaatgtttatctatttttttttttttttttttgagacggagtctcgctctgtggcccaggtgggagtgcagtggcgcaatctcggctcactgcaagctccgcctcccaggttcacgccattctcctgcctcagcctcccgagtagctgggactacaggcgcccgccaccacgcccggctaatttttttgtatttttagtagagacggggtttcaccgtgttagccaggatggtctcgatctcctgacctcgtgatccacccgcctcggcctcccaaagtgctgggataaatgtttatctattttaatggtcttttgaaatcttgctctggggtttaatcatcaattataatattctcctttctaatatattcatttctatttacaattttctttggtctttctgccctttctaatttcttgaattatcaggtaatttattttcattccttttgtataaaagtgaaaacacttaagataaaattttttttttgaagacaggcttagctacaactcgtacgttttgggacatatatctcctattgttggtatttcctaagtatccgaggttttagttttggttttctctttgacccaggagggctttaagcatatgcctttaaatttccaaaaggttagtattttatttaaaatttctcatttttctagttttattgcagtatggtcagaaaatgtgactgatagtggttttatttctgggactttactgagatttgctctgtggcttttttatttttttctaagtgctccaaagatgctggaaaagaaggtatatcttctgtttttagtgtaaataatgtttgtctatttagttgtcactgttaatggtattattcagactatctgtctctaattcctttggaaatttacttggttattcaggattgagggaagtgtgataccttccccacaattcttgttcctgtcttttctttgtacagaactcactggttggttgtctgtctgtgcctgactctgagcctgagttataaactcaaacctttaagtatttgggctgggaaagaaaaataaagatttaggggaactcaacagctaaattggattccattctaaccatttctacctaagtgtccatgtttgcctgtgtgccagtatgtgcagttgtgtgtttctgtgggggcatatgtgtgttttagcatacacatctcctttggacgtgactgtgtaagtcagttcttctgcgtgtgggtcatcctgtgagtttgatatgtatgtctgtatatgtgtgtcacccatagcatctttttctttaaattgaactttaaacatcaaggcttgggtctgccttgctctaagctggctttttctagagtggttacaagtcagaaagctctgccatgctgtacgctaccccacctgaccttgtttcctctctcctggctgcagaagaccctccgggtaagtgggtctggtagggcctggctgcagattcagcctcactctggtacacgttccctgtgtggtgtgtctggagacacctggccacacaaggtgtgttaggaccacacttccaggacgggtggagactcgagaacctcatcctaccgtctccccaggatgcctgttcaggaacccttggcggggcaccagcttgtgtttgcctttagtaagctggagctcagagcacttggctttagtttgaaggggccaccagcattttcagaaactctgtgataggtgttcagttcctggtggagaattagagcaggctcctgggagatcttctagcctaccttctcatacagaggaggaaagcgagttccagaatgagctcctgaagccgtgtccttggcccttcccactaaaccagataagctctaatggtacagatgggctcagagtgagtgatgggaccttggtgggcttttggggtgaactgaccatcccagcttcagggagcttggtgaccctctaggtgataggacaccccacctgccgagacaggacacagctgaaggaatattctagacaccagagctaagagggcctgcagacacaccatgtacaggaggagttaaatggtggggaggtcaggatttgccacaacaggcctgtccatcttttcctgcaaataggagtgactggaggaaggatgcggatgtcacacagaaaatttgtgctgtcacatacttcctttcttctcacctaatacctcacatttagcagtgtctttggaataaaggcacttagtattagttgattttcagggactctgccttgatttgaccttggggaggttaagtgctgatttccaatgcttcctttattgcctgggtagggaggcagatgggcagaatagataaaactcttttgggtctgaattttcctggatctactgcattttgttcataaataatacattattgacattttcccctaagagctaccctatgtaccctctgattttggtctcagtgtgttgtgtccctgggatgcaggaactacaaagatgcttatgcccacttcacagaaaggaaaagggaggctggggagtttgacagaaacacacatgcttggggggcagagccagggctagagcctccgcctctcaacaccaaccaaatgctgaaacctcttcctcagtctgcagtctttgccccaggagaggcggaggtttcctctctctgctcccccacatcacccttaggaaagccttgtggtccagagcggcctagcagcggagggagggtttccaactctgaaggatgctgcttggcgagtcctgtttctgaaatggtctctttctttctacccactcaggaggaagagttcatcgattggtggagcaaattctttgcctccataggggagagggaaaagtgcggctcctacctggagaaggattttgacaccctgaaggtaaggcctctcttcagtctgacagtcggtgtgtgtgtgcgtgctgggcagtgggagacacaacagaaagagagctcatgcagtagatgtatttgcatttgtctcctcattcggtgtctgagggtgatgaatgctgctagaccagctgggtgagaaagccacccaccgatttacagcccgaagcaagtgtgggctgggataaccaagacagtattcccaggagaatgctgaagaatatggaagtgtttagaggtgaaatgatctgtgttaacgtgccccagccccctaccccttcccaagatcggggtggccccctcaccgattttcaaaatagtcaacattattaatattgcatgacattgaaaacagttaaagcttggagatgggtacgcagggatttgttgtcctatcccatgtctttcagtgttatttgaacttttctatagtagaaaatttgtgttaaaataaaaagagagtcggtttgagaatgtactcctgacccctaactcctacaattgggccagaaaattacctacaaatctgaaaatatgggaaaccctgtttctgtggaaaaaaacagaaatgagtcagccaaattgtggtattttgaggaaattatacaaatataattatgctttgaaaaagtagactacttttaaagaagataatcagaggtgactcagaaattactccttaaaggagttgcatggtctcctggctagggttgccagttaaaattcaggatgcccagtcacatttgaatttcagatgaacaatgaatagttttttaatatcagcatgcatcaaatattgcacggggcatatttctttaaaaattattggttatgaaacaggaaaagttcccttatcccccttgcagggtgtgcagtgggggtgtggctggcttcttcagtgccctgctgctcacacctctaggggaacatgcagatgggcaggttgcggggctccaaccccacagcagtgtccagaggtgaatgtttacagctgaagccccagtggatgtgtgttacagaggactatttcagcttagccatctgtaggcggcttgtgttagctcaattagacccctgccttatcacaagcacagagggctttctgtatcccggggtttcttgccttggtgtactgaaagaattggatcgcacgtgggcttggagattgagtgcaaggttttactgggtggaagtagctctcagcagattggggagccagaagggagatggaatgggaaggtggttttcccctggagtcgcgctgctcagtggcctggactctcctcccaccaccaggaccaaactccacgttgttccgctggtcaatggcctgctggcctgctgaggcctgttggtgtgctcctacgccagtgggtccttctcgacatcccgccgcttgtgtgttcctctgcttgtgtgttcctctcgatgtccagcaacttgtgtttctgcccgctagggtcttgggggtttttataggcacagaatgggggtgtggcaggccaggatggtcttgggaaatgcagcatttgggcaagaaaacagaaatgcctgtcctccctaggcctgtgggcacaggcccgggggatgaagccctcgccagggacaccgtcctcctctacccagcacttacctgaccccgttctgtatcagttatttatttgaaattcagatttaactggaaattgtgtattttcacttactaaatctggcaacactacttctggattataaatgggggagactctgtaccccgcaattacctcccaggcttggagaggagaaaatgagaggtgggcacaggctgttagacacataggaaaggccccaagagccctttggaggggactggatgagagagagttgaagcttgtcagggtagcaggtggcctgggctttcaggtgattcttttggcgcagagtctctgctaggcactctggagggcagtttcaccagtcagcaaaagttgtctctgctctatgggcctgcctggtgaattgtgcctggagacctggctgctcagagatgaggcacaggcagcagcagctgcgatcctcaggcagcaagttcctcctcgacttggtagttgggtgtgtgaggttgggcaaagagacagaactatttgtgtaccaggaagaaggtctgacacattaggtctggcatgtggtcctgtggccttgccaaaaagtcagacaacccaagcaagaatgaggactcctgccagggtggcccatggccctggcccctcgctgctccctcaggtgcggatgctgaattggcacccagccctcctgcttgacctctggaggaggtctctgacagcatccaagtgaaaataggctgtccaaagcaaaatgcattcaaactatttctggggggaaaactagacctggaaggaacgctggttctttaaagataagtaaatggaagaaaaccaccatcaccaacgtgggtctttgaaaaatagcctgccacattatggagagagtggagcacacagtgggtgcaggaaaacagattttagaaatcactagcatagggggacaaaacaactcctaatctaaatagaaaaataaaggaacaaaagacacaacaagaaagcattaaaaacagaaaccacagaaaatgcatagtaaaaaaagaacaaaacatcttaatgttcctaattaataaaaatggactaaacttccccattaagtgacaaggactcttagactatatcaaaagtcaaaattcattgtactgtctttaaaagacacatctaaaacaatacaacttagaatggctaaaaaataaagattttggaaaacaatattttagcaaacaaggtaagtgtaaaccaaaggaaaacagaatttaaagtgaagagcaaaggaaacaaaatagagagttttatataaataaaagatgtatatttcaatgaaaagactctcaaatatttatgcatagaatagtaaagcttagaaatacttaaagcaaaaatggataagaatgtataaactgatatctcacacttgataaaagcacaaaatgacagaaattaaagttgcagtggggatttcattacaccattctccttaactatcaagcagacaacaaatacataagaagataaaagatctgaataacaaggtaaatgttttttaagctacatgaaattaaagttatagctttaaaatagagaataaaaataataaaaaatggagaatacattttttcctgatgctcagcgaatacttacaaaatttgatcacatattagttttgtagtaagttaccaaaagcagaaatcatacaagacagattataatgcaataaaatgagaaattaataacaaaagtttaaacaaaaagttcaaccgcttagaaatttaaaaaatattttattgggacttccagtatgaacatggctgcataagtcagcatttttccccttttctcttggaaatcattcaaacccacaaaatccattttcagaaaagttggaaacaaacagaagccacagacttcaaaatatatgtaagggctgctcaaagacaactgaaattggttagaggccactcagcagtaagtgaagagaagatacatgcagaatgttgaaagatcagagtagtagcagatctcagaaagcctagcaaaaatatactttctaatggaagaatgttgataattatttaggacagataatggttacatgggggtttattatctattctctttacttttgtgtgtgtttgaaaattttcataatagtttcaaaatacagttcctgaaagtgaggtttcaccatgaaatataaatgttacatcctttgtttacaaccgtggatatggaaactttggagacaggttgaagctgatgacagaagcctcttagacctgatttgattcagagaagcagaggtggagctacacaagaattacacaaatgagccatatttgcaggaagcagtctgcctctgtggtgggaacaaaattcagctcatttagtgagaaataattttttaaaacggtgtagcctgaattcaaaaatcctgcaaaaaagaaaagaaaatcaaaatgaaaacttatcagtagaagaggacatatacctacttgaaaaattttgccaaggagcagatgagatgaaatgctttgctatgaactttttagaaatggggcagtcagaatgcaaagcaaaaatgaaagtagtcaagggctgataaaatgagtgataaactatgggctggcaggactcaggaaagaaagagatgaaaacgtgaagttggaaggagcacagggcagaagggccacatggaaaacacaaccaagggcacagaggacagaaactataaaagtaagcaaacgaaaatggaaataatgaaaaagttataaaggaacaaagagaaaatgacagatatagacgtcagggaaaggaaacctaacatttgcataattggagtctccaaggaagacaaccaaaatagtaaaaaaattacagaaaaaaccataatggtttaataaaaccttacggaaatgaaagaatagttgaacatacatattgaaaaagttcatggtgtgtcaggaaaaactgacaaagattggtcaatctgagacatattctaatataattactgtactttagagataaagaaataattctttgggtagtcatacctcctccccacctcttgaaaagaaaaaagcaatattaagtcatttaaaataggaactaaatcaagatggcttccattttttcgtaacagcattccatatccaaagacaataacacactgatataagatcatcaaagaaagacagggtgacctgaggattatatgttcagccaagctcccctccaagcataaaggctacagataaccatttgtacatattcaggaactggagtaatgtgattccaatgagcctgtcttgaaggaactcctaggggattaacttcagctaacctgggaagttatctggagaaaccacaacagaaggactggttgtagttcgaggctgtagtcagctatgattgcaccactgcactctagcctggataatagagcaagactttgtctccaaaaaaaaaaaaaaaaaaaaaagtgaatatggtcatattttaccttagaatcaaaatgaaaacaaatggaagggttaaggtaataggtaagaatgtaaatatcatatatactgaaaatgtagagatggtaaaactgacaaaaattaggtggagaaggacaaaagagtatggaatatagagtaaggacaatgattgacatatgataaaataaatacagtggaaagatattatttgaaattggcaagtcacataataagcatagaagcaagatacaagcaaacagtacaaaggtaaatgttaaggaagatattcttgtctaaaactgggtgatagggagaaggagggagataaaattggattattttattattgctacagtagggaccccataaatactatgcctaaagacatagaggactaagtattatcagaatatataaatgtatataaatactagaacagaagctgagatcattccagctatcagaactgtcacatgcaccactcccatccgccccacacacagaaagtggaccgtgcaaagattaaaaaaaaagaacctatgaaatgaggaaatgtgatataaatacattacatgactatataattaaacaagtaaaaccaagaccaaacatatctgtcttgtcaatacatgttacatcagtcacttactaattacaaaatttaaatcagatctcagagcaaaatctaactctcaaatgaaaagattgataaagtttgaaaataagattaagaaaatgtgtgccaggcaaatgcaaattaaatgacagcagaagtcatcatcttaatattagatgagagggtattcaggttcctaaaattaaatgagacaaaggatgacactttataatgctaaatggtacaattccaagatatgacacttatgagaatatctatgtgctaaatactacaacatcaatacttacaaaacacaacttacaggagatatgagaagcaatggaaacacactggttggtagggggagatttaattcccttctctcagttcatgtcagatcaaggagacaaaaatgtcagaggaggccaagtgtggtggctcaagcctgtaatctcagcactttgggaggccgaagcaggcagatcacttgaagtcaggagttcaagaccagcctggtcaatacagcgaaactctgtctctacaaaaaatacaaaaattagtcaggcgtggtggcgtgcacctgaaattctagctactcaggaggctgagacaggagaatcgcttgaacctgggaggtggacattgcagtgagccaagatggtgccactgcactccagcctgggtgacagagcaagattccatctcaaaaataaataaataaataaaataaaaaataaaaggtcagaggatgtagaaggcttggcatgattagtaacctgatttaacccagtagcctgaaaataaagactacacgtgtggcacttttactacaattgaccatgtaacaggccatgaagaaaactttaataaatttcagaaagtgacaataccaagaaaacattttctgattgtaatgcaataaaattagaaatttgtaacaagatcaaaagcccaaaaggcctcttctacctggaaaattaaaaaaccctctattttaacaattcttgggtgaaggagaaaatactaacagaaagcacagaacatctaggaaacagtgctaaaacactacatattagaacttactggttatagttaaagcagcgttcagaggaaatttgtggccttaagaaattatgttaattacaaaaaagaaaactaattaagtatctaactctgggatcaaataataaagataaaactgtaattacagaatgccgggaaaatgaaaatgaaaacatgtatcaaaacaaatgaggcaatgccaagacattagtgagcagaggcaatttcatatgagtaactattttcattatctggaaaaagggagtaagtaaagcttcaattcaagaagctagaataatgataatgaaaagcccttaaaacagcaggacaaaaaaagagaaaaggaaaaggaaaagcagaaaaaattagaaaagagaaaattatagaattgaattgaaaaaaatcaaataattggcactttgattggaatgaatcaactaaaatagataactcttcagctagtctactttagagaagtagagaaaaccaagccaaaatccgcaatgaaaacagggacataacagcagagataattgggagttaggaattttagaaaaattctaagtatatttctatgttaatagatttgaaaatgtccttaaaatgagataatgtgaaggaaaagagaaacagaactgtctcaagaagcagcaaaaaatatgaaagaaacaggaaaattatcaaagaattactttcaaagagagagctggagccagggaattataaagtgaatttcctaaattttcaaagaataaataattcctgtgctatatgtagtatttcacagcagagaaaatattaaaatgtagaaaacctcgatttttatagagctagaattaccttaccatcaaaatctgataaagttcagccatatgtataaatatcatctatgacatgaatatatatgaaaaatcttagagaaataatagcaaatgaaacctaactaatattaaaataatgtcatgataaccgaatttgcttcattccaggaatataaaaagttcaacattaggaaatcatgaacagtattcatcatatcagtaggtaacattaacaaagattatttcagttggtgctgaaaagcattcaataaagtttaatatctattgatgatttataagatcaagtaacatattggaaataggagtttccttaatgttaaaaagaacatctctcaagctaacagccaacatccaacttcatgacttcagaaggtttctttactgtagaaaatgaacttgtatttctcaagaatgttcctaagtgcatttgtctggggagagagtccatggcttattgactgtagattactgaagcactctgtgactcaatataggttaaggtactgagtgaaacactagggcagtcctttcacaaagacaagacaagactcactgtgatcacgttcatgttatcactaacattggtccatatcttctaaccatttcaatgtcaacaaaaagaaacgggtcgttcattttagaaaggagaagacaaaattatccctgtgtctgactgacttgcttaccacctgaagagaaccaactgaaaaattagtagaaccatcaggagaacccagtaagatggcagcaactatttagaaaatctagtggaagaaagattcacattcatagtaccaacaaaagaagcttcatgaggaataaactcaacaataaacacataggctctgtatgaagatgcctataaatagtaaaagtcttgtgtaagttaagaatcagatcatgttcctgtattaaaatgttaatactataaagataacaattcccctgttgaaaattagttttaagtttaatgcaagcctaacaaaaattccaaagaaacattttgttgagaatggaacttaatgttttaaaatttcatctggaagaacatcaggtaacgaaacaggttatgaagccacagtgattaaaacatggtattggtgaaaaaacgcacagatcaatagagcagagaagagatcacaaacaaacaaaaggaggcgtgagcatttggcatatgacacaagtcatgggaaagggagaagaagtttaaacaaatatgatgtttagataattgcctaaccatttagcaaaaaataaattaaattcttgcctcacgctgggtaccaaattgaattgagtgttgaataatcttgctatgaagacattgtaagtataatttgagaggcagacactataaagaaaaagatctttagatgagatgatctagaaatttctggtatgactaaaatgcaaatcaaaatcacaatgagataccatctcacaccagttagaatggcgatcattaaaaagtcaggaaacaacaggtgctggagagaatgtggagaaataggaacacttttacactgttggtgggactgtaaactagatcaaccattgtggaagtcagtgtggtgattcctcagggatctagaactagaaataccatttgacccagccatctcattactgggtatatacccaaaggattataaaacatgctgctataaagacacatgcacacgtatgtttattgcggcactattcacaatagcaaagacttggaaccaacccaaatgtccaacaatgatagactggattaagaaaatgtggcacatatacaccatggaatactatgcagccataaagaatgatgagttcatgtcctttgtaggcacatggatgaagctggaaaccatcattctcagcaaactatcgcaaggacaaaaaaccaaacaccgcatgttctcactcataggtgggaattgaacaatgagatcacatggacacaggaaggggaacatcacactctggggcctgttgtggggtggggggaggggggagggatagcattaggagatacacctaatgttaaatgaagagttaatgggtgcagcacaccaacatggcacatgtatacatatgtaacagacctgcacattgtgcacatgtaccctaaaacttaaagtataataaaaaaataaaattaaaaaataataataataaaaaaaatttctgatatggctaaaaattgtaaatataagataatcaaacgtaaccataaatataacataaacacaaacataaacataccataaataaaaatatcataaatataacataaacataactgaaaggcaagtgacagactgggacaaacatttgatagaccaaagtttaatatcctttatataccaagaagtctctcaaatcaccacagaacagaaaacaaacaccaacagatggaaaatgtgcaaatgacaaggatgagcagaagaaatacaaatggctgataaacccgtgcaagtttctctattattattatctctattaaataaatgcaatttaaaattcagcataccatcttctatctatcaaattaacaaagctaaaaaagggtgaaagtgtacagtgatggtgaaaggctgggagtgtgggcacacttgaacactgtagataggagtatataaatccatacaatttttccagagagcaatttgtgcacatcagaggtcttaaaatgtgcatactccttgtccaggaattctttttctgggagcttataataaagatgaatttaaacaagtgcacaaaacacttggataggagattttaaaactcccacaccgtataagtggtttaaaaaaataatgttgatggctgggtctggtggctcacgccagtaatccctgcactttgggaggcggaggtgggaggattgcttgaggccaggagttggagaccagcctaggcaacatagcgagactccatctctacagaaaataaaaataataatattgaaaaaccgcaaaactaaatgttcatcatatcttgtgatacatttataaaattgaatatcatattgccattaggaaggaagagttttatagaagtatattttttgaccttgcaaagattttcatggtacatcattaggttaaaaaacaagttacaggccaggcacagtggctcacacctgtaatcccagcactttgggaggatgaagtgggaggattgcttgagtccaggagtttgagaccaacctgggcaacatggccagaactcatctctacaaaaataaaataaaataaaaaatataaaaattagctcagtgtggtggcacgcctgtactcccagctacaggaggctaaggtggggggatcatttgagcccaggagttcaaggctgcagtgagccatgattgcaccactgcactccaccctgggtgacagagtgagacttctcccctcacttgcaccccccatccacaaaacaagttacaagtttgtatcttttgagtccataattttggttaaaaaattatatatataaagaaaatattcaaaaggacatataccaaatgctgatcaaataactagttatttttgagaattagaatttaagacaatattaatttttaaaaatatttgcttatatttttctaaattttaataatgaacctgtgtcacttgcataattaaatatttattagaaaagatagaacttgaccttcaaggaagagacagaatttgagctgggcctaaatgagaaataatatttagaaagatgatttcagatatgacgaatttagcatgtatgttaacctgtttaatgttactgtttattaggtacattttatcagcataataaaaaacagcttgctgctttattaaatcctaagcaattctaaagcactgctttaacaaataataatcattggctgtttgagaagagacaagtaaatcaattgagctaacaagtttaaagtgatgctccaaagatacacttggattgatatttgataccattgtcattggatatcctgtatgtgaacatttttacttgaaatgctgacctgttaattttccagacatctatcacagtcttcaaataaaatgtcggtccaccctttgctcattcataatcttgttcttttaaaaaatgtactgcccatgtctctgatgactctcaggtacttacaatattttattgaccagaaaaccctattccctaacggagctgaacaaatatctttccttttgctcccttcccctggaattttctgtccatctcctcctctgttcctttctggctccctctgtgacctctccatctctccaaccctgccctcttctttgccttcattcctttattttgtttttggtcactttccctccttttcttcttctctcttccttctctctctttattcactctcacactgtcatgtttcccctccttctcttgtttcctttcctttgctgttgttctactttctttctgtctcttgtcccctcctctaatccccatgtgtggcaggtctatgacacacagctggagaatgtggaggcctttgagggcctgtctgacttttgtaacaccttcaagctgtaccggggcaagacgcaggaggagacagaagatccatctgtgattggtgaatttaaggtaaatcctcgaagacgtccctaacccaggtgggcctaagactgtggtgttggagcaataagtgaaggggaggggtcgtacctacactggtgaccctggtgctgatgttggtgaccacatgggtaatggaggtggtgatggtgatgccgctgacgcagaatctgactggtgatgggatggtgttgggcttggtgatctcagtggtggtgactctggtagagatgagagtggtggtcatgatggtgattgtgtcagtgacaattgtatttgtttttagtctgttttcatgctgctgataaagacacattcaagactgggaagaaaaagaggtttaattgaacttagagttccacatggctggcaaggcctcagaatcatggcgggaggggaaaggcagttcttatatggtggcagcaagagaaaatgaggaagaagcaaaagcagaatcccctgataaacccatcagatcttgtgagacttattcaccaccacgagaatagcacgagaaagactggcccccatgattcagttacctcctcctgggtccctcccccaacacgtgggaattctgggagatacaattggagttgagatttgagtgggaatgcagccaaaccatatcattctgcccctggcccctccaaatctcatgttctcacatttcaaaaccaattatgccttccttagagtcccccaaagttaactcatttcagcattaacccaaaagtccacagtccaaagtctcatctgagacaaggcatagtcccttccacctatgagcctgtaatatcaaaagtaaggtagttacttcctagatacaatgggggtgcaggtattgggtaaatacagccattccaaatgggagaaattggccaaaaccaaaaggttacagggctcatgcaagtctgaaatccagtgggacagtcatattttaaagctccaaaatgatctcctttgactccaggtctcacatctaggtcatgctgacgcaaaaggtaggttcccatggtcttgggcagctctgcctctgtggctttgcagggtacaggctccctcctggctgctttcacaggctggcgttgagtgtctgaggcttttccaggttcacggtacaagctgttggtggatttaccattctagggtctggaggaaggtggccctcttctcacagctctactagcagtgccccagatgtggggcatcagagcccccacatttcccttctgcattgccctagcagaggttctccataagggccccacccctgcagcaaacttttgcctgggcatccaggtgtttccatacctcttctgaaatctgggtggaggttcccaaacctcagttcttgacttccgtgcacccacaggctcaataccacgtggaagctgccaaggcttggggattccaccctgtgaagccacagcccaagctgtacattggcccctttcagccacggttggagcagctgggacacagagcaccaagtccctgggctgcacatagcacagggaccctgggcccggcccacaaaaccactttttcctcctgggcttctgggcctgtgatgggaggggctgctgtgaagatctctgatatggcctggagacattttccccatggtcttggggattaacattaggctccttgctacttatgcaaatttctgcagctggcttgaatttcttctcaaaaaatgggtttttcttttcttctgcatcatcaggctgcacattttctgaacttttatgctctgtttcccttttaaaacagaatgcttttaacagcacccaaatcaacttttgaatgctttgctgcttagaaatttcttctgccagataccctaaatcgtctctctccagttcaaagctccacagatttctagggcagaggcaagatgccaccagtctctttgctaaaacataacaagagtcacctttgctccagttcccaacaagttccccatctctatctgagaccacctcagcctggattttattgtccatattgctatcagcattttgggcaaagccattaaacaagtctttaggaagttccatagttttccacgttttcccatcttattctgagccctccaaactgttccaacctctgcctgttagccagttccaaagtcgcttccacatttttgggtatcttttcatcaacaccccactcctggtaccaatttactgtattattctgttttcacactgctgatgaagacatacccaagacttggaagaaaaagaggtttaattgaacttacagttccacatggctggcaaggcctcagaatcatggcaggaggtgaaaggcagttcttacatggtagtggcaagagaaaaggaggaggaagcaaaagcagaaacacctgataaacccaacagatctcatgatacttatttactatcacgagaatagcatgggaaagactggcccccatgattcaattatctcctcctgggtccctcccacaacatgtgggaattctgggagatacaattcaagttgagatttgggtggggacacagccaaaccatatcaacaatgatgataaaaatgaaaattaacccttccttcttttcagggcctcttcaaaatttatcccctcccagaagacccagccatccccatgcccccaagacagttccaccagctggccgcccagggaccccaggagtgcttggtccgtatctacattgtccgagcatttggcctgcagcccaaggaccccaatggaaaggtaactttcctagagccctcacctcccccagagtagcaggctcaggtacaagtggcctatagaacctggacacaaactctgcctcagggagttcatagtaggttgggaaacagacaaacacacaaaactgagaggtgcctggatggagttgtgttaaggaccaagtgctctagaaggtcagggaaggccagtgtcagtacaggactttgggaaaatggggaaggcttcctggaaggaataggactcttaggatagatgagattttgataggctgggagggagaagaaaatagtgttttaagaggggccaaaagcataggcaaaggtttgaaagaaaattgcttaatgtgtgtctagaacaagaataaagcagaaagataagtaaggctgagggtataggttgggactctcaatggtgaatggggaggagtgatgggggaaaggagcagcgttagtgactgctatgcctagtcatggcagagtcccaggtaaaagggaatgctggtaacactcacccggtctttatttaaaattttgatattttgttcatcatggactattgacactgattttaatttttaaaatatttcattaaagtactgtttatcttaataactattttggcccttccttacattttgtgcccaagataagtgcgtgagctgtctccctctagtcattgcctgagatggagaggggagatttgaaggaggaaaggagtctggagttatggggaggtgacagaggtgggaggcagagtaatgttgggaagagaaagaaagaggaaagaagagaggcaggggtggggcctgatttgcctttacaggcatgaggctagggtcccctcttgtctcctgaggcaggtttaggcccagcatgtgtccttcaggtggtgggtggaggcctggtatcccaccctgtagcctcacctttcaagggacagaatggagcagttctcagcctaggcaccactgacggcctccaaggtgtggtcatggccagtgggttggtttatatgcttgaagccttcctgatgctagactaaccctgggcactctgcagccccagctgctgggtcgctggctgaggggtgctgctgcttccaggaagcatggagggagacctccctgggctagcctaggctgacataggctgaccacccctctctcattccatatgcttaagcagaggtcacagagaggaccccagcctggtctcgtcatgtgtgtaatgcagactgttgtgtttctgataagggcctggcctctcccaatggagcagtagattgggagtgtgaaggactcaggtgccccattcccacggctggagccaagaccagaagcccatgtcagggtccaagtggagtggtgtggtgtgtgggagggggccctgtcttggcaggacacagcccacatctcaacttcctgatggctgctccctcatcccatccagaggcaaggcactcatgaagcctcaaagacaggtttggaaagtgttttcacagaagtgttttgtctcctcctccagtgtgatccttacatcaagatctccatagggaagaaatcagtgagtgaccaggataactacatcccctgcacgctggagcccgtatttggaaagtaaattggggcatcttgggtcttggggtggaggagccagacaggataacccacagtctagtgggggagatgtgactggcactgtgaagtccgtatctcttggagcaaaactgtattccttaaatcttgcatgtctatgggggcatagcctcagttagcccttctttagctgctaaagacttgatcccaacagaagctcctagttaaatgctaaacaattacgtctaagatcagaaatctacatggcttgagctcaggagtttgagaccagtctgggcaacatagcaagaccccatctctacaaaaaataaaaaacttagccaggcatggtagtgcatgcctgtggttccagatacttgggaggctgaggtgggaggatcccttgagcctaggagtttgagcttacagtgatctgtgatcaaactactgcactccagcctgggtgacagagcaaaaccctgtctcaaaaaaaaaaaaaaaaaaaaagaaagaaaaagtagaaatctgtgtgtaagctcagaagatgcatttgctaattcttttttttttttaagataaacttttactttggaataattttagatttactaaacagttacagagacagtgcataatttccacttactcaatttcccccactggtaaccccttactcaatttcccccactggtatcatcttacctaaccatgggacatttgtcaaaatgaagaaatcatcattggtgcattacgtttaaccaaactagacttttttttaaaggatttcatgttttcccactaatgtcctcttactaatgtctcaggatccaatctgttatacgacattgcatttagtaattaattctctgtaagtgtcccacatgtgtttgtagcaagagctagaggaagaatgtagacccaagatagtaaaatgattcctgaaatctgagaacaaggaaaggaagaatcaatgcccattgcatgggagtaattcctaggcatcctgaattgctgtttggatgtgagcttgtttaggccagagaggggaggatgcagagggagggtggcagctatttctctcgcacctgcagaagacacctactgttccgatgtcatcaagtcacatattgcacttataaaccggggtctgttgagttagttgtggtcactcaccctgcagtgaggacccagtctccttggggaaatgcagcttttgaaggtgaaccagccctggccagtgatgagctcccaccaagcagggattggagggaagtggtaggtgggagagaggaactctgtatgagttccaggggctggcgagctccaggggctggcgcagggcctcaggctaatgctgatggggcagtgggcagggcctgttccacagtgggtgggggtgtgtcaggactcaggggagataggggagccagtgcaggaacacacccctcccatgcctgtttccccatctccccccaatcctgggcaagctggtctgcctggtgctttaagcctccttcagatcacaacagaaacccttccattctataacccatgtgtcagacgaacacaacgcatgaggtggtttttgtcaccatgtattccatggcgttaccttctcctttcccctgaggaaactgacaggcaggtgacttttctgctcacattgagctcagccactttaactcacgaacccagtctcaggccataacccactgcccatttgtatggaatcccgagctccctgatggctctaggggagtgtgtcccctctttggatgcagttgtgtgtgtatatgtgtgtatgtatgtgtgtgtatgtgtgtatatgtgcacatatgtgcgtgcgtgtgtatgtatttgtgtgtatgtgtgtatatgtgtatgtgtgtctgtgttcgtgtgtctgtgtggtgtgtgtatatatgtgtgcatgtgtatttgtgtgtatacatgtgtgtaggtgtatgcgtctgtgtgtgtctgtgtgtctgtgtggcatgtgtgtattttgtgtgtatgtgtctctgtgtccatgtgtccgtgtatgtgtgtggtgtgtgtatatgtatgtgtgttgtatgtatgtgtgtgtatgtgtatttgtatatgtgtgcgtgtatgtgcatgtgtatttgtatgtgtgtgtgtatgtgtgtttgtgtctgtgtgtctgtgtgtggtgtgtgtatatgtgcatttgtgtatatgtgtgtgtatgtgtgtgtgtctgtgtccatgtatgtgtgtgtgtgtacgtgagtacatttgtgtgcctgtgtgtgtatatgtgtgcacgtatgtgcatgtgtgtgtgtgtgcatatttgtgtgtgtatgtctgtgtccatgtgtctgcatatgtgtgtggtgtgtgtatatttgtgtatgtttacgtgtgtgtgtgtgtgtgcgcgcacgcgcgtggtgtagggaaggaagggccctgccttcctcccttcctggtccagtgtttctcccttcctgctctggctgacctctgaggttctgactcctgcagtgtctgggctggggagagggcccgtctcatgtgcccaccaccgctgtcatccgggtactctctggaccacggatgttgaaagccgacttattttcctgtgggtgctttccagaggttcctcagagagccccccgtgagccctcccactgcactttctgggatatggcagatgctgcgtccctttagctgctgtccccagcccctggttctcagatggtcaactccacaatctctcgctgctacaaccctctgggggtctcacagggcaggattcagagcagttccagtctggcctcagagtggtttcttctcctcccaggaagtccttgtgttccttgcccaggcatgggccagagtgcagctcctcccaaatgtggcccctgccctccttctccatgccacaagttgcttaagtttccctgagcatgcaccaggtgccaggcttgtgtctctcacctgcagggagctcattttagggggagaagggagaatacctctccctttgatgcacatggtagatggagttctcagatacagcaagagctctcgccagagaaatcttttcacaaattctccctccatcccatcccagaagtggatgtgaagagtccagaaagcaggtcccaggcctggagtttccagtcatcggtaaattccaaagctctggccccttgctctggagtaccagtcgtcggtaaattggagtcccccaatttaccgggagtcctccctggactggaggtaccagtcgtcggtaaattccaaagctctggcccctggctctggagtttcacatctcttgcatctgttgtctcctggtgtcgtggtcaaagcttcagttttaatgtgcatttccaattcattctttcggtctgtggtccatcaggcaggcacttgccttatgcccagcacagtttatttgggaaagtcctgtcccccttccccctacacacacattcaggcccagtacagcagtgctgtgggtggttgggcctgtaagatctgtagggggcccaaggaaagaagactccctggggtagtttcgagctcttgtcctgccctgcctgtcccttgggtgccctgtgttggctgacatcgggaatctgcccctcctgcaggatgttcgagctgacctgcactctgcctctggagaaggacctaaagatcactctctatgactatgacctcctctccaaggacgaaaagatcggtgagacggtcgtcgacctggagaacaggctgctgtccaagtttggggctcgctgtggactcccacagacctactgtgtgtacgtggatgggggctggctgcctgcttctctgacaacacaccacccctgtcttctctgacaacacaccaccactgagcacttactgtgtgccagccctgggcttagcacttcctaggcattctctcattgagtccaatgggagtcctatccccactccacagatgaagaaactgaagcccagagatgttattgcttgtaagtggtggaattaggatttgaaccaagaacctggctcatcacattgttataatccagttatctgtaatgcacatagaaggcctagagagggctaggtacctggaaagggagagagggaaggaaggcaggaaagaagcaggggaaacagatgagaggacatgtgtgctgcaactgggcccgaaggggaattttgtgatggtttatgtcaggggaatgcatgtgaggactgcacccctcttcccaccatctcaagtcttctctgggtctgattatctaactctggaaattgaaaacatttaagttgcaattccgtacttaaatgagtccttttctctctgagcctccatttctccatctgtaaaatggggatgcccagtcatggtgagcaatcagatgggacacccactgtaaaagcaaggagtgggcaatgctgtacatgggggtacaccagtccctgcatgcccctctaccctcatgagtgtccttgaagcatctcatctatgtcttgtgcttgctcctcagctctggaccgaaccagtggcgggaccagctccgcccctcccagctcctccacctcttctgccagcagcatagagtcaaggcacctgtgtaccggacagaccgtgtaatgtttcaggataaagaatattccattgaagagataggtgagctgccacatgaccccaaaccatggtgggctctcgctgtatccctccctctctcatcagaccctctgctaccataaaagacccaagcggacataacccacagcagcaggctgtgggtctctccagggcagcacagatgggctccacttgcacttggtactttgaggatcagtactgacctgtgatgccactgtgaaaattagaggtcagggcacagccagggtcagagtgcagtccaaggccaggttggggcccatccgagggcaagatcagaggtgagtctgaagccagtgtcagggtcagagttaggctcagtctctttctggcattggctggtctgactctggttggagtttggggtacagtccacttctcagaaacagttttctacttgaattgcaccagcctggcagcttgaccctgatggtatcttccaagctccccactgacagcccatgcatctaaaggatcccaaggcaggcaggccttgtagtgcccccagtcctgcccagggtcctgcccagctctcctggctgagaatcccgccacatgctctccgtgtgtctgagatgcccgcaggcctgcatcacccactcagagcagctcagactccccagaggtgtttacaggcccagctggccccttgcctcctggttgcttcagagatgtttgatgtcagagctggtgccaaggttataaaagggaaatgatggctttgatgcccccatcccccaccccctcctccttctcattctgttttcctgactctcccaggtcatggctgagccaggctcggccataaggcgcccccagccctgccccccttcattcccttttcccatagaatgagcatctgttttcgggggagtctcatttccttctactagtctgtgagcaactttagcacagggccatggctcatggtcataaagtcataggaaacaaaagccagaaagctagagatggtgaggtccaacatctgcctgcttttacagatgaggctggtaagaccaagagtggtgaacgacctgcccaacgtcacccaaccagctaggggcagagccaggttcctggccctgtgtgccttctgaggtgcatgcctcttcctttgaggcccctactgaaatgggcagggcaggtctgatgggtgaacacatgtgtgtgtacatataggtgtgcatgagcacacctgggtacatgtacagatgtgtgtgtccaccatcagctcccaaagccaaggcctttgacatagtgggctccaagttcatgttgttggatggttggccaggcttctctgggtcaggaataccccatgtcttctccccacctgtagcaccagtttttgacccattccctagcagggaggagctgtacctgggacgcacctggggacaggcacctaggttcatgcctagtcacgcacctttcctaagtgagcatgtgatctcagctgctctgctgctagttgtgtggcttctctgtgcctcagatttctcttctataaaatggggataataacagcactcagcttctaggatcctcatgaagactaaatatgttaatagcttgaagaacagtgtgtggcacgtggttcctgctctggaagtgtttgctgttattgctattattttagctactgctaatagtagaacaacttaagtgaacgagagcataatactaacagcactaagatgccaaatctaggagtaaaggttgctgaggcttagagttgggagcagtcagggagagcttcctggaagaagtaggctttggagacaggaggatttgtatggtggaaaataggaataaaaactatagaacaggcttggtagaaatgatggcaatggggaatctggattttaagcctggagctagtggacagcaagatttcccctatcaaaagtgagacatgaggaccagaaaaagtgcatctgtgctgggggtgaggctgcgggggttagagcttcttatgactcttaggcagccctgctcagcctgttcactgggcagccccattatctctcgcttccccagctcctgcaacttttttgtcttctctctggggcagaggctggcaggatcccaaacccacacctgggcccagtggaggagcgtctggctctgcatgtgcttcagcagcagggcctggtcccggagcacgtggagtcacggcccctctacagccccctgcagccagacatcgagcaggtaggaccttgacccttgggtcccagagtcctcgaactccagaaagccccaaccccagggacaacatggatatcccagaggagccagtgggtcccttgagatttggtcaatccttccttgacccatttcttcacagtctgagtgcggccatggttggcctgggaggggatctttaggtcctggcttcctctggctgcctccatccctcagggcctgcgaaacgaggctgagcttctcccctcacccctgtaggcctggcctccgacctctccttgtcatcctgaagcctctctgtttcagcctgacttcaggttggattcccccatccaaccactatctgtcagtgactcagtctcagatgcccggccctgtgctgggtggctgtggggtatgcagccagggtggccctggcatcctatgaccaaatgacaaagccacccacagagagcagtcctcagtgggaggggaatcctcccacgctgaagggcggggaccacagagacagcagccttgggatggtgacagggagggcttcctggaagaggtgagctcagagctgggttttggaagaggagaaggggagacaaggttataggcaaagagaaaggccaaagtgagccatgaggatgcctttgtgaatgccagaggacattacctctgttgtttggaactgagctctctctccacctaggtggtttggctaccggcctccccaaagtggcacaacaggtgtggaaacttcagctctttcatcttctagttctgtgaccctgcagaagtgacttaattgaattacttcaattcctgctccttctgctctaagatgagacaaattcacacctcgcttgcagagagggaggaggataaggggtgggcagggagagtgatgtcctgccatggaagccttctgagccctccataactgaacggtgctctttgacacgccacgactgtgcacatgccattcccctggctgccaagactcagctcagccaccaccatctctgagaagcccaccctgacccttgacccccaggcacaggcccaagtcagaggcctgtggggcagtggtcacctctgcggttgaccctgtagtcccctgtttagggcagtgaggctttctctggaagggcctgggtttctctgttctgtgccctcagcatctggcccagagcaggtgcttggtaacagctggttaaatgagaagggtggggagagaacggaccctgtctccgcaggggaagctgcagatgtgggtcgacctatttccgaaggccctggggcggcctggacctcccttcaacatcaccccacggagagccagaaggtgacttgcccagccacaggctctgagctgggctgaggggtgggggcgttgcagcctgctgtgggcgggactaggcggttgctcttttctgccgggcttcaggctatttgggccatggaatacagttctcgtttgggcctgggccagtgtccagccaggcaggcatcgagtcctcttggaccagtctgcttcttggcttcttggcttcttaaggccttcccatcctttggtaggaaatctaggtggattagagtgatacctttccccaggtttttcctgcgttgtattatctggaataccagagatgtgatcctggatgacctgagcctcacgggggagaagatgagcgacatttatgtgaaagggtagggagccagcgtcctcttgcctgtccagcttcccgcagctcccgtgctccctctgggttgtgcacagcacggggggctctggctcagggaagggaagaacaaacaaacttccaacgagggctcctgggggtggtccctgcctttggggaaatcgctctcccaccagatttctttttctgcactgaactttgggttgaacttacaagtttagtggctgggaagttagaatgttttcaaatttatggcacattttgtacatcgtgccgatttcctgggaattctttttgcgataagctcatttaccttcttaactccttgtctgcctaagttgacgatgtatatactgtgttggaaatcttaatgagaactattctctaaaaacatgtatgtctagttggatgattggctttgaagaacacaagcaaaagacagacgtgcattatcgttccctgggaggtgaaggcaacttcaactggaggttcattttccccttcgactacctgccagctgagcaagtctgtaccattgccaagaaggtcagtgtccttccgattccctgtggtgccagcaccagggcttctaaagttagcctgacctgaccaccacgtccctgcctggcaactgtcacaatctcactgctgccccaccatgttggagctaccactgccatctccacatggccaccacctccactgtcccagcactgccagtgtcaccaccactgctgtctcagcgttgtgtgatggcctctgtcccatcacagccaatgtcaccgtggctgctgttccatcactactggtgttatcacaactgttgcctcctcactgccaaatgtcaccaccactgttctgtcattcatggcactaccgtggtcccacccctgctgtcattacccccaaagccacctccaccatctctgcatccaccccttttccactctcttccaccatctttcccatccccagccctgccgccaccccatggccacctcatgatcacacagtgccatatccatcatttgcagctaaatccagatcccaaagtcactgcctccctccctacctcagacaagttaagcagcaggaaggaccatggggtctgagtgggtagagtagggacacccagcatggccttcaaaagggcagtggggcagaccccatgggggagcttcccaagaaggccagtctggcctatagatcatggtgtccacaggattgggagttgcttggctaagtctttctcatatcccattttccacatctgtgcctatggtcaccgtccaagctaggtcacagtccaagtgtgcctgcaaggcccacagccatcaccctcctctctccactcccacctctcactacaggccaaaggcacctagggagacctggcttgcatcagccagaggggaggctggatttggggacctcggtctctgtgtctcagcatctgctagtttaggtctcatctggggcgtcaactttttacccctgaactaggcagaactcgaggacagccagcctcttcctggtaggaccaggcctgccctcagagagcagcccccagagcacagaatgggtgctgagggcagtggagacttcagggctatgctggttagaggcagaggggtctctgctgtagcttctggccatccttgtcccacccggcattaaattccaccctgaggtgctctccaactcaagggggtaaatgcctctctggcatctagattctgctggcccgatttccttccagaggtggctcaaggctttaagcctcaaagctcctatgactccttgtctcctgaaaggaaggggatatatgacgcgttccagtgcctgcattttcttgattctcttcattacatcccctctgcatggcccttcccagcctaacatgcaggatcatctgcacattagagaaagcaaaatgttccgcggaacattctgaaaccatgaaacaaaagaaaacatggattcaacagggttaagtggatccctttaccgagccattgctgtggagtgactggcagaaagcagaattgagcaacagggttctgggaggtcaaggaaagcatgggccgtttgcaggttgagcctcatttgctgctgttcagtgtgcttccctgacatgagcctgtttccatcagaaagccaaggttgcatctgccccaagacacagcactgccccagccagctctgctgcagacagagggagagggggcctgggagtggagagggagggctgcgccccccgtggcacccccagggctcacctacaagggctggagactgagaccgagaggaatgggaggtgggacagccccttcctcatgacaggtggagatgtggattaggagtggctgttttgtctctgaagtaagaggagagatgatctggtactggggcaggtgacttgagaccagtggaaaaggctggaaagagctgctatgagtgacagtgagggagggacacagagagatggggagggaatgtgactggcagcacagagagggttacccggcagttctggggacccagttgtggttgctgattaagaatttggggtggctccattctggcaatgttgtggttttgtctctgcatcatagggcctggtcaggaggaaggaagaaggggagagtggggccaacccgtgggcgagttccagaggaagacaggggtcgaggatatggaagggactgcctgatggccaagagggtcttggtcagacttgggagaatgagaagcccacaggggagcaggggtggagaggaggaagagaggtcagagagtggaaggagaggctcactgggagggaaggccagaggggaagggacgttctccgtgatgccagactctggggagaaggtggctggaaggaggggcggagaaggtcagaagaggaggctgagaaacagaaacagaggccacgtggctctgaagtcaaccagaggtgggagacagaaactggctcggccgaaggcggagacagaaactggcttggccgaaggcagagccagagggtccctcttggagtgaagggaccctgggaggcaggcagagcagtggccacagtggggcaccagttagctgggttgggctgaaggatcgagtctggatgggttcgtgcaggggcactgcacagcctctgggctccctgggcctgccacggagccagccctctgccgtggggttcagggcctctggcaggcaggccctccagggaccccattaaccagacgagactgtcgtaaagtacaaggtctcctttcatccggcggctttgaaccaccactggttgccccggccaggctccccacctggagcccagcacaccctgcacgtcaggcacccaccctgcaaataaacagctagtaaaagcgcccaggccaggagcataatgagcgcctgggacctgggggggttcattccccaggctggagccccagcccagctgctcccaccaggggccgtttgaacctctggctcattaccgagcccataaaccaagctggccagaggaatggaggctgctggcgggccatgcaggcgggcctgcggagctggccataaaagctcgccagaggagggaggcacctgcagaagggctggggcccggaaaaggggggaggcaccagacagagggctggaggtgaggggccagctggagacctgagccccttccccaacccaggcagcagtccaggccgtggctgggtgctttgcacggggactagtcctcacggggcaggggtcatggtcttcggttcgggagctcactgggatttccgtggccaacctctgaggctggggtggccacacagcaggccctggctggacagcaagggtgggtttaccaggcatttggtggagcttttcccctgcagagttgggtccaggcccttgctctgacccggcactcaggacttggcacccaccatctgcagggtggtcacactgtttcctgtccttgccactcacccaggggagagttatagtgagaaaacagagaacaagactgcgctggaaagccctagtgacagtgctgtgggttgagtgtggctggactgaggggtgctccccggcctccgcatgtgcagtcccacaccgctcagttgctccatgaagcctcagtgggaggaagcccaagatgaccttgttccaggcgagctggtctgagggaggtggggtggggagagaagggcccctcctctcctttcagcaggagacggaacttcccagcacttcaggctttggctttgccctgggtcaagctcttggagtgaagttgggtggggtggagagggaggagctggggtctagattccagtgccagctccttacagcagcgtgctgggagatccttctatgacagccagggtagggtggggtccctcagggtctcagttaccccaccctgaccctgagatgccaggtacagagcaaggtttaaggtagagagcaggacgctggaacccagctgccagggtttgagtccagcttgccacttcctagctatgtggtcttggacaaattacttgctttggtctcctccactgtaaagatagtatctcctttacaggtggttggaaggataaatgagttcatagcagtagagggccaatgcataggaagcactatattaatgttattattattagtggtcagacctcaggcacattcctttaacttctccaagcctcaccttcatcatctgtaaaatgggagtgataaccttgacttacagagttgggaggattaatggagccatcttatgtgaactgagcctgcacggtgcccttttgggcccttgaacactgccttctgggatctgtccttcccagtcttcccacaggacctggctctggcaggtcccttggggacatcctactcctctgcctcctccaggcagccttccaggctggaagggaacactgcctctctctaactttgcttccttgcatccttctctgttcctcttccgggtcaggatgccttctggaggctggacaagactgagagcaaaatcccagcacgagtggtgttccagatctgggacaatgacaagttctcctttgatgattttctgggtaagcgctattgctagaatcccattctgcacatgggggctgccccagaacccacactgtgtgtttatgccactgttggacccttggggaagcctagcaggaggagtgatcccactttctgctttcagggagctcagggtcatgtgtccccagtgttaagtgaggtgtatgacacacagcagtgtcagagtgattggtggccactgagggtgggcctgtcagtagaggtggcactgaacactgggccatgttggatgatgggactcagatatgtaagtaagcgagggacgcaagtgtgtgctgcctgtcgccagctgtctggcctcacatttgacacagactgagccctgtgagtgagggtctcaagtcagtcttcatccttgtgcctgtgtgaccgactgagtgaacaaacccaggctctatccccattacccccagacagggttctagtgggaagggctgtgatgaaatctgggactggggagcagggaggctgggttgaatggaaggtggtgatggtggccttgtagggttaggatatggggacaaggaggaagacattgtatggggcctgcacgctcatctgtgagagcagtgagttcaagatagccctgtcatggctataaaggttaactctggaaaatgtggtctatccatacaatgggagagtattcagccatgaaagcaatgaaatactgatacatactacactgtaggtgaacctgaaaacatgccaggtgaaagcagccagacacaaaaggtcaaatattatatggcttcatgtatatgaaatgtccataataggcaaatccatagagacggaaaataggttagtggttgctagggattgggggaggggggatggggagtgactgtgatgggtaagaggtttctttttgcggtgatggaaaggttctggaattagatggtggtgaaggttgcacaactctgtgaatatactcaaaggcactgatttgtacacttaaagtggttaaagtggtgcatttatgtgaggtggattttaccttgattaaaaaataaagcgagcttgtgaaaacggcaacccaggaagtcaggatccctggtttctagatccattctgccacttgggagcagggtggcctggagccctcttggggtagcccttgactggagaaggtgagtcgttcttagctgagccctggggcccctgcaggggatattctgaggcgcggcttccggcagtggggagaaggctgcctgttcacttgactgttcccccgccctgcgcacctggcctggccaaatgcccagagaactttgttataaaagcatcaggtgcaaaaagcgtggcaccaagtttgacttctattattttacttattattttgtacataattcctgtagaggaattagaaaatgcaggtaaggaattagaaaatgcaggtaagcaatgcttcctccccaccttaatctcaccacccaatttctactaacattttggcatgtattattgtattatatattatttgagacttaaacaaacataagtattttatatatgtatttatatatacacatgtacatgcatacatatataatatatacatatattcatatgtatatgaatagatttctattacacagactgttttatatcctgatttttgaaaaacctaatattccaagaacatcctttctggtcagtaggtatcgatctgcatttatatctccatcatcacacttaatgcctgcctatgttttgtcatagacgtgggccctgttttgattaatcctctcctggtgggtattcaggtcatctccaggtttcccaatgtgagtaacaccctcggcatatgcacatccttcgatcctttgtgcatatctttccttaactctgagaagtagatatgtctttgtacattttaatggcttttgaaacattttgttcagttgccctctagaaaggttttacttgtttatactcccacctgtgccctgtttgtacagggtgccattttccctaaacttttgctaccactgtacattaaaaaaaaattgccaataagatatttcctttttatttgcattttttattgcatttaaggtagaactttaaaatatatttattatccgtattgtggaattttcttcatggttttgcaatattcatcttttattattgattttcagagccttttatgtattaagaatacattgcaaataatttctcccaatttttcttatgctttaaaatttttatggagactttttttcttacagactttgtgaatttatggcatcaatctttcctttatgaagtgaggctttagaaaattagtttttaaaagaaaaacaaaaaaaaaaccctgtgttttttactgactgagtaaatcatgttcaaagtaaagttaaacagactcatcctttgttttaaaaaataaaaccattaacgaatactagcttttatatccatgaaatttttcttttccaccttcataatttgttttctaattacataacttgtgtcttttgaatatttattactttttaattttaaaggtaatggttaagcacctataagctcaccatccagatagcctgtgtttccttacagtcttttatgtagatcatgctgagataatgtgtgtgtatgtgtgtgtgtgtgtgtgtgtggtttaatattctgacatttgcttaatatattggcaccatatttcaaatagaaaataaacattcattcatctgcactggagggatggagaaatatatgggtgggtggagcatagatgaatgccgatatacagttgaataagtggacagacaggtggaataataacctgattaatggatagatatagtgcttaacaaatggtagctatagaggaatgtggatagttaggtcaaagcagacgcacagatggaaggacggattgataaatggatgagtggaaagaaagaaaactagaaaaagagttatatttaatgttcggttatagtaactatgcattctacactgaaaaaaattgaaacacctttgcatggtgtttgagaatttctttaatttggcttcagaaaataatttttctattgatctctcttaatccctttggcaacctatgctccaatcccattgactttatcagattatgattagattaggcgaaaccacatgaaattgctgtttaaatgggtcaaagatagttaaatacaagaattttcatatggttcaacctaatagctgaaggtatcctgggagatgatagataaaagggatgattagataaaacaataaaaaaagatggctgcttggataactaggtggtagatgaaaaagactgttggatgaaccacagtgaggtaccacttcacacctactaagataatagtaataataatagtaataataataaaccagaatatagcaagtgttttgaggatgtggagaaattgctggtgtgctgggacattggtggtttgagtgtaaaatgattcggctgctgtggaaaactgtttggcagttccttgaaaagctgatcatagaattgctaatgaacaaagaatcctactccaggtgtgtgtgtaccccaaagaattgaaaacagggactcagacatttgtgtgctaacgttcactgcaacattattcataatatgaagttaaaagatgggaacacctcaagtgtccatcaacagatgaatgaatgaacaaagtgtggtacaggttaaatataacttatctgaaatgcttggaacagaagtgtttcagatttctgatgctttttggattttggaataattgcatatacttaataagatatctttgggataggacccaaatctaaatacaaaatttttttcatatatactttgtaagcatagcctgaagggaattttatagaatatttaagataattttatgcatgaaacaaagtttaagtacgtatgtgtggagttttccacttgtagcattatgttggcaatcagaaactttcagactttggagcatttcaaatttcagattttcagattatgcatgttcaacccgtatatgcctagaatggaatcttactcaaccataaaaaaaatacagattaaaaaaacactactgatatatacaacaaggatgaaccctgaaaacattatggaaatcaaaataagccagacacaaaagaacaaatattgtatgattccacttatatgaaatatctagaatagacaaattcatagagacagaaagtagactagaggttactggggcgaaggggagggaggaatggggagttattgcttaatgggtgcagagtttttgtttgggggatggaaaagttttagaaatagtagtgatggttgtacagcattgtggctgtaattaaagccactgaattgtacacttaacatggttaaaataacaaatttcatgttatatgtattttaccatgataaaaacaattaaaaaaaaattgatgtatggctgtttatagacggtgtatgaatggatttgtacatagatgagtaattgaagaggtgggtggctttgttaagggtgagtaaataggagtggatgaacatgcatatgaacgcatgagtagatgaatgggaagctgtatagatggaatgggagacaatgggtagggaggtggagagttcgtgagattttacctgtggctcggccatggatagaagctggtgacagaggtgactgagtttttcctgaacctgccctgcctaagggtggctacaggctggcagtgatcgagaaacccttggccaaaaaccacctctctgttgcaggctccctgcagctcgatctcaaccgcatgcccaagccagccaagacagccaagaagtgctccttggaccagctggatgatgctttccacccagaatggtttgtgtccctttttgagcagaaaacagtgaagggctggtggccctgtgtagcagaagagggtgagaagaaaatactggcggtaagtctacttcctccagccccagtggagggcatgggggaagcttcttccatagaaattgtcagaaaatacgtcatcagaaaatacatgcttactgttcctcctcctttctccccctctcctgcccccatcccccctctctctctattttccaaggcattctccctctttcctcccaattcccggtcgccttctcctttgcggctcacatcccaggggaagcctatttaaaccaaaagattactctgtttatactctactcattggctttaatagtgacctgtgtcctgggttccctctgatctggacttcctgggtgaatgggtgggggtcatgcctctcccatttgagcaggacccgccaagggaccatccttattctgctctctgagaggtctgcttagaggggtgactggagggcccgagagaaccgtccttcccctgagtccacagcagccatggagaggaagttaatccctgaaagtttacttagaaatttcaggcagccagccaaccctgaaagtggtccttgaaattgaatatacttgttatataaagagtggtaacaataagaaatactagtaccccaaaggaaaaatgagaaaacgacatgcatagctaattcacaaaataattaccaatgtctgcaaagcatttttaaaaaggtttagtctctccagtaattaaataaagggatacagtagtcccccccttatctggaggagatatgttccaagacccccaggggatgcctgaaactacagatagtactaaacccgtattacgtactgtgtttattcccatctatacatatctatgagaaagtttaatttctaaatgaggcacagtaagagattaacaacaataactaataatagaacaattataacaatatattgttataaaagttaggtgaatgtggtctttctctctgtgtgtcaaaatatcttactgtactgcccacgggtagctgaaaccctagaaatcaaacccaaagataagggaggactactgtatttttaaatgtgttttttttgtctgttaaattatatatatttttaaaacagaaatgctcattgctgctgagcatgcagagagaagacaggccccccttttacttctgctgggagcactaatggttttactgtgtggaggaagaaatttgataacatatagtaacagatttaacaatatttatgccctcggactctgtcatccgacttctaaaatccttctaaataaataacccaataaattttaaaagtctaggttctgggatatttgttgcagcattatttaccctatcaaagagttggaaacaacctaaatgaaccaaaataagtagtttactaaataattatggtcaaccatcccatacaatgtttggcagtcattaaaaaccgaactttaaagaatagacaactacatagtgaaatatattccgaagtgaaaaaagccatctatggaactgtatatgcacagtgtgacatttcataagcttgcagagaaaatcagctatgatgcatgcaaatgttaacagtgcttgtctccatgtagtggaagtatgggtggcagtctcccttctttatacatttctgaagtttccaaatgttttacaaagagcaggtgctgcttttatgttcagaaaccctacatctttttttttaaataatgaagtggcccttatgttttttctggcctggttactctccaggccactgagcagagccttcgtgcccctaaccaagtgctctctgtcccctcagggcaagctggaaatgaccttggagattgtagcagagagtgagcatgaggagcggcctgctggccagggccgggatgagcccaacatgaaccctaagcttgaggacccaaggtcagtgcccagcccctgagccccaatgcccacaggtctgggggtataggccacagtccaggaggcatcccattgcatggccatgtagaagtcacaaagcccacgtggctcagagaggggcacgactcatccaaggccacacagtaagttagggggaaggtgatgggcatctgtccagagaacactgggctcagcgaattcaagatgcaggtgctattgggtacctgttggttgtgtgccaagcatgctatcctatgcatgtgtacattgtgctatggaaccttccctgcagggtagttgttattatccccattttacagatgaggaacaatctcagcaaagttaaataagggcattccagctaggacagtggtgaagcagaaatgctctcacctggtctgattggctccagagcccgatcaaggtcttgaccctaccaagctgccttcggtggctctcctatggtgccagtgtgactttcaaatggtttttcagccttcatttttccatctgtgaaatggggagcccaatccctgtcttccctacatcacagacctcttggggagatagaccaagccaatggatgtagatgctgtgaaggcagttacaggggcagagtcactgaaagatggctgtgggggctcaggaatgtgtttgctggatcccgccccaccagcctacttggctcaagttggatttagcatagatggctcagttagtcaccatgctgtgattagcaccgtgtgcctgagtgccatggggctggcagagcagtgagaggcacccttgcctaaggatgctgggatctgcacaggaagaaaagagagacccgtgagacaccagtgtgcaatctgatgttaacggggccatgatggagacccagaatcctccacgtattttgagatgtggagctggcctagggaaaggttttgagattcttggttgtgagagaaccagcttcctatgttctcttcccaccgttgttccctgagcatggactagccatgtgcatctgggcaggtgtcttggcttatctggggctcggtgggctggagagcactttgaagcactgcccagctcctaaatctgcagtttgtgattaagtcctgggtcaggaatgggtgagggcaccaaggaaggtgtcctggagaggatggcagagaaactgggccactgaggatgcttagggcttggcagcacccagaagaggagggcagcacaggtgggggtgatactgtagcaagggcttgggggagagggaatgcaaggtgcaaagggctagtttagggacagggcctgggcaggcgctgggggtggactgtggagggccaggccattggacctgctgttgagagaagagtttggagaaagcagccctagtaaaggatgcccagttgacctccgggatctcgcttccaggcgccccgacacctccttcctgtggtttacctccccatacaagaccatgaagttcatcctgtggcggcgtttccggtgggccatcatcctcttcatcatcctcttcatcctgctgctgttcctggccatcttcatctacgccttcccggtgagcaggcctgatgacactgtggtgggggaactctgggtctaatgggggagttcatcattgtcctcaaagagctctcccagtctaatggagagaagtaacctctgtccttggagagcccctggtctgatgaggatacagagcccagctctggggagtctccaatctggtaggtgtacaaagttctacccttggaggctcttagtccagtgagagaaactgagttcttgcccttcatggtgagacaaagctgtcctcagcaagcccctagaatttgtaatgaaggggttaggagaagatgaggccctttgggttgcggtgggcagggggactttctggaagggaggtgtggaactgggtctgaaaggaaggtgagatgttgatggcagagcagagaaggtccctttgtcttaacagcagttgcaaatccagaggaagggaggagctggggctgggagagcatctcagggtccacctgaggcactcaatagagtgtgtcctgcctcctgcagcaggtgggcatagggaagctgtcggggagcgggaggctggcccaggagcccttacttggctcggtgcccatttgggtttcctttcacttggtaagaagccaattgatgagcttgtggggccataccagaggtggctgtcgtgcccttgctctgtggggccctgcctgggggaggaaggtccctgcctgtgcttccccagcccgcacagctcatcagggaacccggatcaccagggagcctcccccagtgtctctgatactttagaccttgaaggggttgcagcattctcaggctgacacctgatttctaatgctctttaaaatttaaaagaaatctttttaatatgaaaactccaaccctatataaaagtggagagaatggtgtaatccaccccttgaggaccttatgttggtggcaaagacgcaaacacccagagaaggaaagggcctggccgtaggctgcacagtattccatgcacactcccaatccagggctcactgtgattcccacttcaggcctcagtcctggtcagcaccaggccactggcccagagcattgatcccatggcagacaggctgcttggggaactgcccccaggtgagctctttgctctgtgagtcctccaggaggaggaaagggcaagagcccctccatcccactgcagctggctatgcccatgtctgcagaatgcatctcagagaggaagagagttataaccacacagctttccatgcagttcctaacagctgaactgagaggagctggggaaaggatgtctggtttggatgtccggaccagctaccatctgggccatagtgactaaggagagtctagaaccagggtggtgaagggtctgcctacaggccaggcctgctaagctggctgtggtcacctgaggcgcaatggagaaatgtttctgaggttctgaggtttgtccatcagcaaaatctgactgtggtccagggtagatctaggttgcagggactcgaggtgtgtacgatgtgggaggcctctttaagccaagggagacgagattacaaatataagctgagatacaggactgtggaagagtgtgtgcacgtgtggtgtcctgcagcatgagctgttgctgtgacctgagatccggggtcaggccccaggacttctgcctggtgtctcctgcccagggggcacccttcccagcctgcctcaagctcctcctcccatttggagcccagctggccagtgttcagttagccacagagactctaagcacgtgtgtgcgtctgggaggtaagggcgtgttttggggatgagggagaagaggatgaggcctcatgccactggggagtgctcacttccctggggagacattgaaaccagagagtaaggaaaagtactgtggatgatcaaatgctcttttgggaggctcaggccgtgggagtttaggaagagaagagctgctgcagaccctcgcccttggtgtagtcggaggactagcagcagtagcaccagggaactcactagaaactcagagtccccggccggccccggcctgctgagggggaatctgcatgtaggcacatgatggttggagaaaccctgttggatgtgacagagctctgtcgctggagtcaggattatggactcttcctgtgaccttggcaaatccctcctgctcacatgaggaaggggctgcactaggttagctctggccttctgtggctgggactgtgcttaggggagcactgtcatcttccctggctgctgtatattaagccaagcctccttctgaaaagccaaggggaggggaaaggcaggtccaaagtggcatcaccaccacccatgacatgcctaagcccagcccctgccagctgcaccctgcactgctaggctactgggcagcagatctaggcctccaggggcctggggaaggaggccctgctgcctggctgggagaggaaggaaagatttccagtcacttccagcctgtggtccttcctcatcgctgtgggcagaagcagagtggtactgtggggggcctggtcagagctcctccctgtctcctgtccccccagcagcgggccactctcctttgagttcttctggaagttgtcctctttaaaatatggaccctgcttcccctctcccagggctggtgtggggatgtcagatcctaggtaaggggtctagggatgaagggggtggcctgggcctgaggctgcagactggctttgctcacaggtctttgctacaagctgagcacatcctgcctccttccacccaagtcactcattcatttggccagtaccagatgatgagggccgggccctggtgacactcacctggctttcaggccatgggacagaggctgcctgccccaagccagggcctagtggagaggggcccaaggacagggcagcttcctccagttggcctaatcccctaccctcttggaaattcccttgggaggggtatgagggggcagcctgtctgattcctctcagcttccccctcagagccagccgggagcagggccagcgtggggaggcaggaggcgtttggcggggaaggagggccggctctgtttccagagttggctttccccagccggcgctggggaacatactgtcccaattaggagccctgtattgtgttgtatgtgttttcatggtttttggggggagaagtggggaggggaggatactgtcaatcctgcagcaggcagggctcaatcaagggtgccctgtctctagtgctgggctgtgccgtgggtcatccacgacagcccatccccaactctctctctgctttctggacaggggtgtgatgacccgtaagccctgggctgccatgtgggggaggaccctgggccccaccttcagcacctgtctgatggaagaggccaggtccagggtgctcagagtcctctgggcagtcagctggaacctggaaatgggcctggcttgatgggggagaagacagagcaatttgggcagctttggcccccaggtgggagggtgcgggtggagtttcggagggtatgggtttgcctgatgggctggagcactaggcagggcggagtgttgagccccacatggtatggatggcaagtggtgagggcgaggcgtgggcaggtggttgaagagccacgagcgtcctctcccagcctcttgcctgttggcagcttagccccatcctctgagccccaggtctgggacagctgctctggctgtgcctgccccagtgggatcaccatgggtccctgtctcctccctccctccagaactatgctgccatgaagctggtgaagcccttcagctgaggactctcctgccctgtagaaggggccgtggggtcccctccagcatgggactggcctgcctcctccgcccagctcggcgagctcctccagacctcctaggcctgattgtcctgccagggtgggcagacagacagatggaccggcccacactcccagagttgctaacatggagctctgagatcaccccacttccatcatttccttctcccccaacccaacgcttttttggatcagctcagacatatttcagtataaaacagttggaaccacacagcagtgtcagtgtgtgtatctctacagtacctgaacagggagtgactgtgaagggggatatgcctgggtgggcggggagggtggacggggtatgggtgctgcttccagcccagccttctggagggagaggcagctgagaagcagtgggtggggcccgtggaactgcttcttctttcacaagactggttgggggtggggtgggcttggggcttggtgtctggtttgccttagccccggcctcctctgcctcctctccaatccaggactttcccctttccccctgccttctccttactcgggcaccccccccgtctcccaggctgccctttgcctaggagggcagctacctgtatcttctggtttctttgaccatgctagggaagaggttccattttatagaaagggaactccagtggggagggttcggccagaaatcccctaggcagggaggccactgtacctctggctttggcctattcccatagaatcctgggatttcttgcgattctctctctctgcttcctctctctgctttaagaatccgatctggacaaagacacctttttcttgtggtctaaagcttagttgtagccattggtttgacatttcctgcaggaatcaggcttaatctacagaagcagcaggaacatacttggagagaaagccaagcgcttgaaaacatcacgtttccaagagtctcctgcatctctcgcctgaggggctgaactctgtgagcacagagctggcagcctccactcccgttacccagcgggtgtccccggttttccacggtgaccctgcatcctggcccagtcctccttggctcttcactgattggcaggactgggggtggttgggacagggttgatgtctggaacctgcctgggtgagggagctacaccttgaaagcagggtgcttcttacttcaggagagcttcaggctagaggtggctatgagtcctgagaccctgacacctgaaccctagagccaggggccacgccgcacgtaggacacagcagggactggggtcagagcttttctgggaaggtcagtctggtgctgagccttcactgagcacactaagcatgcctgtggggaggcagtgagaggaggctggcctttagggagggctagagggagaggaaggaaggggtggggccaccacttcaggaggccccgcgagatttttaggagagggaaaacctgagaatatttgaagggaggaaggaggaagccacttgttagggaaagatcaaagacacaagaaagagtatgaggtaattcatggaatcagtttctggagaaggagaggagggggtttgctttggaaagaaggtctgttttgtcttccagggcggaaaggcaagaggaaatgaatgaataccatgcaactatcagctggattaaaagagctttaggggtcattgtgctcattttttcatttcttccttcactttattcttgattctctgggttgcaggtaatggaaaaccccactcaagctacgaaagggaattcaatggctttacagaaatgaaacacccagatgattggtttcaggtaaaggctgatccagctcctcaatgtgagatcattgagagtttgtgttctcaaggttggcttcagtttaaagctggctccattcatcgtgctgggcttgaagctgctctctgagaccacatagaccactaagaaaaactcagagggggatgaggaatggatggcaaggggacaccatccccagcaaacgcgccttgagatgctctatgtggcaggcctagagcaaggtctgaggatgagttgcatgtgactctttgccttccatagctcccagcatggtggggaaattgttcccttttgggagtatcaaagaaggagtgcccactgccctggggaaggaaggggcaggagactctctcaagaagggataccatttgagtggagcatcggactggcccggcggctaagagaggaaaggtgttctcagtggcagaagtggaggctgagtggtggagctgtcgaagaactcagctggttcagggcatggctggggagagtgagcctggagggaagtggcccaacagagaaggaagagaggccaggtggcaaggccaggtggggagggccttgcgtgtgcggctgaggagtttgaacttcattatggagacttgaggaagaccagaaggactcgaagctgaacagaccttgatcagaatcatgtttttctgaaaaaccattctagctttgttcttgggagacaggagtcccctgggggtacatgggtgagcttcaggtatataaacattatgtcaaactgcctttgatggggtgagggcccagtgatcccactcgattcttaaaatggtccatggtcacaaatggcaaaggacaatttctcaggctgctgtgcggctggttgcagagggccattctagaagagtggttcgctaatccaggagccaaatgggaaaggtctgaaaggcagggctcagggtgattcatccattcatccatccattcattcgcgcattaaagaaatatatatatcatatatgcattgggggggctatctgtgtaccaggcagggtggtaggctctagagatacaatcttgagtaagataaacatggttcccaccctcctagagctcacagttgagtagaagaggcagataagtagatgggcaattacaatacactggtggatgatgagcaggagctgtggagtcaagagcagggatggaaaagacaatagagggagcagtagttcaaaaccagaagctggttcaaagatctctaggagttgctacatgggcatggggccatggtttccagccaggggcacttttgtcctccagggcacgtttggcaatgtctggagatatttttgacttcacaactagtgggggcagggggtggtggttatgagagggactgaggcaccgttagaaaggttttctccccagtaaaaaggggcacaaaaggagacacatcctcatcttctgcctcttaatattatggaacaatgtaatgactggggctgtggctgccatcttgtgatcctgaggcgatcagcctgaggaagaaagccagcacacagaggacggcagaggaagtggggaggacctggttcttggtgaagctattgaggaagaaccaaccctgaagtcaccctaccaccagaggagacagcttgtgactcagggccatacattccttgtagcgtaagccatctttggttgggtcctgtgttacccacagctccaagcctccttgccggcgaatttcattctgctcctctgaaaccggttttcactgccatctgcaataaccacggctgccgtgcacaggcaccacatctaagacatcatacgtttattatttattatagcaattttcccacagatggcagtaaagtgttttgttctaataaaatcagtgtgttacagtagttttctgatagaagtaaattaccttgaggaaggggcacctttttctaattcacacaagggcacaatctagccttggtggttaaatctgtgggcgctcacccttcacgactcagctgtggctgacagcacggacgttctctgcttcttgatcaaccttctgtctgtacccagcttctgtgataccacagtcgcctggtggtcctcctctccctgtggcttggcgtccctctctgttcgtctgtgatgttccccaggtctctttccctggcgctgttctcgtattgtatggctcctaggcaccctcacctgccccactttctctgccttctacaggtgaatgaacccggaatccctcactgtagcccagtttctcccctccgctgcaggcgccttagtgtactgcttacgcactggcactatgaactcaaaccctcccactcaaagtctccatcctccaccccattataaaactcctgctctatttttccctccacccatctagtccctggagctgcacttgtgggaggcatccttgaggcctatcgcctcttactcctcatatccaacacatcaccaaatcccacaaattctgcttcttgaatctgagtcaagctacttcttttcccattaccaccatctccacttatgatcaggcccctagcaggccaacgtcattgaaacccaaatgctactgcctttggccattcctctctctcagatcttccctgcgtggttctccactgccctcaggagggaggccagccctgctcgctctccctgctcacctcttgcctttccttctgccgtgcccatctcttgggtctcagcttggccctttcctccgggtgttccccctgtcctgccctggtgcctgtctgccacactcagtcaacgcggtccctcttcggttacagggcttgttaacactccattgaaaccggcagacttgactgtcccacccccacccctggagtctgcgcctccagggctgaaatcacatctcaattcttaatgagatgtctgcttccttcactgaagggactttactaagtgtttcattgcaagttttctttaaatagccaggctctcagagccatttcaaatagggttttatgttcctaaattcagttagttctcaacatttgagaccaattcttgcagcaaggtggagaataactctcatctgtgaaagaaaagcggttcaataaagcttgataagccttttgtatccggaatactcagttccctgcctttattttgtctgctggtgtttttgagagattacacacacacacacaccattttctgctccttttccagggctgtgtggatagtccaggatggggtgatgtctgctggtgtttttgagagattacacacacacacacaccattttctgctccttttccagggctgtgtggatagtccaggatggggtgatgggagcgtggacagacagaaagggctctgagtgtagcccctgctgtccagcccacaacccctccccagtttgcctccacccccagggaactcaaacttgtctcaatcctctctccatgtgtttcataaatttaggattatgggatttccagaggagccaggtgggcatcccctgactgggacccggtgacagcccaggaaacgtttcctgctttggaaagagaactgggtgagggcaagggttcaccccgacacacgaggtcctcacacggctgcgagctattgaaatgagtgacgccaaccttcccctctcccctttccccatgtgcttttgttcctccctccagggaaaaatagctacggctcctattccctgtggcttggcccagcatggcttgcagactctgtttctctgcctttgttttggtctcggtttttcatggggtcgggggtgtgtgtgcgacagagagacagcagatgaggcagatgcagagagaaacagactcatggtgaggggcagagacagaatgacagtggcagccggggacaggaacaagaccaagaacctcacgcaatcgccggagcatttcctccacgtgctcctcatccaggcagctccggagccacaccattctgctggcgcccaggcttaccgcttgcccctgctggccggttctccctgtttccaccacccgcctagcctggagcctgcctctgcttcatactcttcggactccctcctcagactcccacctcgcattcctgtgggggatcggggcccccctggggggactttgtggagcccacttgtgtcctcattgagctcaggtctaggtaggacactcttccctttacgtcaacagaggtgttctgggatcttttctaaaggaacttgaccgagaaccaagggcaaaacaaaagagcgaaatacacaaatcactcacatgtataaagggtaatacatttttaaaatacctgctggtgtattttgcctctttgtgatctgtttttccctctccctcccctggagcacttttaccatccgggcttactgcctgtagaagaggacgaggtcaaagatgcctcaggatacagaagacagaaagataccctgaaaccccaggaaaagtgcccctctcagctctcattggagccactggcctgggagctctcccccaaccttgcagatccagatgcagctaggaggctccgtgtggcagcagcacatcagggccaaagccttcttcagtctaaaaagggattcccagcctaacagatgcctggacagcagagatcttcctccagcctggtggttaagggcatgaagtttggaatcagtcacacagtggcccaagtcctgcccctgccactgagcgatgtgacctcgggcaagtcgtgtgacctctaggcctcagttttctcatctgaaacatgggaatgatgatggcttttccctcatcgggtgttgtgaggactacctgagatgatgcatagcaggtacttaacatatgagatctgtaatcattcacttaaacaaggagctctgtctgtcctgcgtgctggggaggaggcaagggttaaagaagacggagcagtggggagatggctccccttgttgggaggctcctccagtgtggggcgatgttgactcatttctccatctagaaagggctgggctttctccctagaaatggggagggaccgcagagaaactgcagctgccttgatgtcccggcagtgccctccacccaaccctgtctcggccatcatgtctgggctttcctttcacagctagctagcagtgtgactttggttattccacatgcggccttcaggtgtgctgtcacctcagatgatcacaatgggggaccctccagatatgtacactgaagaccccttgtatagacccactcatgcagctggttatgcccggccacactccaactcacccaggacacacccatactccctcagacccattcacagcacaggcatcaacacagcaagcacccaagtgtgctctccgcacatacatttcctctccgtgtgtgtgtgcgtgtgtgcgtgcttcacattgtcggccagaatatgctctggaaacccaagcagaaaggagcatgtgaatgtggccatcagggataaattaatcccagacatataaagggtttttttttttttttttcattctcggccctactgcaaattcaattatgactctctgccagctactgaactgaggggacaagcaagtacgtggctgagcctggaaaatgggacagggcaggggatccttctgaatccacaccctcattccgcttccctgctgtccaggatccgggagagagttgcagggattcctggattccctacaccagtcagatcatggggcagcagcaaggtgccatccaagatgtggagctaatggaagcagagctgccttctgggagctgaactaggaagggactgcgtgcgggctcagagcatagactggcaaaggcttgccgaggaggccactggtcccaggtcctggcaactcttaatggcccatgcattcacccacccagggagaaaaacgtgagtctcagacacccaccttgacaatgtccagggaagagaggcttggcttgtgactccagggcaagactttctatcccccatggctattggggtgtggccatgatatgtcccttgccctccacattcccaggcagccttctgatggtgctgtggctcccggtacaggcctgtttgcaggcggtgcatgtgtaaattatgctgatgcaagctgtgtttcccactgtgcattcacatgggggcattttggcttctatgcccctctctgagctctgctaaggagagtctgcccctttggggacacactctggacccaccttcctcagacccacacagtcaggggtcttagcctgcaagcatgcctaggctaggagccctcctaggtcgagaatgtccctggagaggcctgccgggggagacatgaccagcctctccttggagacgcccatctcatgggatcggggaggttgggcattcatgtccacccaggctaggaatgaggtgcatctcctgtcagacctaggagcagtcctctgtgacatagctgcctcctcctcttcttccagaggggagggccgcgatggggagtcagttactttaagggaatcccttacggtctttgaattgggcttgattgcataagaatgcccagaggaggccaggtggaagccagttttgaaagaggagagacgaattggaggagattcgatttgctgttgtttctcaggtggtggtgaggtggtgtgagtggtcagtcggggtgtctgaggctgggaggaaggagagtgatggagaaatttggtcctggtaggggagccgaggcccccaggggaaagcccccacaggaagcggtcccttggagagaagtccagggcctggaggagcaggcctcagactggaagcgggggctctgccgctccctggggtcctctggggcctccttaagtaacctaggcctggccaaggagagctgggttttcacagtaagactcaggctgccagaagaatgaaaagaatgggcctgagggagcacctccgccatggatgggaggagggaggaggacagggaaggagcagaggcccgtgtgtgttgtgggcagccgcaccagccctgggtcagcatccagtctgccttccctggggtctctgcatggcagaggctccacaccctgtatagtcaggctgcttcaggtgcctgggactcacatcccaccaggccaggctcccgggccctcacccaggacgagccctcctctccacccctttccttttccctcctatctgcaccaggtaagggagctttggagaggagggaggagcaggagcagggtgctccccagaagctagcccttcccccaccccccagagatggctcattcagggctgaggatgaagtttgagactggcccgcctccaggctggtcagagagggagccccagctaccgagtgccaactatgtgtcaggcactgtgctaggcacgatgccacctttagtcctcacctgtgagagatagctattatgagccccattttagagatgagaaaagtgagtctcagggaggtcacgcagctgttaacgaaaggcaaccccagccacgtggactcaaaatgtttgcttttcgtgctaccccacctcctgactctgcccccagcacagtcaccccgccccaaccaatctcacatctgctgacttccaggctggatccagaactcccaccaggtgggtaggggtgggacgcaggaggcaggtgggggccattgtgtagaggtagtgttggcactgtgaagcttgcagttttttcattcactcaacaaatacttactgaacaacacctgtgcccaggctctgttctaagcacaaacttcttgcccttgtaaaagctcctggtcagggagtcagatgagaaacaatttcaagcggtgataagggagcattaggaggaaaaataaagccaggtgaggagataaataaacaaatcactacgatgggaactaaacgaatgagcctttttagatgggagaggggagaagccttctggaaatgtgaagcagaagcagaaacctggctgaaggacaaaagtgagccatgcaaaacctgggggacagcatcgcagtggggggcgcagcaattgccaagggcctgaggcaggactgagcttggcttgactgtgtttgtactgcctggaagtggggccttcagccctctgtggctcatcggaaactttgggccagggaaggtgtttctgctcattcctatctgctccctgcttggctctttctaggaccaaagcgggtgtctttaacccctctaggctgagctggcaagacaagtacagagcccccttggccgtctttttcccgtggttggccacctggcccccggcctgggcttgggaaatgcttccggagttcacactcctcactgcccactctgaaccccgctggcgatcagggcagcacactatttccagatgggcatgggagactgttttatttttaaaaatagcttttgttggtttttgtcttattacaaaagt

SEQ ID NO: 67 - DNA, 6585 bp, Homo sapiens
atgctgtgctgcctgctggtgagggccagcaacctccccagtgcgaagaaggaccggcgcagcgaccctgtcgcaagcctgactttccgaggggtgaagaagagaaccaaagtcatcaagaacagcgtgaaccctgtatggaatgagggatttgaatgggacctcaagggcatccccctggaccagggctctgagcttcatgtggtggtcaaagaccatgagacgatggggaggaacaggttcctgggggaagccaaggtcccactccgagaggtcctcgccacccctagtctgtccgccagcttcaatgcccccctgctggacaccaagaagcagcccacaggggcctcgctggtcctgcaggtgtcctacacaccgctgcctggagctgtgcccctgttcccgccccctactcctctggagccctccccgactctgcctgacctggatgtagtggcagacacaggaggagaggaagacacagaggaccagggactcactggagatgaggcggagccattcctggatcaaagcggaggcccgggggctcccaccaccccaaggaaactaccttcacgtcctccgccccactaccccgggatcaaaagaaagcgaagtgcgcctacatctagaaagctgctgtcagacaaaccgcaggatttccagatcagggtccaggtgatcgaggggcgccagctgccgggggtgaacatcaagcctgtggtcaaggttaccgctgcagggcagaccaagcggacgcggatccacaagggaaacagcccactcttcaatgagactcttttcttcaacttgtttgactctcctggggagctgtttgatgagcccatctttatcacggtggtagactctcgttctctcaggacagatgctctcctcggggagttccggatggacgtgggcaccatttacagagagccccggcacgcctatctcaggaagtggctgctgctctcagaccctgatgacttctctgctggggccagaggctacctgaaaacaagcctttgtgtgctggggcctggggacgaagcgcctctggagagaaaagacccctctgaagacaaggaggacattgaaagcaacctgctccggcccacaggcgtagccctgcgaggagcccacttctgcctgaaggtcttccgggccgaggacttgccgcagatggacgatgccgtgatggacaacgtgaaacagatctttggcttcgagagtaacaagaagaacttggtggacccctttgtggaggtcagctttgcggggaaaatgctgtgcagcaagatcttggagaagacggccaaccctcagtggaaccagaacatcacactgcctgccatgtttccctccatgtgcgaaaaaatgaggattcgtatcatagactgggaccgcctgactcacaatgacatcgtggctaccacctacctgagtatgtcgaaaatctctgcccctggaggagaaatagaagaggagcctgcaggtgctgtcaagccttcgaaagcctcagacttggatgactacctgggcttcctccccacttttgggccctgctacatcaacctctatggcagtcccagagagttcacaggcttcccagacccctacacagagctcaacacaggcaagggggaaggtgtggcttatcgtggccggcttctgctctccctggagaccaagctggtggagcacagtgaacagaaggtggaggaccttcctgcggatgacatcctccgggtggagaagtaccttaggaggcgcaagtactccctgtttgcggccttctactcagccaccatgctgcaggatgtggatgatgccatccagtttgaggtcagcatcgggaactacgggaacaagttcgacatgacctgcctgccgctggcctccaccactcagtacagccgtgcagtctttgacgggtgccactactactacctaccctggggtaacgtgaaacctgtggtggtgctgtcatcctactgggaggacatcagccatagaatcgagactcagaaccagctgcttgggattgctgaccggctggaagctggcctggagcaggtccacctggccctgaaggcgcagtgctccacggaggacgtggactcgctggtggctcagctgacggatgagctcatcgcaggctgcagccagcctctgggtgacatccatgagacaccctctgccacccacctggaccagtacctgtaccagctgcgcacccatcacctgagccaaatcactgaggctgccctggccctgaagctcggccacagtgagctccctgcagctctggagcaggcggaggactggctcctgcgtctgcgtgccctggcagaggagccccagaacagcctgccggacatcgtcatctggatgctgcagggagacaagcgtgtggcataccagcgggtgcccgcccaccaagtcctcttctcccggcggggtgccaactactgtggcaagaattgtgggaagctacagacaatctttctgaaatatccgatggagaaggtgcctggcgcccggatgccagtgcagatacgggtcaagctgtggtttgggctctcagtggatgagaaggagttcaaccagtttgctgaggggaagctgtctgtctttgctgaaacctatgagaacgagactaagttggcccttgttgggaactggggcacaacgggcctcacctaccccaagttttctgacgtcacgggcaagatcaagctacccaaggacagcttccgcccctcggccggctggacctgggctggagattggttcgtgtgtccggagaagactctgctccatgacatggacgccggtcacctgagcttcgtggaagaggtgtttgagaaccagacccggcttcccggaggccagtggatctacatgagtgacaactacaccgatgtgaacggggagaaggtgcttcccaaggatgacattgagtgcccactgggctggaagtgggaagatgaggaatggtccacagacctcaaccgggctgtcgatgagcaaggctgggagtatagcatcaccatccccccggagcggaagccgaagcactgggtccctgctgagaagatgtactacacacaccgacggcggcgctgggtgcgcctgcgcaggagggatctcagccaaatggaagcactgaaaaggcacaggcaggcggaggcggagggcgagggctgggagtacgcctctctttttggctggaagttccacctcgagtaccgcaagacagatgccttccgccgccgccgctggcgccgtcgcatggagccactggagaagacggggcctgcagctgtgtttgcccttgagggggccctgggcggcgtgatggatgacaagagtgaagattccatgtccgtctccaccttgagcttcggtgtgaacagacccacgatttcctgcatattcgactatgggaaccgctaccatctacgctgctacatgtaccaggcccgggacctggctgcgatggacaaggactctttttctgatccctatgccatcgtctccttcctgcaccagagccagaagacggtggtggtgaagaacacccttaaccccacctgggaccagacgctcatcttctacgagatcgagatctttggcgagccggccacagttgctgagcaaccgcccagcattgtggtggagctgtacgaccatgacacttatggtgcagacgagtttatgggtcgctgcatctgtcaaccgagtctggaacggatgccacggctggcctggttcccactgacgaggggcagccagccgtcgggggagctgctggcctcttttgagctcatccagagagagaagccggccatccaccatattcctggttttgaggtgcaggagacatcaaggatcctggatgagtctgaggacacagacctgccctacccaccaccccagagggaggccaacatctacatggttcctcagaacatcaagccagcgctccagcgtaccgccatcgagatcctggcatggggcctgcggaacatgaagagttaccagctggccaacatctcctcccccagcctcgtggtagagtgtgggggccagacggtgcagtcctgtgtcatcaggaacctccggaagaaccccaactttgacatctgcaccctcttcatggaagtgatgctgcccagggaggagctctactgcccccccatcaccgtcaaggtcatcgataaccgccagtttggccgccggcctgtggtgggccagtgtaccatccgctccctggagagcttcctgtgtgacccctactcggcggagagtccatccccacagggtggcccagacgatgtgagcctactcagtcctggggaagacgtgctcatcgacattgatgacaaggagcccctcatccccatccagcttgcagacggtctgtcgagcttggcccccactaacacggcttctcctccatccagtcctcatgaggaagagttcatcgattggtggagcaaattctttgcctccataggggagagggaaaagtgcggctcctacctggagaaggattttgacaccctgaaggtctatgacacacagctggagaatgtggaggcctttgagggcctgtctgacttttgtaacaccttcaagctgtaccggggcaagacgcaggaggagacagaagatccatctgtgattggtgaatttaagggcctcttcaaaatttatcccctcccagaagacccagccatccccatgcccccaagacagttccaccagctggccgcccagggaccccaggagtgcttggtccgtatctacattgtccgagcatttggcctgcagcccaaggaccccaatggaaagtgtgatccttacatcaagatctccatagggaagaaatcagtgagtgaccaggataactacatcccctgcacgctggagcccgtatttggaaagatgttcgagctgacctgcactctgcctctggagaaggacctaaagatcactctctatgactatgacctcctctccaaggacgaaaagatcggtgagacggtcgtcgacctggagaacaggctgctgtccaagtttggggctcgctgtggactcccacagacctactgtgtctctggaccgaaccagtggcgggaccagctccgcccctcccagctcctccacctcttctgccagcagcatagagtcaaggcacctgtgtaccggacagaccgtgtaatgtttcaggataaagaatattccattgaagagatagaggctggcaggatcccaaacccacacctgggcccagtggaggagcgtctggctctgcatgtgcttcagcagcagggcctggtcccggagcacgtggagtcacggcccctctacagccccctgcagccagacatcgagcaggggaagctgcagatgtgggtcgacctatttccgaaggccctggggcggcctggacctcccttcaacatcaccccacggagagccagaaggtttttcctgcgttgtattatctggaataccagagatgtgatcctggatgacctgagcctcacgggggagaagatgagcgacatttatgtgaaaggttggatgattggctttgaagaacacaagcaaaagacagacgtgcattatcgttccctgggaggtgaaggcaacttcaactggaggttcattttccccttcgactacctgccagctgagcaagtctgtaccattgccaagaaggatgccttctggaggctggacaagactgagagcaaaatcccagcacgagtggtgttccagatctgggacaatgacaagttctcctttgatgattttctgggctccctgcagctcgatctcaaccgcatgcccaagccagccaagacagccaagaagtgctccttggaccagctggatgatgctttccacccagaatggtttgtgtccctttttgagcagaaaacagtgaagggctggtggccctgtgtagcagaagagggtgagaagaaaatactggcgggcaagctggaaatgaccttggagattgtagcagagagtgagcatgaggagcggcctgctggccagggccgggatgagcccaacatgaaccctaagcttgaggacccaaggcgccccgacacctccttcctgtggtttacctccccatacaagaccatgaagttcatcctgtggcggcgtttccggtgggccatcatcctcttcatcatcctcttcatcctgctgctgttcctggccatcttcatctacgccttcccgaactatgctgccatgaagctggtgaagcccttcagctgaggactctcctgccctgtagaaggggccgtggggtcccctccagcatgggactggcctgcctcctccgcccagctcggcgagctcctccagacctcctaggcctgattgtcctgccagggtgggcagacagacagatggaccggcccacactcccagagttgctaacatggagctctgagatcaccccacttccatcatttccttctcccccaacccaacgcttttttggatcagctcagacatatttcagtataaaacagttggaaccacacagca

SEQ ID NO: 68 - protein, 2082 aa, Homo sapiens
MLCCLLVRNLPSAKKDRRSDPVASLTFRGVKKRTKVIKNSVNPVWNEGFEWDLKGIPLDQGSELHVVVKDHETMGRNRFLGEAKVPLREVLATPSLSASFNAPLLDTKKQPTGASLVLQVSYTPLPGAVPLFPPPTPLEPSPTLPDLDVVADTGGEEDTEDQGLTGDEAEPFLDQSGGPGAPTTPRKLPSRPPPHYPGIKRKRSAPTSRKLLSDKPQDFQIRVQVIEGRQLPGVNIKPVVKVTAAGQTKRTRIHKGNSPLFNETLFFNLFDSPGELFDEPIFITVVDSRSLRTDALLGEFRMDVGTIYREPRHAYLRKWLLLSDPDDFSAGRYLKTSLCVLGPGDEAPLERKDPSEDKEDIESNLLRPTGVRGAHFCLKVFRAEDLPQMDDAVMDNVKQIFGFESNKKNLVDPFVEVSFAGKMLCSKIKTANPQWNQNITLPAMFPSMCEKMRIRIIDWDRLTHNDIVATTYLSMSKISAPGGEIEEEPAGAVKPSKASDLDDYLGFLPTFGPCYINLYGSPREFTGFPDPYTELNTGKGEGVAYRGRLLLSLETKLVEHSEQKVEDLPADDILRVEKYLRRRKYSLFAAFYSATMLQDVDDAIQFEVSIGNYGNKFDMTCLPLASTTQYSRAVFDGCHYYYLPWGNVKPVVVLSSYWEDISHRIETQNQLLGIADRLEAGLEQVHLALKAQCSTEDVDSLVAQLTDELIAGCSQPLGDIHETPSATHLDQYLYQLRTHHLSQITEAALKLGHSELPAALEQAEDWLLRLRAEEPQNSLPDIVIWMLQGDKRVAYQRVPAHQVLFSRRGANYCGKNCGKLQTIFLKYPMEKVPGARMPVQIRVKLWFGLSVDEKEFNQFAEGKLSVFAETYENETKLALVGNWGTTGLTYPKFSDVTGKIKLPKDSFRPSAGWTWAGDWFVCPEKTLLHDMDAGHLSFVEEVFENQTRLPGGQWIYMSDNYTDVNGEKVLPKDDIECPLGWKWEDEEWSTDLNRAVDEQGWEYSITIPPERKPKHWVPAEKMYYTRRRWVRLRRRDLSQMEALKRHRQAEAEGEGWEYASLFGWKFHLEYRKTDAFRRRRWRRRMEPLEKTGPAAVFALEGALGGVMDDKSEDSMSVSTLSFGVNRPTISCIFDYGNRYHLRCYMYQARDLAAMDKDSFSDPYAIVSFLHQSQKTVVVKNTLNPTWDQTLIFYEIEIFGEPATVAEQPPSIVVELYDHDTYGADEFMGRCICQPSLERMPRLAWFPLTRGSQPSGELLASFELIQREKPAIHHIPGFEVQETSRILDESEDTDLPYPPPQREANIYMVPQNIKPALQRTAIEILAWGLRNMKSYQLANISSPSLVVECGGQTVQSCVIRNLRKNPNFDICTLFMEVMLPREELYCPPITVKVIDNRQFGRRPVVGQCTIRSLESFLCDPYSAESPSPQGGPDDVSLLSPGEDVLIDIDDKEPLIPIQLADGLSSLAPTNTDPSSFEEFIDWWSKFFASIGEREKCGSYLEKDFDTLKVYDTQLENVEAFEGLSDFCNTFKLYRGKTQEETEDPSVIGEFKGLFKIYPLPEDPAIPMPPRQFHQLAAQGPQECLVRIYIVRAFGLQPKDPNGKCDPYIKISIGKKSVSDQDNYIPCTLEPVFGKMFELTCTLPLEKDLKITLYDYDLLSKDEKIGETVVDLENRLLSKFGARCGLPQTYCVSGPNQWRDQLRPSQLLHLFCQQHRVKAPVYRTDRVMFQDKEYSIEEIEAGRIPNPHLGPVEERLALHVLQQQGLVPEHVESRPKPLQPDIEQGKLQMWVDLFPKALGRPGPPFNITPRRARRFFLRCIIWNTRDVILDDLSLTGEKMSDIYVKGWMIGFEEHKQKTDVHYRSLGGEGNFNWRFIFPFDYLPAEQVCTIAKKDAFWRLDKTESKIPARVVFQIWDNDKFSFDDFLGSLQLDLNRMPKPAKTAKKCSLDQLDDAFHPEWFVSLFEQKTVKGWWPCVAEEGEKKILAGKLEMTLEIVAESEHEERPAGQGRDEPNMNPKLEDPRRPDTSFLWFTSPYKTMKFILWRRFRWAIILFIILFILLLFLAIFIYAFPNYAAMKLVKPFS

SEQ ID NO: 69 - DNA, 6891 bp, Homo sapiens
ccgccgcccagccaggtgcaaaatgccgtgtcattgggagactccgcagccggagcattagattacagctcgacggagctcgggaagggcggcgggggtggaagatgagcagaagcccctgttctcggaacgccggctgacaagcggggtgagcgcagccggggcggggacccagcctagcccactggagcagccgggggtggcccgttcccctttaagagcaactgctctaagccaggagccagagattcgagccggcctcgcccagccagccctctccagcgaggggacccacaagcggcgcctcggccctcccgacctttccgagccctctttgcgccctgggcgcacggggccctacacgcgccaagcatgctgagggtcttcatcctctatgccgagaacgtccacacacccgacaccgacatcagcgatgcctactgctccgcggtgtttgcaggggtgaagaagagaaccaaagtcatcaagaacagcgtgaaccctgtatggaatgagggatttgaatgggacctcaagggcatccccctggaccagggctctgagcttcatgtggtggtcaaagaccatgagacgatggggaggaacaggttcctgggggaagccaaggtcccactccgagaggtcctcgccacccctagtctgtccgccagcttcaatgcccccctgctggacaccaagaagcagcccacaggggcctcgctggtcctgcaggtgtcctacacaccgctgcctggagctgtgcccctgttcccgccccctactcctctggagccctccccgactctgcctgacctggatgtagtggcagacacaggaggagaggaagacacagaggaccagggactcactggagatgaggcggagccattcctggatcaaagcggaggcccgggggctcccaccaccccaaggaaactaccttcacgtcctccgccccactaccccgggatcaaaagaaagcgaagtgcgcctacatctagaaagctgctgtcagacaaaccgcaggatttccagatcagggtccaggtgatcgaggggcgccagctgccgggggtgaacatcaagcctgtggtcaaggttaccgctgcagggcagaccaagcggacgcggatccacaagggaaacagcccactcttcaatgagactcttttcttcaacttgtttgactctcctggggagctgtttgatgagcccatctttatcacggtggtagactctcgttctctcaggacagatgctctcctcggggagttccggatggacgtgggcaccatttacagagagccccggcacgcctatctcaggaagtggctgctgctctcagaccctgatgacttctctgctggggccagaggctacctgaaaacaagcctttgtgtgctggggcctggggacgaagcgcctctggagagaaaagacccctctgaagacaaggaggacattgaaagcaacctgctccggcccacaggcgtagccctgcgaggagcccacttctgcctgaaggtcttccgggccgaggacttgccgcagatggacgatgccgtgatggacaacgtgaaacagatctttggcttcgagagtaacaagaagaacttggtggacccctttgtggaggtcagctttgcggggaaaatgctgtgcagcaagatcttggagaagacggccaaccctcagtggaaccagaacatcacactgcctgccatgtttccctccatgtgcgaaaaaatgaggattcgtatcatagactgggaccgcctgactcacaatgacatcgtggctaccacctacctgagtatgtcgaaaatctctgcccctggaggagaaatagaagaggagcctgcaggtgctgtcaagccttcgaaagcctcagacttggatgactacctgggcttcctccccacttttgggccctgctacatcaacctctatggcagtcccagagagttcacaggcttcccagacccctacacagagctcaacacaggcaagggggaaggtgtggcttatcgtggccggcttctgctctccctggagaccaagctggtggagcacagtgaacagaaggtggaggaccttcctgcggatgacatcctccgggtggagaagtaccttaggaggcgcaagtactccctgtttgcggccttctactcagccaccatgctgcaggatgtggatgatgccatccagtttgaggtcagcatcgggaactacgggaacaagttcgacatgacctgcctgccgctggcctccaccactcagtacagccgtgcagtctttgacgggtgccactactactacctaccctggggtaacgtgaaacctgtggtggtgctgtcatcctactgggaggacatcagccatagaatcgagactcagaaccagctgcttgggattgctgaccggctggaagctggcctggagcaggtccacctggccctgaaggcgcagtgctccacggaggacgtggactcgctggtggctcagctgacggatgagctcatcgcaggctgcagccagcctctgggtgacatccatgagacaccctctgccacccacctggaccagtacctgtaccagctgcgcacccatcacctgagccaaatcactgaggctgccctggccctgaagctcggccacagtgagctccctgcagctctggagcaggcggaggactggctcctgcgtctgcgtgccctggcagaggagccccagaacagcctgccggacatcgtcatctggatgctgcagggagacaagcgtgtggcataccagcgggtgcccgcccaccaagtcctcttctcccggcggggtgccaactactgtggcaagaattgtgggaagctacagacaatctttctgaaatatccgatggagaaggtgcctggcgcccggatgccagtgcagatacgggtcaagctgtggtttgggctctcagtggatgagaaggagttcaaccagtttgctgaggggaagctgtctgtctttgctgaaacctatgagaacgagactaagttggcccttgttgggaactggggcacaacgggcctcacctaccccaagttttctgacgtcacgggcaagatcaagctacccaaggacagcttccgcccctcggccggctggacctgggctggagattggttcgtgtgtccggagaagactctgctccatgacatggacgccggtcacctgagcttcgtggaagaggtgtttgagaaccagacccggcttcccggaggccagtggatctacatgagtgacaactacaccgatgtgaacggggagaaggtgcttcccaaggatgacattgagtgcccactgggctggaagtgggaagatgaggaatggtccacagacctcaaccgggctgtcgatgagcaaggctgggagtatagcatcaccatccccccggagcggaagccgaagcactgggtccctgctgagaagatgtactacacacaccgacggcggcgctgggtgcgcctgcgcaggagggatctcagccaaatggaagcactgaaaaggcacaggcaggcggaggcggagggcgagggctgggagtacgcctctctttttggctggaagttccacctcgagtaccgcaagacagatgccttccgccgccgccgctggcgccgtcgcatggagccactggagaagacggggcctgcagctgtgtttgcccttgagggggccctgggcggcgtgatggatgacaagagtgaagattccatgtccgtctccaccttgagcttcggtgtgaacagacccacgatttcctgcatattcgactatgggaaccgctaccatctacgctgctacatgtaccaggcccgggacctggctgcgatggacaaggactctttttctgatccctatgccatcgtctccttcctgcaccagagccagaagacggtggtggtgaagaacacccttaaccccacctgggaccagacgctcatcttctacgagatcgagatctttggcgagccggccacagttgctgagcaaccgcccagcattgtggtggagctgtacgaccatgacacttatggtgcagacgagtttatgggtcgctgcatctgtcaaccgagtctggaacggatgccacggctggcctggttcccactgacgaggggcagccagccgtcgggggagctgctggcctcttttgagctcatccagagagagaagccggccatccaccatattcctggttttgaggtgcaggagacatcaaggatcctggatgagtctgaggacacagacctgccctacccaccaccccagagggaggccaacatctacatggttcctcagaacatcaagccagcgctccagcgtaccgccatcgagatcctggcatggggcctgcggaacatgaagagttaccagctggccaacatctcctcccccagcctcgtggtagagtgtgggggccagacggtgcagtcctgtgtcatcaggaacctccggaagaaccccaactttgacatctgcaccctcttcatggaagtgatgctgcccagggaggagctctactgcccccccatcaccgtcaaggtcatcgataaccgccagtttggccgccggcctgtggtgggccagtgtaccatccgctccctggagagcttcctgtgtgacccctactcggcggagagtccatccccacagggtggcccagacgatgtgagcctactcagtcctggggaagacgtgctcatcgacattgatgacaaggagcccctcatccccatccaggaggaagagttcatcgattggtggagcaaattctttgcctccataggggagagggaaaagtgcggctcctacctggagaaggattttgacaccctgaaggtctatgacacacagctggagaatgtggaggcctttgagggcctgtctgacttttgtaacaccttcaagctgtaccggggcaagacgcaggaggagacagaagatccatctgtgattggtgaatttaagggcctcttcaaaatttatcccctcccagaagacccagccatccccatgcccccaagacagttccaccagctggccgcccagggaccccaggagtgcttggtccgtatctacattgtccgagcatttggcctgcagcccaaggaccccaatggaaagtgtgatccttacatcaagatctccatagggaagaaatcagtgagtgaccaggataactacatcccctgcacgctggagcccgtatttggaaagatgttcgagctgacctgcactctgcctctggagaaggacctaaagatcactctctatgactatgacctcctctccaaggacgaaaagatcggtgagacggtcgtcgacctggagaacaggctgctgtccaagtttggggctcgctgtggactcccacagacctactgtgtctctggaccgaaccagtggcgggaccagctccgcccctcccagctcctccacctcttctgccagcagcatagagtcaaggcacctgtgtaccggacagaccgtgtaatgtttcaggataaagaatattccattgaagagatagaggctggcaggatcccaaacccacacctgggcccagtggaggagcgtctggctctgcatgtgcttcagcagcagggcctggtcccggagcacgtggagtcacggcccctctacagccccctgcagccagacatcgagcaggggaagctgcagatgtgggtcgacctatttccgaaggccctggggcggcctggacctcccttcaacatcaccccacggagagccagaaggtttttcctgcgttgtattatctggaataccagagatgtgatcctggatgacctgagcctcacgggggagaagatgagcgacatttatgtgaaaggttggatgattggctttgaagaacacaagcaaaagacagacgtgcattatcgttccctgggaggtgaaggcaacttcaactggaggttcattttccccttcgactacctgccagctgagcaagtctgtaccattgccaagaaggatgccttctggaggctggacaagactgagagcaaaatcccagcacgagtggtgttccagatctgggacaatgacaagttctcctttgatgattttctgggctccctgcagctcgatctcaaccgcatgcccaagccagccaagacagccaagaagtgctccttggaccagctggatgatgctttccacccagaatggtttgtgtccctttttgagcagaaaacagtgaagggctggtggccctgtgtagcagaagagggtgagaagaaaatactggcgggcaagctggaaatgaccttggagattgtagcagagagtgagcatgaggagcggcctgctggccagggccgggatgagcccaacatgaaccctaagcttgaggacccaaggcgccccgacacctccttcctgtggtttacctccccatacaagaccatgaagttcatcctgtggcggcgtttccggtgggccatcatcctcttcatcatcctcttcatcctgctgctgttcctggccatcttcatctacgccttcccgaactatgctgccatgaagctggtgaagcccttcagctgaggactctcctgccctgtagaaggggccgtggggtcccctccagcatgggactggcctgcctcctccgcccagctcggcgagctcctccagacctcctaggcctgattgtcctgccagggtgggcagacagacagatggaccggcccacactcccagagttgctaacatggagctctgagatcaccccacttccatcatttccttctcccccaacccaacgcttttttggatcagctcagacatatttcagtataaaacagttggaaccacacagca

SEQ ID NO: 70 - protein, 2066 aa, Homo sapiens
MLRVFILYAENVHTPDTDISDAYCSAVFAGVKKRTKVIKNSVNPVWNEGFEWDLKGIPLDQGSELHVVVKDHETMGRNRFLGEAKVPLREVLATPSLSASFNAPLLDTKKQPTGASLVLQVSYTPLPGAVPLFPPPTPLEPSPTLPDLDVVADTGGEEDTEDQGLTGDEAEPFLDQSGGPGAPTTPRKLPSRPPPHYPGIKRKRSAPTSRKLLSDKPQDFQIRVQVIEGRQLPGVNIKPVVKVTAAGQTKRTRIHKGNSPLFNETLFFNLFDSPGELFDEPIFITVVDSRSLRTDALLGEFRMDVGTIYREPRHAYLRKWLLLSDPDDFSAGRYLKTSLCVLGPGDEAPLERKDPSEDKEDIESNLLRPTGVRGAHFCLKVFRAEDLPQMDDAVMDNVKQIFGFESNKKNLVDPFVEVSFAGKMLCSKIKTANPQWNQNITLPAMFPSMCEKMRIRIIDWDRLTHNDIVATTYLSMSKISAPGGEIEEEPAGAVKPSKASDLDDYLGFLPTFGPCYINLYGSPREFTGFPDPYTELNTGKGEGVAYRGRLLLSLETKLVEHSEQKVEDLPADDILRVEKYLRRRKYSLFAAFYSATMLQDVDDAIQFEVSIGNYGNKFDMTCLPLASTTQYSRAVFDGCHYYYLPWGNVKPVVVLSSYWEDISHRIETQNQLLGIADRLEAGLEQVHLALKAQCSTEDVDSLVAQLTDELIAGCSQPLGDIHETPSATHLDQYLYQLRTHHLSQITEAALKLGHSELPAALEQAEDWLLRLRAEEPQNSLPDIVIWMLQGDKRVAYQRVPAHQVLFSRRGANYCGKNCGKLQTIFLKYPMEKVPGARMPVQIRVKLWFGLSVDEKEFNQFAEGKLSVFAETYENETKLALVGNWGTTGLTYPKFSDVTGKIKLPKDSFRPSAGWTWAGDWFVCPEKTLLHDMDAGHLSFVEEVFENQTRLPGGQWIYMSDNYTDVNGEKVLPKDDIECPLGWKWEDEEWSTDLNRAVDEQGWEYSITIPPERKPKHWVPAEKMYYTRRRWVRLRRRDLSQMEALKRHRQAEAEGEGWEYASLFGWKFHLEYRKTDAFRRRRWRRRMEPLEKTGPAAVFALEGALGGVMDDKSEDSMSVSTLSFGVNRPTISCIFDYGNRYHLRCYMYQARDLAAMDKDSFSDPYAIVSFLHQSQKTVVVKNTLNPTWDQTLIFYEIEIFGEPATVAEQPPSIVVELYDHDTYGADEFMGRCICQPSLERMPRLAWFPLTRGSQPSGELLASFELIQREKPAIHHIPGFEVQETSRILDESEDTDLPYPPPQREANIYMVPQNIKPALQRTAIEILAWGLRNMKSYQLANISSPSLVVECGGQTVQSCVIRNLRKNPNFDICTLFMEVMLPREELYCPPITVKVIDNRQFGRRPVVGQCTIRSLESFLCDPYSAESPSPQGGPDDVSLLSPGEDVLIDIDDKEPLIPIQEEEFIDWWSKFFASIGEREKCGSYLEKDFDTLKVYDTQLENVEAFEGLSDFCNTFKLYRGKTQEETEDPSVIGEFKGLFKIYPLPEDPAIPMPPRQFHQLAAQGPQECLVRIYIVRAFGLQPKDPNGKCDPYIKISIGKKSVSDQDNYIPCTLEPVFGKMFELTCTLPLEKDLKITLYDYDLLSKDEKIGETVVDLENRLLSKFGARCGLPQTYCVSGPNQWRDQLRPSQLLHLFCQQHRVKAPVYRTDRVMFQDKEYSIEEIEAGRIPNPHLGPVEERLALHVLQQQGLVPEHVESRPKPLQPDIEQGKLQMWVDLFPKALGRPGPPFNITPRRARRFFLRCIIWNTRDVILDDLSLTGEKMSDIYVKGWMIGFEEHKQKTDVHYRSLGGEGNFNWRFIFPFDYLPAEQVCTIAKKDAFWRLDKTESKIPARVVFQIWDNDKFSFDDFLGSLQLDLNRMPKPAKTAKKCSLDQLDDAFHPEWFVSLFEQKTVKGWWPCVAEEGEKKILAGKLEMTLEIVAESEHEERPAGQGRDEPNMNPKLEDPRRPDTSFLWFTSPYKTMKFILWRRFRWAIILFIILFILLLFLAIFIYAFPNYAAMKLVKPFS

SEQ ID NO: 71 - DNA, 6237 bp, Homo sapiens
ccgccgcccagccaggtgcaaaatgccgtgtcattgggagactccgcagccggagcattagattacagctcgacggagctcgggaagggcggcgggggtggaagatgagcagaagcccctgttctcggaacgccggctgacaagcggggtgagcgcagccggggcggggacccagcctagcccactggagcagccgggggtggcccgttcccctttaagagcaactgctctaagccaggagccagagattcgagccggcctcgcccagccagccctctccagcgaggggacccacaagcggcgcctcggccctcccgacctttccgagccctctttgcgccctgggcgcacggggccctacacgcgccaagcatgctgagggtcttcatcctctatgccgagaacgtccacacacccgacaccgacatcagcgatgcctactgctccgcggtgtttgcaggggtgaagaagagaaccaaagtcatcaagaacagcgtgaaccctgtatggaatgagggatttgaatgggacctcaagggcatccccctggaccagggctctgagcttcatgtggtggtcaaagaccatgagacgatggggaggaacaggttcctgggggaagccaaggtcccactccgagaggtcctcgccacccctagtctgtccgccagcttcaatgcccccctgctggacaccaagaagcagcccacaggggcctcgctggtcctgcaggtgtcctacacaccgctgcctggagctgtgcccctgttcccgccccctactcctctggagccctccccgactctgcctgacctggatgtagtggcagacacaggaggagaggaagacacagaggaccagggactcactggagatgaggcggagccattcctggatcaaagcggaggcccgggggctcccaccaccccaaggaaactaccttcacgtcctccgccccactaccccgggatcaaaagaaagcgaagtgcgcctacatctagaaagctgctgtcagacaaaccgcaggatttccagatcagggtccaggtgatcgaggggcgccagctgccgggggtgaacatcaagcctgtggtcaaggttaccgctgcagggcagaccaagcggacgcggatccacaagggaaacagcccactcttcaatgagactcttttcttcaacttgtttgactctcctggggagctgtttgatgagcccatctttatcacggtggtagactctcgttctctcaggacagatgctctcctcggggagttccggatggacgtgggcaccatttacagagagccccggcacgcctatctcaggaagtggctgctgctctcagaccctgatgacttctctgctggggccagaggctacctgaaaacaagcctttgtgtgctggggcctggggacgaagcgcctctggagagaaaagacccctctgaagacaaggaggacattgaaagcaacctgctccggcccacaggcgtagccctgcgaggagcccacttctgcctgaaggtcttccgggccgaggacttgccgcagatggacgatgccgtgatggacaacgtgaaacagatctttggcttcgagagtaacaagaagaacttggtggacccctttgtggaggtcagctttgcggggaaaatgctgtgcagcaagatcttggagaagacggccaaccctcagtggaaccagaacatcacactgcctgccatgtttccctccatgtgcgaaaaaatgaggattcgtatcatagactgggaccgcctgactcacaatgacatcgtggctaccacctacctgagtatgtcgaaaatctctgcccctggaggagaaatagaagtggatgactacctgggcttcctccccacttttgggccctgctacatcaacctctatggcagtcccagagagttcacaggcttcccagacccctacacagagctcaacacaggcaagggggaaggtgtggcttatcgtggccggcttctgctctccctggagaccaagctggtggagcacagtgaacagaaggtggaggaccttcctgcggatgacatcctccgggtggagaagtaccttaggaggcgcaagtactccctgtttgcggccttctactcagccaccatgctgcaggatgtggatgatgccatccagtttgaggtcagcatcgggaactacgggaacaagttcgacatgacctgcctgccgctggcctccaccactcagtacagccgtgcagtctttgacgggtgccactactactacctaccctggggtaacgtgaaacctgtggtggtgctgtcatcctactgggaggacatcagccatagaatcgagactcagaaccagctgcttgggattgctgaccggctggaagctggcctggagcaggtccacctggccctgaaggcgcagtgctccacggaggacgtggactcgctggtggctcagctgacggatgagctcatcgcaggctgcagccagcctctgggtgacatccatgagacaccctctgccacccacctggaccagtacctgtaccagctgcgcacccatcacctgagccaaatcactgaggctgccctggccctgaagctcggccacagtgagctccctgcagctctggagcaggcggaggactggctcctgcgtctgcgtgccctggcagaggagccccagaacagcctgccggacatcgtcatctggatgctgcagggagacaagcgtgtggcataccagcgggtgcccgcccaccaagtcctcttctcccggcggggtgccaactactgtggcaagaattgtgggaagctacagacaatctttctgaaatatccgatggagaaggtgcctggcgcccggatgccagtgcagatacgggtcaagctgtggtttgggctctcagtggatgagaaggagttcaaccagtttgctgaggggaagctgtctgtctttgctgaaacctatgagaacgagactaagttggcccttgttgggaactggggcacaacgggcctcacctaccccaagttttctgacgtcacgggcaagatcaagctacccaaggacagcttccgcccctcggccggctggacctgggctggagattggttcgtgtgtccggagaagactctgctccatgacatggacgccggtcacctgagcttcgtggaagaggtgtttgagaaccagacccggcttcccggaggccagtggatctacatgagtgacaactacaccgatgtgaacggggagaaggtgcttcccaaggatgacattgagtgcccactgggctggaagtgggaagatgaggaatggtccacagacctcaaccgggctgtcgatgagcaaggctgggagtatagcatcaccatccccccggagcggaagccgaagcactgggtccctgctgagaagatgtactacacacaccgacggcggcgctgggtgcgcctgcgcaggagggatctcagccaaatggaagcactgaaaaggcacaggcaggcggaggcggagggcgagggctgggagtacgcctctctttttggctggaagttccacctcgagtaccgcaagacagatgccttccgccgccgccgctggcgccgtcgcatggagccactggagaagacggggcctgcagctgtgtttgcccttgagggggccctgggcggcgtgatggatgacaagagtgaagattccatgtccgtctccaccttgagcttcggtgtgaacagacccacgatttcctgcatattcgactatgggaaccgctaccatctacgctgctacatgtaccaggcccgggacctggctgcgatggacaaggactctttttctgatccctatgccatcgtctccttcctgcaccagagccagaagacggtggtggtgaagaacacccttaaccccacctgggaccagacgctcatcttctacgagatcgagatctttggcgagccggccacagttgctgagcaaccgcccagcattgtggtggagctgtacgaccatgacacttatggtgcagacgagtttatgggtcgctgcatctgtcaaccgagtctggaacggatgccacggctggcctggttcccactgacgaggggcagccagccgtcgggggagctgctggcctcttttgagctcatccagagagagaagccggccatccaccatattcctggttttgaggtgcaggagacatcaaggatcctggatgagtctgaggacacagacctgccctacccaccaccccagagggaggccaacatctacatggttcctcagaacatcaagccagcgctccagcgtaccgccatcgagatcctggcatggggcctgcggaacatgaagagttaccagctggccaacatctcctcccccagcctcgtggtagagtgtgggggccagacggtgcagtcctgtgtcatcaggaacctccggaagaaccccaactttgacatctgcaccctcttcatggaagtgatgctgcccagggaggagctctactgcccccccatcaccgtcaaggtcatcgataaccgccagtttggccgccggcctgtggtgggccagtgtaccatccgctccctggagagcttcctgtgtgacccctactcggcggagagtccatccccacagggtggcccagacgatgtgagcctactcagtcctggggaagacgtgctcatcgacattgatgacaaggagcccctcatccccatccaggaggaagagttcatcgattggtggagcaaattctttgcctccataggggagagggaaaagtgcggctcctacctggagaaggattttgacaccctgaaggtctatgacacacagctggagaatgtggaggcctttgagggcctgtctgacttttgtaacaccttcaagctgtaccggggcaagacgcaggaggagacagaagatccatctgtgattggtgaatttaagggcctcttcaaaatttatcccctcccagaagacccagccatccccatgcccccaagacagttccaccagctggccgcccagggaccccaggagtgcttggtccgtatctacattgtccgagcatttggcctgcagcccaaggaccccaatggaaagtgtgatccttacatcaagatctccatagggaagaaatcagtgagtgaccaggataactacatcccctgcacgctggagcccgtatttggaaagatgttcgagctgacctgcactctgcctctggagaaggacctaaagatcactctctatgactatgacctcctctccaaggacgaaaagatcggtgagacggtcgtcgacctggagaacaggctgctgtccaagtttggggctcgctgtggactcccacagacctactgtgtctctggaccgaaccagtggcgggaccagctccgcccctcccagctcctccacctcttctgccagcagcatagagtcaaggcacctgtgtaccggacagaccgtgtaatgtttcaggataaagaatattccattgaagagatagaggctggcaggatcccaaacccacacctgggcccagtggaggagcgtctggctctgcatgtgcttcagcagcagggcctggtcccggagcacgtggagtcacggcccctctacagccccctgcagccagacatcgagcaggggaagctgcagatgtgggtcgacctatttccgaaggccctggggcggcctggacctcccttcaacatcaccccacggagagccagaaggtttttcctgcgttgtattatctggaataccagagatgtgatcctggatgacctgagcctcacgggggagaagatgagcgacatttatgtgaaaggttggatgattggctttgaagaacacaagcaaaagacagacgtgcattatcgttccctgggaggtgaaggcaacttcaactggaggttcattttccccttcgactacctgccagctgagcaagtctgtaccattgccaagaaggatgccttctggaggctggacaagactgagagcaaaatcccagcacgagtggtgttccagatctgggacaatgacaagttctcctttgatgattttctgggctccctgcagctcgatctcaaccgcatgcccaagccagccaagacagccaagaaacctcctaggcctgattgtcctgccagggtgggcagacagacagatggaccggcccacactcccagagttgctaacatggagctc

SEQ ID NO: 72 - protein, 1941 aa, Homo sapiens
MLRVFILYAENVHTPDTDISDAYCSAVFAGVKKRTKVIKNSVNPVWNEGFEWDLKGIPLDQGSELHVVVKDHETMGRNRFLGEAKVPLREVLATPSLSASFNAPLLDTKKQPTGASLVLQVSYTPLPGAVPLFPPPTPLEPSPTLPDLDVVADTGGEEDTEDQGLTGDEAEPFLDQSGGPGAPTTPRKLPSRPPPHYPGIKRKRSAPTSRKLLSDKPQDFQIRVQVIEGRQLPGVNIKPVVKVTAAGQTKRTRIHKGNSPLFNETLFFNLFDSPGELFDEPIFITVVDSRSLRTDALLGEFRMDVGTIYREPRHAYLRKWLLLSDPDDFSAGRYLKTSLCVLGPGDEAPLERKDPSEDKEDIESNLLRPTGVRGAHFCLKVFRAEDLPQMDDAVMDNVKQIFGFESNKKNLVDPFVEVSFAGKMLCSKIKTANPQWNQNITLPAMFPSMCEKMRIRIIDWDRLTHNDIVATTYLSMSKISAPGGEIEVDDYLGFLPTFGPCYINLYGSPREFTGFPDPYTELNTGKGEGVAYRGRLLLSLETKLVEHSEQKVEDLPADDILRVEKYLRRRKYSLFAAFYSATMLQDVDDAIQFEVSIGNYGNKFDMTCLPLASTTQYSRAVFDGCHYYYLPWGNVKPVVVLSSYWEDISHRIETQNQLLGIADRLEAGLEQVHLALKAQCSTEDVDSLVAQLTDELIAGCSQPLGDIHETPSATHLDQYLYQLRTHHLSQITEAALKLGHSELPAALEQAEDWLLRLRAEEPQNSLPDIVIWMLQGDKRVAYQRVPAHQVLFSRRGANYCGKNCGKLQTIFLKYPMEKVPGARMPVQIRVKLWFGLSVDEKEFNQFAEGKLSVFAETYENETKLALVGNWGTTGLTYPKFSDVTGKIKLPKDSFRPSAGWTWAGDWFVCPEKTLLHDMDAGHLSFVEEVFENQTRLPGGQWIYMSDNYTDVNGEKVLPKDDIECPLGWKWEDEEWSTDLNRAVDEQGWEYSITIPPERKPKHWVPAEKMYYTRRRWVRLRRRDLSQMEALKRHRQAEAEGEGWEYASLFGWKFHLEYRKTDAFRRRRWRRRMEPLEKTGPAAVFALEGALGGVMDDKSEDSMSVSTLSFGVNRPTISCIFDYGNRYHLRCYMYQARDLAAMDKDSFSDPYAIVSFLHQSQKTVVVKNTLNPTWDQTLIFYEIEIFGEPATVAEQPPSIVVELYDHDTYGADEFMGRCICQPSLERMPRLAWFPLTRGSQPSGELLASFELIQREKPAIHHIPGFEVQETSRILDESEDTDLPYPPPQREANIYMVPQNIKPALQRTAIEILAWGLRNMKSYQLANISSPSLVVECGGQTVQSCVIRNLRKNPNFDICTLFMEVMLPREELYCPPITVKVIDNRQFGRRPVVGQCTIRSLESFLCDPYSAESPSPQGGPDDVSLLSPGEDVLIDIDDKEPLIPIQEEEFIDWWSKFFASIGEREKCGSYLEKDFDTLKVYDTQLENVEAFEGLSDFCNTFKLYRGKTQEETEDPSVIGEFKGLFKIYPLPEDPAIPMPPRQFHQLAAQGPQECLVRIYIVRAFGLQPKDPNGKCDPYIKISIGKKSVSDQDNYIPCTLEPVFGKMFELTCTLPLEKDLKITLYDYDLLSKDEKIGETVVDLENRLLSKFGARCGLPQTYCVSGPNQWRDQLRPSQLLHLFCQQHRVKAPVYRTDRVMFQDKEYSIEEIEAGRIPNPHLGPVEERLALHVLQQQGLVPEHVESRPKPLQPDIEQGKLQMWVDLFPKALGRPGPPFNITPRRARRFFLRCIIWNTRDVILDDLSLTGEKMSDIYVKGWMIGFEEHKQKTDVHYRSLGGEGNFNWRFIFPFDYLPAEQVCTIAKKDAFWRLDKTESKIPARVVFQIWDNDKFSFDDFLGSLQLDLNRMPKPAKTAKKPPRPDCPARVGRQTDGPAHTPRVANMEL

SEQ ID NO: 73 - DNA, 24575 bp, Mus musculus
ttttcaatatggtgctcaaagtactatctagagcaagaagggaattaaagagatgcaaatagccaaagaaatcaaactcgccctatttgatatgatactatacattagacatcccaaaaattctaccagaaaacttctagaaatgggaaacaaattcaacagtgtggcaagatacataatcagcttccacaaaccaaagcactatcaagaaatacatagaggaggagatcatggacatatacccattcatatggccttaaagaaaataaaatatttaggaatgaatctaaaggaagtgcagaacctttacagtgaaaatgttaaacatgtgaagaaagagataaagacacaggagctgaaggggagggcaaccccacaggaagaccagcagtctcaactaacccagacccctggaagctcccagagactgagccaacaaccaggcagcaaacacagactagtccaagacaccggcacatacatagcagaggactgcctggtctggcctcagtggcctcagatatgactaagccttgacacctcagggaagagggatgcagagagcaggagggggcaccctctcagaggcaagggggaaggggaatgacatgaggaactgtgggaggggggatctggagagaggcaatggctagaatgtaaataaaataataataatataaagacactagaaaatggaaagacatcccatgttcatggtagtctttttcattttattctggaataaaaatacttcacatttactattgtgaaaatgatgattttacctaaaggttctcacaggttcactgaaattccaatcaaaattctcatctcgttcttcacagaaaaagaaaaaaatatcctaaaaattatatggaaccacaaagaccccagatggcaaaaacaatcttgagcaaaaagaaccatgctggagggattaccattccagatcttaaaatacagtagaaaaaacaaaaaacaatatggcactggcagaaaaacagacaggtacaacaatgaaacaaaatccaagacccaaacatgagcactcataacttcatctgcttaatagttgacaaagatggcagagagataagctagagaaaagaaagcatcttcagtagatggtgccggggacaaggggatatccagatgcagaacaataaagtcggatccatatttaccaccttgtgtaaaaacgaactccaaatggatgaaaagtgtaaacataaaatctgaaacattgacactgctaaaggaaaacaggtgtagtaccatgtatgatataggtatagaagacagcttcccatacaggattccacttgtctaaaacttgggccaataactgtcaaaatcagaaactactgctctcgtgagttcactgtggccatggccatgtcatgcacttcagatatgagggcaatctgattgagacatgcttcaccccactgattgccagtattgattcagttaatctggctggctaagtgggtgtctgcttcctccctcaccactccacctgcatcctccccaaccctgcacactcagctgaggagaaaagtcttccctgctgacacagactggtcttaagtcaagggtgtgcaagtaactgcactccttgagcctctaaacagtctctcaagaacacaactgtgcagccccctgcttgtacactctacttccctctcttccacagttccctgaacccgaaggaaggggtgtcttctttaagataaagctgtaggcataatgtttttctacagtatatcaaatttacccatctgttattcgaatgctgatttctctgccctcgtatcttgtttcaacctcgaaataacatttgtgtcaacaattcttagcacttatcctctgccttgtcaataaattcagattatacaaacttgagacaggagattcttaggtataagcatttcaatgtcctttcgagattgaaacaagatataagggcagagaaatcggtctttgtgcctagccctgtagagacttgagtgccagacttagaggtataccaagggtggggagggtgctccacactctcagaggagaaggagaaggggatggaggaaggtgtagtgtgagagggagggggcagcgatcaggatgtaaaataaataaataagtaaacaaacacaataacatcaacaaaatgactgaatatacagagaaatcagcacttgaataacacaagggtaaacttcacacagtgtacaaaaacatcatgcctacattgagatctcaactgtccttgattttcagaatcttacgtcaccacaggtgtctgcattcacctctgttctctgctaagagaggtttctctgattaaagactttatctgtgggtgcgaacataggtacttagaaggcaatttgatgttatgtcaatctacataagcggcaatggtaggtttccaattcccaccgccaccaccaccccctgcccaccctagcgcctaagagctccctgattatggttgttttgttgctgtttgcttgtttcttttgagttctgtaagtgagtttaattcgagtactagatatagatatttgctttttgccagagtctctcattggcttggaacaagccccaggggtcaaccatgcctcagccccgggattacaagtgagatactacatctggctttttctttttattgtgtatttgtgtgagtgtgtcaatctatgtaattaggtggctgccaaagcatgaacatgagtcagaggactcataggggtcagtgggttccaaagatcaaacccagatcatgaagcttggcagcaagagccttttacagctagtcctccatcttcttccgttattcccccttccctctcccaccccagtaattttcctttttgtttcatgctggttttctttgcttcgtgtttacttattgagaaatgctctcactgtatgcagtctagattgtcctagaaatctacaatgtaggccaggctggacttgaactcatgaccctctcaacacactctctcaaccacaggattccagaagctctccaccactcttgactctggagtagttgggggtttttttggttgtttgtttgtttgttgttttagagtgtatttgttacacaggtgatgtgttacataagcacatttttatgcaagaccatagtgtgcattgagcacatcccttgccttcccattctcacgacccgccccttcttggtccctttctttcccctgcagagttttacttctactttcttgttatgtatacattcgtgaattttatgtaactctaaaatctaggaaccgcaaaagagagaaaacattcaatatttgtcttcctgaagctgacttaattcacttgatctggatggttgtcttcagttgcactcattttcctgtaaatggcattaatttaccctttatgattttttaaaccatgttttccccgttcattcctctgttgctggacactgaacttggttttacaacttagctattgtgataaagatttttcttttaaattatgtttaagttttttcatacttacttttattattttaactatgtacatgaggggagggtatgtgcgcttgagggcagagacatcagatccctggagctgcagttataggtagctgtgagtcacctgacttgggtgtggggactgaactggagtcctctgcaaaaagaatatactcctaaccactgagccatctacccagcccccaacaagctttttataattttttttattgtttaaaaggggttttttcgatcacccatggaaggagttacagagacaaagtttggagctgagacaaaaggatggaccatctagagactgccatatccagggatccatcccataattagcctccaaatgatgacaccattgcatacactagcaagcatttgctgaaaggaccctgatatagctgtctcttgtgagactaggccggggcctagtaaacccataagtggatgctcaccatcagctcttggatggatcacagggcccccaatggaggagctagagaaagtatccaaggagctaaagagatctgcaaccctgtaggtgcaacaacattatgaactaaccagtaccctggagctcttgactctagctgcatgtgtatcaaaagatggcctagtcggccatcactggaaagagaggcccattggacttgcaaactttatatgccccagtacaggagaatgccagggccaaaaaatgggaatgggtgagtagggaagtggcggggagagaataggggacttttgggatagcattctaaatgtaattgaggaaaatatgtaataataaaaaatattaaaaagaaagaaagaaagaaagaaagaaagaaagaaagaaagaaagaaagaaagaaagaaagaaagaaagaaagggttttttttgtttgaaagtagaaagtatattatggggctggagagattgctcagtggttaagaccactgactgctcttccaaaggtcctgagttcaaatcccagcaaccacatggtgactcacaaccctctgtaatgagatcggatgctctcttctggtgtgtctaaagacagcaacagtgtacttagatacaataataaatgattctttgggccagagcgagcagaggtcctgaattcaattcccattgaattcatgatggctcacaaccatctgtacagctacagtgtactcatatacatacaatttaaaatgtatttacgtaatgccatttagtcatctccatccctccacccccctccctctctcactgaaagccttcttctcagtgagttcccctcctgtggctgtcttccttttgagtgtggcccactgagtttagctagggttgcttccatgagcacaggcagaacactacttatttacaggagcagggtaagtaaccagtggctacagcactgaagaaaataatactcccctccaagcaactctctgatctttttggcttgccctccctgtgctcagattacaggtgccacacaccacatccagcccattccccagaaggatcctttgtgcatggtaggcaaggattctaactttgctgcaactccagcttcctatgtttgttcatggtttattgaagagggttttattgagctttgggtttttgttttgttttgtttttgaggctaggactcattacattataatcctgggtgacccttaacatctgaattctagatccttctacttcagcacctgaggtcttcttccacaggagttgtatatggtgtatgtgtgtgtatgtgtgtgtgtgtgttcattttcaattatatgtatgtatttactttgtgtacaggtttacatgtccatgtgtgcccacacaggccacagtacatgtgtgaatgtcagaggaaaccttttagaagttggttctcccctagagctcccagggactaagccatcaaccaaggagtacgggtgtggtggcgcacgcctttaatcccagcacttgggaggcagaggcaggtggatttctgagttcgaggccagcctggtctacaaagtgagttccaggacagccagggctacacagagaaaccctgtctcaaaaaaaaccaaaaaaaaaaaaaaaaaaaaaaccaaaccaaccaaggagtacacatggctccagctgcatggccttgacaagcatcaatgggagaagaggtccctgatcctaatcctatgaagactccatagatgccccaatgtaggggaatcaagggcagagaggtggaagtgggtgggtgagtggaagcacaccctcacagaagcatgcggagggaggataggatagagggtttctgggagggggggctgggaaaggggataacatttgaaatgtaaataaagaaaatagccaattaaaaaaaaaaagaatgtgagtttgagacaaaaaaaaaagtttgctcactccttccaccatgtagactcaaacacgtgttatcaagcaggtacctttgccagatgagctatctcactggcccccaccttgtttgtgagatgcagtctctcacagggacctggagctcacaggctatctacaccggctgaccagcaagctccaaggacttttccgtgtccacttccccggtgctggggttacaagcacattccacctcacccagctttttcatgggtactagaaatcagacccacaccctcatgcattcacagcagcactttagagactgacccatccccaggccccataacactcattccttatcgcagtacccctttgaaacaagcccgggcacagttcctcctttttcacaaaggagaaaacttttaaagcacacaccagctcgagtttatttcccagcagaagaacccactaacttgcttaacagcttccacagatctgtttgctcctttctgaccagtgtcagctagaatcacattaaggtcaagtacagtgttttgaccaacacctttggggttgagctggctttcaaggtcacacctaaggatatttttcaggatctagcagagtcctgggacttgactggttcagtgtttccccccttaggggaaagctgagccaataagagacaaagaccagagcttgggggcgggggacaactcaatcaggaaagtctctgctttgcaaatgtgaggacctaaatttgatcctcagtaagcacactcgtgcatggggaaggttgatgccatgcatccctgtaacttttttctcctatagtaattgccatctctgaggcgtactgcctcaatcttctaacctgggcctagtcggggacgcttctagcctctgtaaaatcttatctaggcctagaatgttttcagcctctgagactagctgccgaataagcttgtcccttcccggttctttctgatctctggctgactgattcaactttgctgttctagctcaaactcctctccaagctgactgacttaatctggcttctctcaccttctcctgaataacactgcttggcctcaaactaactctggtaacctgttctaatcttctggatttttcttattctctggtttgttttttcttcatctatatctagcttgttctctctgcaactataagggtccaaaagttgctgaagaaaaaaccccagactcagatagtatgcaaaaacaaagagcttttattctgcagaagcaactagcaggcaagggctaccatcatttcagaatcggacccagacaaaaacatttgagctcttttttataacagagctgcttaattgtttctgagacttctaaaactgaaggcacatccaaaggggttttacagaaaccattaaccagacggacataaagaagatatactccacaggatgccaagtgcaaaagcaggagataagatattgactgagtttgtctaaataaaacttcaaggatggcttagtcttaaactctccatgcccctgtaacacaaatggtgaatatcaagccagataattgcacgtaggcatcccctattacaacctcctattcaatttgtggtctcaattcatgtgccaactcacagtgagcttttctttcatgtgaacacaacttctgaaaggtgtacaagtgctgatagcagagacaggcctctctcccctactttcccaagacttaggccctcacaaaagctgctttaagtagcctcccgctactccctgacgacacctgactgggactttaatatggcaaaaggtaaggggcacctgaaggtccaccaccaggctccactgtctcagggggctgcatgaccacccacacatttgaccaaggtacatgaggttaagcagagagcagagcgccaatatacaccctatgaccccagcagcactgtgactatggcttttatagaccaggctagcagaaatatcaggaaaaagtgccaaaggctagaaagacagggtaaatcattgagggatttagtgcaggctgctgagaaagtctaccctaagagggagacagaggaggaaaaggagcagagacagagaaagaaagaaaagcgacccggaaggaatctacagagagtcctgactctcgggttagaggatgaatacaagttgtttgagaccttggacagggcaccccaggaactagactggtgattctaggcctttccccaggcctagcctgagatggcagggatggggagggccaccaaccagtcccctatccatatggagctcagagcccaagcctccctggtgtctgtgtgccaatatcctatattgagggaggcccagaacggaatccggccccacattaccaggctcctggaacaagggatcttatggaaatgccaatgggcttggaatactcccgtcctgcctgtgaaaaaacctgggacccaagactgaggaggactatccagaggtgactaaactcctcttagaggagctgagaggcttaagatacagagcctcagccacgaaggcccaaatctgccagagaaaagtaagttatctgggctacctgctgaaggacagcgggttctgctctccaatgctggctcatagagaccatcctggacacggactttgagaccagcctatattacttagcctttaagagaccctgtttccacatgaaactcaagaagaagaaagaccaaagtgtggatactttgttccttcttagaatggggaacaagatacccatggaaggaatcacagagacaaagttcggagctgagatagaaggaaggaccatccagagactgccccacccagggatccatcccataaacaaccaccaaacccagacactattgcatatgccagcaagattttgttggcaggaccctgatatagttgtctcttgtgaggctatgccagtgtctggcaaattcagaagtggatgctcacagtcatctattggatggaacgcagggcccccaatgaaggagctagagaaagtacccaagggactaaaggggtctgcaacactctaggaggaacaacaatatgaattaaccagtacccccagagctcgtgtccctagctgcatatgtagcagaggatggcctagtcggccatcattgggaggacaggcccttggtctttcgaaaattatatgccccagtacaggggaatgccagggccaggaagcaggagtgggtgggttggagaacagggcagagggagggtataggggacttttagagaggaaactaggaaaggggatagcatttgaaatgtaaatgaagaaaatatccaataaaaaatgtaacttcaaatatatcacattgctttaggtagtaattacataatttaacaaagggaaccttacaataaacttttaaaagctttaaaaaagagagagagaccctgtttccaaaaaaaaaaaaaggtggatgggggtcaccatgacagctcaatgaataaaggagcttgctgccaagtttggcaatttggctttgatcccagaatccacatggtgtagagagaaaaccaattctcacacgttgtcaggtgaatgtacattagagggatctctaatcctatgcaagaacccaaaacacacaatataactaaataaatgcaatatttaaaagataaatggtgcctgggtaacaacactccaatctgtcctctgacctccacaatcacacacatacatacatttacacagagagagacagaaggttgagaaccactggtataaaccaaacacatatcttcttggcactgtgtgtatacattatgtatgtctcctatctgtgcatgggtgctgtgttcctggtctatgcctccatagacaccaaaagatgagtcgtcacaccttctgtgcaggaaacacagctacaatgatcaagccacagaggtttgatctgcccctcacagtcctagccttgcccagcactgcgactgaccattagctggcttcctacacaaaagtattgaggccaccgacatggaaaggaaggaagggagggagggagggagataggatagggctagggtggagacttaaatttatatctctgtccagggctggacgccaccaccaccatgaacactggtgaatacaacaagctgggcagtgcaattgaagaggtctccagaggtaggagaaagagaatcaccccatcgtcctccatgggttcttctgttctaatgtttgcagtttgggagggctggggagaagaaacggcaaaaccatacaggagacaccactgtatggacagaactgtggaatggtggtgcccgcagcacaggcatggggacatcacatcctggagtgaggacttcccagggtcctaagggctgggtcctgggtcctggactgagaaacagcatcacccaagtctcccccagaaaacctgtgtggggacaggtatcactccagccacagacaccttgttacatagattctggttacactggcataagaattctaagactgctaaatatgcagctggagccatgggtccctccatgtgaactctttggttgatggtttagtccctgggagctctggagggtctggttggtttatattgttgttcttcctatggggttgcaaaccccttcagctccttcttcagtccttcctctaactcctccatcgggatccccatgctcagttccgtggttggctgcaagcatcagcctctgtatttgtcaggctctggcagagcctctcaggagacagctatttcaagctcctgtcagcaagcacttcttggcatctgcaatagtgtctgggtttggtggctgcatatggtagtctctggatggcctttctttcagtctgtgttccacctgtgaaggctcagtgccccaatgtaggggaagtctagggtggtgaggtgggagtgggcaggtgggtatgggagcaccctcatagaagcagtggggggtggaatgagatgggagtttgtggagggaaacccaggaagggggataatatttgaaatgtaaaaaaataaaatagccaattaaagacttttttaatttttaaaattaaatttaaaaaaattctaactatgttgtgtggtggtaggagggtacttaagctgtctgtacctctgtcctggagagagccagaatttatctgtgttctactagggcaattgggacgttgggagtgctacaaacaaagacttttcttcctggtcttggctctgctggtggccacagttctatgggctctcattctgagcaccctactgtccagtggtgagtgatgtattttcatgtgtacatgtctgtgtctgagggtatgccgcgggtgtacaagtgcccacagtgggtagatggcatcagatcccctacagctggagttggagacacttgtgagccattgcatgtgggtgcgagtgctaagaaccaaactcaggttctctggaacagcatctctgaaccatcgctccaccggagtgatccctttacagggacaagttatgctgcctggcaggtaaggcacaaacttgcttcctatgcggtgcaccacatggggtcctggatagcaatgagtataaaccatggttcccatgggtttcaccaggtttgcctgagacatcggaaatcatatggattgtatgatatgatttttatgttatgaatggaaattcaaaacagcaaaaaaattaaagttataaagtaacaacgaaaataattttatggttagaggtcaccacaacataaactatattaaagggccaccgcattaggaaggttgaggaccactggtgcttggcactgtattatgcattttgtatgtctcctgtccatacccggacatacctgtgcctccgtggataacaacgtacgtgtcctcacacactctgagcaggcggaggcttcacaactcatgcttgcatctctctgcagcctccagcaagctcagggtgctgctcagccaccaggacctgctgaggacaaatggtgcgtgaggagctgcagcgcagggcggcagcgcacccttgcggtgggaggaggaactgccagggaggaggacctgggtagtgaatagctgaggccgctgcaatcgggttgactggtttgtgtgtggtgggtggggtctttccagcctcagagcagaagatgacgttgagttccctgaaggatgatatcggagcctgcaggaattgctgtaagaaagaggggtttggtgaaaacttgaaagttgaggggctgggaaatggggcaggtggtttgggagaggcaagtgggggcaagactggtttttgccccatccccatataggctccgtgacaaaagcgcagttgcaaaccacactggcggagtttaaggacatacaagcaaagttgatggagcaggagagcatcctgaaagaactgcaagagcgtggtgagagctgaacacaaccccctggtccccgaccttcatccctaatcatagccacaccgcttcttggtagtccagtcctggaccctcaggtctctggtgactgaacccaggacttcgaatgctaggtaggctttccacacctgagccgtgcccagaccctcaaagcaggattctaagcaggtgctctacctttgagtcgctctcccagacccttgctgggggattctaggcaggtactctaataccaaccttattaccagcactcattttatgttttgagacaggctccattaagttaccaaggatggtcttaaactctctgtgtagtccaagttagctttgaccttacaatcctcctctacctcagctttctggagtaactgaaaccgccacgttcaaattgatgttattcttgaccgtgacaccatgaactgaccatggatatatattttgacctatacataagtcccggtcttaacctcaactataaatgtccactcttctgaccttgtagtgacccaggacttggctaaagcaagcagagaccgtgagaacatccgcagtgagctgttccaggcactggaagctgtcaagcgccagaacagtgagccagagataggacgaggggtgggggaggaatggacccagctgagggttttcagtgcttctctttccaccagacattcccttgtttctctggaaccccacaccatccgtcaaattccaatggtcccttcctataacggtctatctctctgaccctccccacccaacaggctcctgtgagcagtgcccaccatcatggctacccttccaaggttcctgctactatttctctgagacacaggccacatgggatacagcacaaagctactgtggaggccagggtgcccatctggtgattgtcagaggcctgaacgagcaggtgctcagctgggacttggaagaggagaagcggggtttgcctgaactggtgtggcccagaacatttggcagacttggccagctgatgtgtctacccactccttccagggcttcctgagtcagcacacacgtggccggggctattggttgggtctgagggcagttcgccacctcaacaagattcaaggctaccggtgggtagatggagcctcactcaacttcaggtaaggagaaggccccatgaaaaatttgaagagggttgagttagaccctgtggaaaatgcttttggatatctaaagactaaattcctgagagaagattggtgttgatgttttggtgcatatgtcactgcacaggtccattcatgcccatgcaaagactagggggaaactctgggtagtctagtctatcattccttaccttactccattaagacaggctctttcggtgaacctggatctaggttgactaacagtcagaaaacctcagaggctctcctgtctccaaaccttaccctgcttgggttataaacacttgcacaaccatacagagctttttatgtgactacttgggatttgaactcaggtctttgtacaacaaagcattataacaagcattcttttccactgagaaatatcctcagcccctgaaataacatttaaagaatggatatgctagaccctgggaattaactaagggttaaattctgggtccgtacaaatatacactgcagatataaactcaatgtaggcattcagaatgtctagagcagagccaagcaaacaagcaaggcctgggaaaggaagcttgaccctaggtctatcctcagtcccagtaacactcccactgaactaccacagccactggaactctggagagcccaatgattccagaggacatgaggactgtatcatgatgctgcactcggggctgtggaatgatgcaccatgtaccaatgagagagatggctggatctgtgagaagaggagcagttgctactaagcctagcgcccattgcctcggggtgaatcagaagggtggctcctattccttgagcccactaccaaggctgtttttcctaatgcaccattaataagagccactcagcctgaccagtgcatgctttagtgaccccagctctaactcacaagacagtttaaaccttccatctaacctgtcagtctcaaaatcactgctctaaaccctgatggtctgatccactgcctgtttcctagacacagtgttggagttgttccatcttcctgcatccccctattttaccctctgacttggagatttcttcacacacagagagagcatcaataaatgtttgaaaaagtaacctatcctccagatctgtattggaaaagaatgatctctgtaacccacaaaggaacatactttgtaatttactttccaggaaggatgtgctagaaccaaaactgggctagcgactactcagtggcctctgtcttttatctataatataagtgatgactgcatctcaccccattagtggaagctcagttttacactctgacatgacaactaattggcacaaagaaggaggaggttcagataatatgggtctctatcaggctgattacctttaatactgaattttttccacaattctcatctcttcattatgcattatttaaatcatacacctcaattttaagaggcaaccttgactgccattatggaatcaggacaatggccaatctgtttttttccagctggaagggatcattgggcatgaccatcagagtatcatctccagtgggcttaactaaaagaccccaagctgcattgatggtccaacttgtgtaactctaaggtggagagagaaaagaaggcctttgtctagtgcctggacagagatgtgaaggagaaatgaaggcaacagttcttaacattaaaagtctgaggagggaaccaggaaagaccagaacagagatactttgtaagtgtccagatcaacgtccattagaatagtttgataggctcacaaaagcctccatcttttaggctcaccactgctttgctttggcttctaagggtggcctccagagtgctgagccttgggtatgctttcaaatgctgtgatcatggttggagtggctagaatcatagtttgagatccctctcagatggcttctagagaaggaatgaagaaatttaagcatcacttggtttttaagttaaaacaatagtggacctgtctgtctgggttccagataagataaagcattgaattgagccaggatctaaagtctcttatatcttggcagcattttccttatgaagaaggcagtcattagtgatatacagttgtctaaataacatctcacatgtttatgtctaatgcctggagagtgcaacctcctggactatagcagaaacaccagccatttcagtctttggttgttattttctgtaaggtgtttaagaccatgtagttggacaaaattaactgcttttatttaactgtcatggtcagctaaggatcttgtccgtgggagccacttgacttgaaagaagctctaggcttcattgcctttcagctgttccatcgatgtgaagataagtcaaaggcctggcttgaccaagaattcacttggaaacatgattttttctgtgctgaccctcctctttacatactggacactggttaaagtcactggtagggtctccatggcctctatgaacaagagttataggatattttgagggatatcttacccctggaacctagatgactttggagggcaagggaacaacagtctcccttttaattattctgatcatatcagtgtagtcttctagcatggttactgaacactcagtaggtcagttactccaatctggtacttctaattactgtgtaacgcttagatttttagttccattgacttaagcaaagttcaatgtactgaactttgaccctagacgttttaataccatgcatagcctgtcaaagtctcttcttttacatacctgaaataatttactcagaccttaataactgagataagctttctagcttatattttatattatgaaacatagaaacagtaacaaatttaccatctattgtgagaatttggaaggggaataactaagcaatgtctagtctaccctttccttacaaagtccaaatgataaatcaaagtttgagtcactgaagttcatcctagagaaccaatgagttctttggacttacttatggggaaccaaggagtttgctgtgcttactcattagcatagataaggggttactaacggatggataggcaacccaaaatcagcccctctggaaagtcttcacccagcatgggtgatggctttcccatagatgcataagcttatggtgagttggtatgatgagcctatccccaaggaactgagtccctacataggtttgtatgcatatatacataaattaaagtgtccatggatgccagaagagggcatcaaaagttacgtgtgattgtgagccacccattttgagtacttggaaataaactctgagccctcttgattcatgtattcacctgttttccattacacaaacaaaatgcctaaggctgcacacattatagagaaaggagaagggctgagggatggtttaataagaaaggtatttactgtataagtacaaggacctgagttgagatccactggactgatataaaaccagacacatcagcatgcatctgtaagcccagtattggggaaatgaaatgaatggcttctggggggggggggtgcagccagccagtctaggcagaacggtgagctccagtttagtaaccaaccctctaaaacataaggtgaggtgaggaaataatgagtgagaaaaatgcctgcctgacactaaccactggcttccatatatgccttcataccttgtatggaggagtgtgtccatacacacacatccacacatgtgtgttcacacacacacacatatcaccaaaaaatgataagcaaataaatattaaaaattaaaagttaaaatttccccccaaagtaaagaggttagtttggtacatttctggaaggttagaaagtcccagtagggttctgctctggccaggtccccttggccgggtcacatcgcggcagacagcatcatgttgggaatgtgcacattagttacgtgttccattgtgacaaaatacccaacaagcagatgaaataaagaaagatttattctgcctctctgttcaaaagagttcagcgcatcatggttggaaagtaatggtgatgggagcctgaggcaatgggtcacctggatccacagttttgaagcagagaatggcaaacattgacgatccggctcactctctactttacattcctactaagacccacccccaaaccccacccccaccaggaggtggtggtgcacgcctttaatcccagcacttgggaggcagaggcaggcagatttctgagttcgaggccatcctgggctacagagtgagttccaggacagccagggctacacagagaaaccctgtctgattgggggtggggggggagacccaccccaacagaatggtgccacccatagtcagggtaggtcttcctacctcaattaacctgatctagaaaccgtcacacagatgtgcctagaggcttgtctcttgggtgtttctagagtctaaaatctagaccctttcaacagccaatggtaaccatcacagttagtgtttaactttatgaaaataaacctgccaaacagattcccaaagtccctgtatcatcaacactcccatcaccgctcccttggaggctcagaaaatatcccagaagattttaaagctggcatttcacagacactacagttttgcccaacaaagttatctgcactagacttgcaaaagacttgacttgtcaatagtcactcatggattaaggaggatccctgccactcccttctgaattattggcatcatcatcatcagtgacacacccacccttgagcccatcaggcccaacacttccaaacccatggtcacaaaatagtcctggttaaactcatgggctcacaaaataaaacagaagccatgcatgacttgtagggagaagagggcacaaaagaagtttgaggcattcagagaggtgcagtgatcaaaactgtcaaagaaaaggattaatcttttattatttatttaccctagttatcgggggcacaccttgggtcagggtgctccctagaatccattctttcttccacttgaggatcaaactcaggtcatcaggcttggtgcctatggcaagcactttcatctgcggagctatcttgccattctgaaggaacaaatgtaaagaaaataaaagacaaagtaatgaagggcaaacaacctacccagacagcaaagcatgggcaccctggtcactccaggaggaattttcttttaccccatagtttgtataattctgaagcccaagggagttgtttaccttgaaaccgagaagaaaggcaggaagtgaaaccagaagttgaggcagataatggagacagagaggaagcagtggtaacatgtgtttggttgcatgtgtttttgtggaatgcaattccttctgcggttttggttttgttcctttttgctttttcatttctgtaagatggggggggggtctcatctaagccccagttttatactatgtagtccaggctgccttcacagccacaaacatcctgcctctgcctctgaagtgctggaattgtgagtgggcaccaccatgctgcagctcagagacacctagcaagaaatcaaaaggtgttagggacacttaacaggttgttctcccctgcttttcttaagagagcagcagctaacagggatgtacaagtgtctctctagtaggatatgaagtctttgggacacatgcccagaagtggtttcatccgatcatatggaagattgtccaagttttctttctattgctgtgataaaacacttatcaaagcaacttgaaaagggaagggtttatttggctcacagatcccaatcaattggccattgagggaagttgtgcagcaactcaagcagcagaggcagaaaccaagagaatgctgcttattggcttgatctcaggtttgtgttcagctaccttattgatacctcccaagaccagctgtgcaagagtggcaacaccctcagtagactgtgccctctcatgtcaataaaaaatcaggaaaatgccacacagacatgcccaaggccaatacaatggaagcaattcctcaactgaggttcactcttctcaggtgactctagtttgtcaagttgagaaaaactatccaggacaactaatctcttgtcaacttgacacgtaacagcataaacataatactgttaaaccataagcttttattttttatttatccccaagatcacatattaatatcacaacataaaagttgttactactttgaaagtcccatagtcttcaagttttttcagaactttaaaagtccaaagcctcttttaaaatccaaagactcttaactatgggatcttgtatagcccaaaatagtttaaatattgtcttagtctaagagagaacaactggacacaattacaatatggtcaaagaaaactaaaatttaactgtaaatagatcattgccccagtgtctgctaattattctgatcatctgggctccatgggccttaggttgccccacctttccagttctaccacttggagtatccacagcttatcttgtgggcagactcaggacagctctgctcacacctgtgtagacaacccacagttctgacacttccaatacactgccgttgcaccttccccaatggcctttcatggcctctcacactgccaagctccagccactctccataacccttcggtcttacagcctgtgtaccaccaaagccagtctataggaaagagactcttacacactgccaagttctactaccagcttaagatgcagccctggccctctctagaccacaacttctgtgtgctaatcatgagaaaatactctcagaagatttcacctcaatgatgctggcctctcgttagttacaggtgatttttcagccctgacaaaccagcactaattgtcccagtaaagcaaaggtttcacttcagtgtttctggtctcctgttgattacagctgagtctgccctagctgaccagaaaccacaaattcttaattcaaagcattccacaaagggcccagataaaatcttttaagactgccaaatgtccttctaaaatttcactaccagacctccatcgtctccatttctctgagcattctcatcttccagcctccgacagtagagctcaataagctctcagctttctatggtttttccagttcaaagttcccgagtgcttccacagcgctgccaaaagaacaccacactcagatccatcacaagatcctattctctggtgccagtctatatcctcgtttagtttccattgtgataaaatatttaccaaaaacaccttgggggaaaaggtgtttattttacttacacatcctgatcacagttgaccactgaaggaagttgggtgaggaaccacgaaggagcgctgattactcgcttgctctcagcctgatattcagctacctttcttatacgtttcaggcccacctctatcagtgggctcggcccttccacagcaattaacagtcgagaaaaaatgccacttagacatgcccacaaaccaacgtggtagaggtaactcatcaaccgagattccttcttcccaggtgactctggcttgtgtcaggtttgaaaaaaactaatgagcacataggtctaatgtatgtttttcagaaagccccacgttgatatccacgatggtagagctaaattacaattctaccaacgataaatcagcctccctttccttacatcctagcaagcatctgtgatcagaacttttctttttaaatttttaaattacatttttctgtttgttgcttgcttgcttgcttgcttgcttgtttagtagaaggaaggcatataccacagtgatcttgtagaagtcagaggagtcagaggacaacttttaagagtcaactttctctttccaccacatgagccctgcagacagaattcaggtcatcagagtcagtagcttatgcttttgctcacagagccatttagccagtgctgtaggtagatttcttagtggtggtccttctgactgggccaagatgtctatcaacagatgaatggatagtgaaaatgggatacatatgcacgatggaaatgtaaaggaaaagtaaaatcctgaagtttgcaggaggaaatggatggatctggtacaggctatgaaacaagaatggaaaccacaagaggaggaaagagacttccaggaatgagggagagtaataggacacatggtacacaagatgggaaaagggtagggtacaaagtgggcaacaagacaggagacaaagggagagaagaaaatcaacaaaaccagctccagagtggggatgagaacaagagtttcttgggagcagaggttgaaaacaccatagtgaaatctaaaatttcacatgctcactttttaaaaggagggcctgggggagatggcccagctctgcaagcaagagaacctgactctgaattcccagaacccacgtaagaaccgaatggacatgcagcctgcctatagctccagcctgggaagacggtcaggaaatccctgcagcaagcaggcttgtgagactacagtgtaggagagacttcctggaaagtcaagaaatagcttcctaaggtattgttttgtgtgttaataagtgtaggtattgttttgtgtgtttgggttacaagcttcacaactggaagcaattttgatcatgtggttcattcttggtagttttcttaaattgcttttattttacacataaaatttatattagaaatattaacaggtttgggaggtggcttagctgataagaattcttgcagccacaagcatgaggagcgaaatagatagatttgaggtaaggtaaatcaggaagctatgaaatgtagaatctagcaagaaacactcattgcaaaactcaaagttcctgaatgcttgaaagttgtcctaatgaagtgttgagattctggtgaggattgctactttctagggatggctcacagtccagtagagagagggaaaggtgatgaggatttctagaggtggtgtgcttgcgtggtaagattccaaatgaaaacttctagaaaagcagactccctttgctagcatttctgactgagggcagataagtacggaagagtgggagggacagcagggtcaagggtcaaggatgcgacctgtgcttacccccttctctctgcagaaatgattccacagcggctccccagagggccatatgaacaccttatctgcagctgagttagtgaatcctagagcccctggaagccagatggggcttcctgcatgtaccaacctggccgtcacaacactctccctggaaatggccttgagataggacaaagcaaccgatcccaggaaacccccttgcatcccagcttcttcttcccaggaagcacatggggaagcccccaggggtccgaacaggcagactggcgtctctcctcaagctcttggtagcattttccctgatcagattcatccctccgtccccacacagcccagactcttgccactcaggagccctagcatagatatctctgatttgcaggagctgagagaaagctggaaattagaaacctgtgctggccgctggctgtgtgcatgtagccgctggctgtgtgcgtgtagatgcagggcttcccctctcgggggttcttttctcatatttacccagtgagtataagaatagtatttacctccccagtatgaactaaaggatacctctacttcctacgccctgtaagtgctaccacataaaagacatgctacagacccgttagcactccctaagtatcggtaggcatcgtaactgttgctgggagaggaactggtggggccctgctccttcctaggatccatgggcagtccatgttgtctcaaggagagccactttctttagtggtgtggccatcaataagatgtccacacccctggagataaccctcatctatgctcttgtcggaacccactgaaactcactggatcactgaaaaagatgtgaaagtagatgtggcaagaggaagggggtgagagggagcaggagagaaaccagagggcagtggagtgattgtgatataaatacattatatacactatgaaaattccataataaaacccactgttatataaaagcagcagatactaataaaagccttttaaagacctggggatgaggctcagttggtaaagtgtttattcagcattcacaaagccctagattccgtccccagcaccaacataaaccaaacatggcagcctaggcctctcaccccagcactggggagatggaggcaggaggattagaagttcaaggtcatcgtcagacacatggtaagttgaggccaacctgggctacatgagatcctacctgaaaaaaatctctcaaggaaaaatacacagaacaaatttgtaaagtacacatttgtatacatgtgaaatgcctcagacaacataaagtatgtgtgtgagctgaacaccagtcatccctcctgtctgctttctgacaatggatacgatgaaacagctgcctcggctcctgctgctgtgactttctgtcttagagtttctttgctgtgaagtgacaccatgaccaaggcaactcttataaaggaaaatatttcagtggagctggcttacagattcagaagtttagtccattatcatcatcaagacagaaagtgtggcagcctgcagacagacatggtactggaggagccaagacttcaacatcctgatccaaaggcagctgaagaagcctcgggcagccaggaggaggcttttttctgcactgagcagaacttgaacataggagacccaaagcccacccctatggtgacacactttctccaacaaagccacacatcttaatagtgccattccctgggccaagtatattcaaaccaccatacttcccccaccatacaagaattaatatatgtgcttgtgcgtatgtgtgtctgtgtgtgctcacaactgcctgtaactcaagctgcagaggatattatgtccactgaaagagatcttaaaaaagaaaaggagggtgagaaggaacggagagtctcaagaggtgagctgggctgaagacagggacacaggaagccatcagaagaggctcagggtgactgaaaccaaaggaggaggaggaggaggaataaaaattaa

SEQ ID NO: 74 - DNA, 1103 bp, Mus musculus
atgaacactggtgaatacaacaagctgggcagtgcaattgaagaggtctccagagcctccagcaagctcagggtgctgctcagccaccaggacctgctgaggacaaatggctccgtgacaaaagcgcagttgcaaaccacactggcggagtttaaggacatacaagcaaagttgatggagcaggagagcatcctgaaagaactgcaagagcgtgtgacccaggacttggctaaagcaagcagagaccgtgagaacatccgcagtgagctgttccaggcactggaagctgtcaagcgccagaacagctcctgtgagcagtgcccaccatcatggctacccttccaaggttcctgctactatttctctgagacacaggccacatgggatacagcacaaagctactgtggaggccagggtgcccatctggtgattgtcagaggcctgaacgagcaggtgctcagctgggacttggaagaggagaagcggggtttgcctgaactgggcttcctgagtcagcacacacgtggccggggctattggttgggtctgagggcagttcgccacctcaacaagattcaaggctaccggtgggtagatggagcctcactcaacttcagccactggaactctggagagcccaatgattccagaggacatgaggactgtatcatgatgctgcactcggggctgtggaatgatgcaccatgtaccaatgagagagatggctggatctgtgagaagaggagcagttgctactaagcctagcgcccattgcctcggggtgaatcagaagggtggctcctattccttgagcccactaccaaggctgtttttcctaatgcaccattaataagagccactcagcctgaccagtgcatgctttagtgaccccagctctaactcacaagacagtttaaaccttccatctaacctgtcagtctcaaaatcactgctctaaaccctgatggtctgatccactgcctgtttcctagacacagtgttggagttgttccatcttcctgcatccccctattttaccctctgacttggagatttcttcacacacagagagagcatcaataaatgtttgaaaaagtaaccta

SEQ ID NO: 75 - protein, 250 aa, Mus musculus
MNTGEYNKLGSAIEEVSRASSKLRVLLSHQDLLRTNGSVTKAQLQTTLAEFKDIQAKLMEQESILKELQERVTQDLAKASRDRENIRSELFQALEAVKRQNSSCEQCPPSWLPFQGSCYYFSETQATWDTAQSYCGGQGAHLVIVRQEQVLSWDLEEEKRGLPELGFLSQHTRGRGYWLGLRAVRHLNKIQGYRWVDGASLNFSHWNSGEPNDSRGHEDCIMMLHSGLWNDAPCTNERDGWICEKRSSCY

SEQ ID NO: 76 - DNA, 22754 bp, Homo sapiens
taaagatggggtcttgctctgtcgccaggctggagtgcagtggcgcgatctaggctcactgcaacttccgcctcccgggttcaagcgattctcctgcctcagcctcccgagtagctgggactctactaaaagtacaaaaattagctggcgtgcaccaccgcgcccagctaattcttgtatttttggtagagacggggtttcaacatgttgaccaggatggtctcgatctcttgacctcgtgattcgcccgccgcgtcctcccaaagtgctgggattacaggcctgagccaccgcgcccagtctctccccacgttcttgaactcgggcagcacatcctcacagaaatctaggaactgttggtaggtttcttcctcgctgtactccaggcttgcttcggagtcatagtcatccctcctgcactgctcctttccaaacactgtaaacatgcttttaataagaagggtaggactggatgttgggaaatcatgtgaacatctatctccaaatctgcaagctcctgttttactgtagaagggacaattaactccatccttctccatgactctgaaatccaagggggggttccgggttttgccatgtggcgccattttccaactcattttcagcctgatccagcatcttctggacagcttccggtttttgtttcttctgtcgtttctgttcctcctcctctctctctttcctctgctgttcttcccattgttcctttaactttcgctcttgttcttgccgttttctagccacctcttccttttccttctttattctgaattcttcttgtgccttctgctctctcagcaaccactcctcatgtaatctttgcctctctcttccccatagcttttctagttgttgtttttcaataaaagtgtcctcctctttctgtgagagtcctgagtccctcagtggagcaagttcctgctggcgtttctttcgtttctccttcttcagggcggccctgtactttttgtggcttggtttctctggaaatgtcaccttttcgggcgcagccatcttgccggcaccgccccgcccctctagttgtatcctttataataaactggtaaacattgtaaccgcagattcagcccaatctggttcaactttgtgtaataaaatggcgagttgtttttcagttgtcgtggacccccaggttgcaagttacataccctgggcatgtccagatgaacgaagcgtgcaaatccacgtggaacctaagtgctcagactgaggaacagggactgagttaagaagtggacaccacgtggcatgatccttgatccaatcagattgagccctggcgtgatccagtcagatcaagcctcctgaatcccctcattacaagatccaatcatatcatgcctcactaccctctgtatataaaatctgccccagcctccaacttggagagacagatttgggccagactcctgtgtccttgcttggctgccttgcaataaatttttctctctacaaaaccccagtgcttcagtgtttggttttccactgtgagccagggaactgacccaatttagttcggcaacaacataagcaaaatgttttcccgagttctctaaatcattctaggaaattactgaacttgagatggacttatgggaagccacaattttttgccagcctggcagaagtgtgggtagacagtgcaaagactgtctttgcacctggcatctgaagcagggtcagtcttttgggacctagccctttaatttgtggaatgtggtgctaactccaggaagctagtgttagaattagagaatttctttggtgtaaataagacaccacaaacatcacttcctttctactgatgttgaccccaaagatgcaccttcataaacagcttgcaagctaaattccgtcttacttaagagttgaccttcaacaggcagaggaactgtgaggcttgttctatgtcgtctcccagaggctcccagggggattggacccaattgcccttttcagctcattggtgcctttgtattgggttccttcctttccctacctgctcctcttcattcttcccatcccctgctgatgcttcttggaatctcctcccagataagctacttatatccaaatccttgtctcaagctctttagtaggggaaacccaagccaagcttatattttgataactaccaggcatggctccttttatgtgggagacaaggtcttgctctgtcacccaggctgaagtgcagtggtgcaatcatggctcactgcagccttgacctcatgggctccagtgatcctcccacctcagcctcctgagtagctgggaccacacgtgtgcatcaccatatctagctacttttaaaaaattttttgggccgggcgcggtggctcacgcctgtaatcccagcactttgggaggccgaggcgggtggatcatgaggtcaggagatcgagaccatcctggctaacaaggtgaaaccccgtctctactaaaaatacaaaaaattagccgggcgcggtggcgggcgcctgtagtcccagctactcgggaggctgaggcaggagaatggcgtgaacccgggaagcggagcttgcagtgagccgagattgcgccactgcagtccgcagtctggcctgggcgacagagcgagactccgtctcaaaaaaaaaaaaaaaaaaaaattttttgtagagatggggtctcactgtgttgcccatgctgttcttgaactcccgggctcaactcatcctcctgcctcagcctcccaaagtgctgagtttacaggcctgggccgctgtggcctgcctggtcatggctcttctctatcaaaatgttctcaggtattcttgtgcaatttttggatgatttttgagtctactctggctttaaaggttttcatttacttgtggaataagtcacgtgtgcacacagaaccaaaacgtatcaatctctacagtgaaaactaaagctcattccgtccccgttttcccatctcaagaggttactgtccccacttgtagctttgctatttattcccaactaaagagtataacctctttattatattccaaataatgagcttgtcaagtttgttttaaaatctgtttggaaatccttcaacagaattttgaaaatctatctgtggagtaggtggagcccaaaggatttttatttttatttttattttttgagacagtctcactctgtcacccaggctggagggcagtggtgcaatctcagctccctgcagcctctgcctcctgggttcaagcagttctcctgcctcagcctcctgagtagctgggatcacaggcacccgccaccatgctcggcaatttttttgtattttttgtagagacaaggtttcaccacattcgctaggctggtctcgaactcctgacttcaggtgatccacccgccttcgcctcccaaagtgctaggattacaggtgtgagtcaccgtgcccagcctatgaaattttcttttcttttacaaagtagattcacattgttgtgtaaccatcaccaccactcatctcgcaaactttttcatcttcccaagtgaaactctgtccccaggaaacactgactccccattccccgttccccagcccctggcacccaccattctactttctgtttctatgaatctgatgactctagggaccccgcatgaatggaatcatacagcctttgtcttattatgactggcttatttcacttagcatattttcctcaaggttcatcatgttgtagcatgtgtcagaatgtcctccctttttttttttgagatgaagtctgactctgtcgcccaggctggagtgcagtggggcgatctccgctcactgcaagctctgcctcccaggttcacgccattctcctgcctcagcctcccgagtagctgggactacaggcacccaccaccacgcccggctacttttttttttttttgtatttttagcagagacagggtttcaccatgttagtcaggatggtcttgatctcctgacctcttgatccacccacctcagcctcccaaagtgctgggattacaggcgtgagccactgcgcccgaccaagttctttaattagtccagaagtccctagagcttcctagatacaagatcgcatcttccaaatattgtcagctttgactcatcctttccaatatttacaggtcttaattctttatatttccttattgcatcgacaaaatagcaagaggggcatctttatcgtgttcttgattttactaaatatgcttctcacatttcactattgagtaaggcgtttcggcaggctcacagaaattaccccttatccagccagaatcagtgagctagggctgccacgacaaagtagcacaaagcggggactttgaacaacagaaatttattctctcacagtcctgaaggccggaagtctgaactcaaggtgtcagcagggctgtgttcactctgaattgcgtaggggagaatccttccctgcgtttctctagattctggtggttgccgacaacctttggcgttccttggcttgtacacccattgctggaatctctgcttctgttatcatgattttctcccttcctacctcttcacatcatcttccctctgtgtctctcttctctcattttgctttgttttgcttttaagagataggggctgggtgaggcagctcacacctataattccagaacattgggaggcagaggtaggaggatctatttgaggccaggagttcgagaccagcctaggcagcaaagtgagatcaaatctttacaaaaaaaaaaaaaaaaagaaaaactggctgggtgccgtggctcacatctgtaatcccagcactttgggaggtcgaggcggggggatcacctgagatgaggagttcaagaccagcctggccaacatggtgaaaccccatctgtactaaattcaaaaaatcagccaggagtggtggcatgcgcctgtaaccccagctacttgggaggccgaggcaggagaattgcttgaactcaggaggcggaggttgcagtgagccaagattgcaccattgcactccagcctgggcaacaagaacaaaactctgtcaaaaaaaaaaaaagaaagagagagagagagaagaaaggaaggaaggaaggaagaataaaaagaaagaagagagagaaagaaagaaagaaagaaggaaagaagagagaaagaagagagaaagaagggaaagaaagaaagaaataaagaaaaagaaaggaaggaaggaagaaaaagaaagaaaagaaagaaagaaaaaggaaggaggaaagaaagaaagaaaaagaaaggaaggaaggaaggaaggaaggaaggaaagaaagagttgggcatggtggtgctcccctgcagttgcagctacctggaaggctcaggcaagaggatcacttgcgctctggaggtcaaggctgcagtgagctgtgattctgccactgggcaaaccgagtgagaccctgtctcaaaaaaaaaaaaagaggatcttgctctgttgcccaggctggagtgtagtgacatgagattgccctgcctcagcctcctgagtagctgggactacaaacatgtgccaccacacacagctaaatttttctgtagaggtggggtcttcttgtgttgtccaggttggtctccaactcctggcctcaagcacttcttcagcctagtgctgggattacaggtgtaagccaccacagttagccccagcattgcttttgggggacactgttcaatcccctacaccgtggacattttgaatttcttctggatcttaccaaaaatggttctcatgtttcactattaaggaagacatttctgtaagatcctggaaattgccacttctcaaattaaggaagctttatcctgttctgtgtttactaagcatttattttttgtgcttatcttcattttaaatgcagaatgaatgttgaatagacatatctcataattgtaatgtggagaggacaaaaacaagttccggaaggatatagaccatgtgatgacattttaataaagctcccagatgtgcaaaacagcccaatatattcaccattgaaagatttgtaattaaagcattttaagataggataaacaccaagtttgggagagcagtggccttggggaggggaataagaggagggtggggtacaagagacctccactctatttgctatgatttgttatgtgacgatgttatgttatttgttatgtgatgttatttgttatgttatcatgtttgttatacgatgttatttgctacattttgttatttgttacgtgatgatttttaagaagatctgaaatatgtgaagatatcaaaacttgataaagctgagtggaaggcataagcgttttcattttttttcctgcatacctctttgcatactttataataaaaaataaaagcaaagccaaaattcagagcgacaaccaatacaccatatgccctttgcagtgggctggcttccctggttacagcaaccctctcatctctgcagagaatggaaaccagagtggtcatggccttggggctgaatcctgtgattttcaccttcttcccacattcgcccaaacctcttatccctgctcttcaggtccttgtatgatgtgaccccagctgacaccctagccccagatgactgcccctgaattactctcagcttctccaacaagtcctgttcccttactctcccaatctttgcatgtgctgataaccatgttggggccattctttaatgtatccatctcctctggaataattctgactccttccccaggcatcacctcctccaggaagccctcccggctcagccagtgtctccagtggtcctcacagtctcctatacttcccagactcatcatattgccttcaaattgcctggttacatgttccctgcccccctccccgagaaacaggcctcccttccctgtcctaggccaggggtagagagtggaggtctgctgcctccttctaggacctctcttcccctctcagttatcccacagcgaggtctgggcacgggacatggatgggcagccttctggcttcctcgctaaactggacagctccgccctggctcgccaaggcagcttcagccacaggtgtatccagctgagccccactttcctgcccccttgcctttgtcttggctgtgccctgtgcctggtgtgtccttcctttctctgtccacaatacacatgtcgtcaaagccacacgtctcatgctatctcttccagaaaacctccgatttcccaaatgaactaattctatctcctccataagggctgatgaaacacttccatgtaaatcctttccccagaacacattacgatggttgctttggacagagattgtgcaattcttgtggggtttcatttccactccctgaaccaggaagccatctactctctgctcagtgacagccaattgctactgcatttatggaaactttcatgaggacttaattctacacatccccctctcccaccccaccccaaaatattactccggaagagtcagttgcccattgctgggtgtctgaccctattccctgcctcaacaaaaccaggagatgctggtatgaagcctgacaccctggtctgagttttgtgtacaaggcttgtctttttagatgtgtgtttttttcttcaccttcctttcccttccatctttcttttacaaaatcctcttgtttttttttatttcattttattgtgaatgtctctcattcctggaagaagaaagggggaaatagacaataagtacaatttatttatttatttattgttgagacagggtctcactctgtcacccaggctggagtgcagcgggcgcaattacagctcactgcagcctcaaactcctgggctgaagcaatcctccagcctcagcctcctgagtagctgggactaccgatacacatcaccatgcccaggtaatttaaaatttttttttaattttgtaaagatggggtcttgctacattgcccaggctggtctcgcgatccccctgccttggctccccaaggtgttgaaattgcagagctgagccaccgcgcctcggctcaaataaaatttttaaatgaaaaaatggataagggtttttgagaggctcaagaagatgaagtgtgtttacatatctacaagaggggctggaacattctattaagtgctcaacatttcaccttgtcagtgaggctggccctggccaccctagccactgcccactgcctagtgcccatcccagtcctgccaagtacttatcctactggattttttcttcccttaatgttttttcatagcatttatgacttttgaatagagtatactacggttcccaccttttgcactatggacattaggagtcagatcattctttgctatgggggatgtcttaggcattgtagggctttgcgcagcatccctggcctctacccactagatgcctggagcacacacacacacacacacacacacacacacacattctgtgacaaccaaaagtgtctccagacatagccaaatgtcccctggtgggcgtaattgcccccagctgggaactactatgctatacaacttatgttttcaattatgtttattacgttgagtatggagtctgtctccccacacttctagaatattagctccaagaagagaggaatttgcttattttactctctgatgtggccccagttccaagatcaatgcctggcatatggcaggtgctcaatgtttgttgaaagaatgcatgaacactgagtgtttttgatatgcctgaaatggtgctaggtagacatgtataacctcattgtctttatttttttattttttcaatttttgttttcatatatatatatatatatatatttttttttttttttcagaaatgagggtcttgttatattgcccaggctggtctggtctggaactcctgggctcagtgatccttccatgtcggcctcccaaagtgctgggattacaggtgtgagccagcaagactgtcttgtttctttatcatagcatctttgtgagagaggcccatcgctatctcctttacagtggggaaaactaaggcttctagaagctacctagaacccatacagtggtagagtcctgcagctccgccggctacctccctaacaaaactgtttgttcccttctggtacagagggactggatcaaggtcaggttcaaacccagcctctgcaggcacctgcaggggagttgagaagggacctgaactggcctggggggctatgcctgagggggctttctcaggagccagcaggggttacaatttggtcgggttcagtgtgtccctcgcgggataaaacccagccccaggcccataagagatggtgactaagctccaaagagaagcctccagccccaggcccataagagatggtgactaagctccaaagagaagcctccagcaccagcctggggatggagctgcagtggccagaaccaggaggctggaaccgcccggcctcactccagcccagcccagcccagccttgaaagggcccaatcctgtgattggtccatgggttcccgttgccaggaattaaggccaagaaaatgggaaggaaggaagggagtgcgtaggtccagtgagaacaggcgtgaaatttatatctctgcccaggactgggtgcctgcatcgccatggacaccaccaggtacagcaagtggggcggcagctccgaggaggtccccggaggtatgagcaaggagactgccccatccctgccccagtgtctggggtttgatgggggaggggagggaagagtcgagacaggccagggttgtgggtgcaggagagacaccacaggccatagagccagttggaccagggtccaattccaactctgccgcttagaagctgtgtgaccataggcaagttacttaacttctctgaatctcagtttcctgggagtaactcaggcctccagggctcagttctgggggacccagcatgccgtccttgttatgccagggccctggggacgctgggtgcactggagcaggagacccctcttcttggccctggctgtcctggtcaccacagtcctttgggctgtgattctgagtatcctattgtccaagggtgagtgactctcaatggggaggtgttgcatccggcccccctggggacacaaaacccccactgcatggcgcaccagctgcatcctggggtcctgttcgcgtctgagtgtgagcagagtgtgtgtacatctttgggccgtgtgcactcacgcgtgtgcacatggcgtgctcgtatgtgcgcgagtccccgcgcgtttgtctcccatcggcgtgtgtgcacatcgtgtgagctgtatgcctgcccgcccgctccgtgctcccgagttgggggacgctgcaccccccgggcgaggggaggattcccgagttcccggcctcgcctgcaggagcctctctcctcagcctccacggagcgcgcggcgctgcttgacggccacgacctgctgaggacaaacggtgtgtgcagagccgggcgcctgggcccccggggcgtgaggggcgggagtttctgagaccccggagatggagtctcgagtgcgtgggggccctatggtccctgaggctggaagggggtcccctgagtcctcccaagtgacccgaggggcatgcattttggggcgggggtcgttccagcctcgaagcagacggcggcgctgggtgccctgaaggaggaggtcggagactgccacagctgctgtgagggggcgcggtcgaggctgtgggcgcagggatggggtcttgcggccgcgatgggaggggggccggggcggaggcctgcggcgggtggtgcggggcgggggctggtctccgaagtcccgccccatcctcgccgccctcgcccctctcaccctgcggctcccaggctcggggacgcaggcgcagctgcagaccacgcgcgcggagcttggggaggcgcaggcgaagctgatggagcaggagagcgccctgcgggaactgcgtgagcgcggtgagggcccgacgcgaccccggccctgagccctggccgcgtcccccgaccccgaccccgtcctgagtgctgacccccgaccccgatcatgcaccccgtcctgaccctgacgctgcactctgaccttgactgccactcctagcgccggccacacccggaccctgcccagttgtaaccgcccttgaccctgtgccatcctggacgctggcaccgagggtacaatgaccacagacaggggtcctgacctttagctagtcatgaccctggtcctggccctgaccccagccataatccccgctcccttgaccccgcagtgacccagggcttggctgaagccggcaggggccgtgaggacgtccgcactgagctgttccgggcgctggaggccgtgaggctccagaacagtgagcgagacggggggtcgggggcgggctgtgagggcgtaagcggaccctgtcactcctggaccttggcctggttctgtgtctccacccctgagcccgcggggccgaacccctacccactgcatcctctcggtgcgttgcccctggaagcacgcgacctctctgaccctcgccaccccgcagactcctgcgagccgtgccccacgtcgtggctgtccttcgagggctcctgctactttttctctgtgccaaagacgacgtgggcggcggcgcaggatcactgcgcagatgccagcgcgcacctggtgatcgttgggggcctggatgagcaggtgcgcagggggagggggcgtggtcaggcggtggggcagggcggggcggactctgcaggctcagatgtcccctcctttctagggcttcctcactcggaacacgcgtggccgtggttactggctgggcctgagggctgtgcgccatctgggcaaggttcagggctaccagtgggtggacggagtctctctcagcttcaggtgagggaaaggctcctggtgagacctggggagggagacaggttaggctctagaggacatgctttggctagatctcagggacccctcggctggggctccatgcttagggatgggcaggctggaccccaggaactgtcctcaggttaaattctgggcgttaaaaagttatataccaggtgtatactcaggttagacagttggggtgtctagagtagacccaagcaataaacaggctagagcctgaagaggaaggcgggaccccgagttcatcctctgtctagattcccagcaacacccccactcaacccccctgtagccactggaaccagggagagcccaatgacgcttgggggcgcgagaactgtgtcatgatgctgcacacggggctgtggaacgacgcaccgtgtgacagcgagaaggacggctggatctgtgagaaaaggcacaactgctgaccccgcccagtgccctggagccgcgcccattgcagcatgtcgtatcctgggggctgctcacctccctggctcctggagctgattgccaaagagttttttcttcctcatccaccgctgctgagtctcagaaacacttggcccaacatagccctgtccagcccagtgcctgggctctgggacctccatgccgacctcatcctaactccactcacgcagacccaacctaacctccactagctccaaaatccctgctcctgcgtccccgtgatatgcctccacttctctccctaaccaaggttaggtgactgaggactggagctgtttggttttctcgcattttccaccaaactggaagctgtttttgcagcctgaggaagcatcaataaatatttgagaaatgaatccaggatcctggctctggcgagatcttctgtgctttattccggatgtcctagtttaatccgtacgagtgacccctggactctctcagtgacctcttggcctttggtgggtaacttgccctgggccaggagggcttgaaggtaggggcagtttcccactctacaccattacttcctcagtccctggcatggggcttggctcagagggtgctggggacacagaaatgggtcagacgcagtcctttcccctgggaccgctgcattctggtctagcggggtacaggaacaaaatgaccagtaatgtaatggatgagtgtgtggagaggacacctgaagcatttggaagggtcacctttgtctttggggagagggaccatcctgagatactgcagtccttgagaagactgtcacgtcttcgtggagattatgggcatcctgagacaggcccttgaggcaggtgggggacagggtaccctgatggaacgagcaggtcccttctgctcagtgcatctagggtctgtgactattggatgggtcagtcaggaaatacattccagagaaggtggattttccaagggacaatggaattttgagtagatgaagctgggaaggtaggactttggaagcagaaggtccaggaagaaaaaggcttggagagtgggtgtggtggtgcaagctcgtagtcccagttactcgggaggctgaggtgggagaattgcttaagcctaggagtttgagacggcagtgagctatgatcttgcctgttgatatagtcactgttctccattctgggcaatgcagtgacaccatatctcaaaaaaaaggaatactaggaggttggaaggtatacagattgctgaattcacacagcagtatatgttacatagaacctgggtttctcaaccagggacttttgatctgaattcaccctacactcccagtttcttgcttccatctcggagagttaggggctctccaagaatttcccatggagacaggttcaacaggggagtgacaggttggcagcttttagttctgtgcagaacggagtctagaactacaggctgctgggagcccccaggctgctggaccgtataacagcatcagctgagcaggaaatagaaggaacaccatcacattccctggccaggtggaactcttccactgctgtaacctgtcaacccccctatcctctgatctttctaaacttgcagtctggagcaggcactgggcaagtccaggagcctattgacttgcctactggactgagggccaggctgctggacttccagacacagttggcttggaggagtgtttgagtttcccaccactactgtaatggattttgctgggcaaaaaccaaggtctaaggatgtattaatccgttctcatgctgctaataaagacatacctgatactgggtaagttataaagggaagaggtttaatggactcgcagttccacatggctggggaggcctcacaatcatggcagaaaggaaaggaagagcaaaggcatgtcttacatggtggcaggcaagataacttgcgcaggggaactctcatttataaaaccatcagatcttgaggctgggcatggtggctcacgcttgtaatcccagcactttgggaggccaaggcggatggatcacgaggtcaggagttcgagaccagcctggccaagagaccagcctggccaatatggtgaaaccccatctctactaaaaatacaaaaattagctggtcgtggtggcaggcgcctgtaatcccagctactcgggaggctgaggcaggagaactgcttgagcccaggaggcagaggttgcagtgagccgaaggtcatgccattgcactctagcctgggtgacagagcaagagttcatctcaaaaaaaaaaattaaaaaattaaaaaataaaaccatcagatcttgagagactcatacaccaccacaagaacagtatggggaaaactgcccccgtgattcaattatctccacctggccccacccttgatccacagggattattacaattcaaggtgagatttggggaggcggacacagccaaaccatatcaaagggaaaatgtttctttacctcttctttagcttttctagagctgttgtcctcatccttcttgactcctggacccttcttccatcttcaaaggcagtagggtagcatctagcttcagccatgacaattacttcttctgtatcaaatctctctaggaatgcccccacaatcacctttttttgagacagggtcttgctctgtcacccaggctggagtgtaatagcacgatcatagttcactgcagcctcaacctcctgggctcaagaaatcctcctgcctcagcctcccaagtagctgggactacaggcatgcaccaccacacccagctatttgttagtttttttgtagagatggggtgtcactatgctgcccaggctggtcttgcctccttcttatatgaacagttgggattgcatttagggcctgacctgatagtacaggatgatctcctgtggttcctttttttttttttttttttaattttctttttgaggcaggatctcgctttgtcacctgggctggagtgcggtagcatgaacatggctcacggcagccttgacttcccaggttcaagttcaagcaatcctccaggctcaaacaatcctcctgcctcaacctcctgagtagctgggactacaggcgtgtgccaccatgcctggctaattttttttatttttttgtagagaagcggtctcattatgctgcccaggctggtctcaaactcctgagctcaagtgattcgcctaccttggcctcccaaagcactgggattacaggcatgagccactgctcctggcctcctgtaattctaaatgcagttctgccactattcacccagatagtgcagactccacccagaggttaaggacacagtccccatcaagactgctctcatttcagataccagctacaagtttggggatccccagccacccacatttctgatcaactgcctacaaattctcatgaccccttcaggttccataattcactagaatgactcccagaacttaggaaatgctatgcttacgatttcagtttgttttttgttttgttttgttctttgttttgttttgtttttttgtttgttttttgagacagtgtctcgctctttcgcccaggctggagtgcagcggtgcgacctcagctcactgcaacctctgcctcccgggttcaagcaattctcctgcctcagcctcccaagtagctgggactacaggcgcccgccaccaccatgcctggctaatttttatatttttagtagagatggggtttcaccatgttagccaggatagtctcactcttttgatctggtgatccacccgccttggcctcccaaagtgctgggattacaggcatgagccactgtgcctggccctgatttcagttttcttaacaaaatacaaatcaggacctgccaaatgagaagatacatagggtgaggtctgggaaggtcccaaacacggagctcctgtgtccttccccataacgtcagcacacatcactctctctatgccttccccactctcagggtgatgggttcaccagccaggaagctccagagctcggtgtcctgagtttttttggggtttcagtatgtaggcaggattgatccaattactccttcagtgtttcagttttgtttgttttttttttttgagacccggtcttgccctgttgcccaggctggagtgcagtggcataatcatagctcactgcagcctcaaccttctgggctcaagtgatcctcccacctctcagcctctcgagtagctggaactacaggcacatgtcaccaccctgtccagctaatgtttgtattttttgtagagacggggtttcaccatattgttcaggttggtcttgagctcctgagctcaagtgatcctcctgccttggcctcccaaagtgctgggattacaggcatgagccacctcacaaggcctcgggagtttttagtggggtctcattacacaggaaagattgactgaatcgttggccttgtgattgaactttatctccagtcccccttttggtcaagtggctgcaaattccaaccctcatggttgatgtatctggcatgaccagcacccatcctaagccaccccctcatataaacccaagtgtggtccagggccctgatgaataacaaagactcacagcacttggaaaattccaaggacttagacacttcctagcaggaaccagggacaaattctttaccacacgagctcctcccatcttgaaatccatcatcacgtctgcaaagtgtcttttgccatataaagtgatgttcacaggatccagggatgaggacatggtatattgcaggtcatcacaaatctgtgttagccagggttgtccaggactgaactgataggatatgcgtgtgtgtgtgtgtgtgtgtgtgtgttgtgtgagatatagttaggatatttgtccccacccaaatctcatgttgaaatgtatccccagtgctggaggtgggggctggtgggaagtgttttgcatcataggggcagattcttcgtgaatggcttggaccatccccatggtgataagtgagctctcactcaaagttcacataaaatctggttgttcaaaagtgtgtgatacctcccctgccacgctgtctcttgctcctgctttcgccatgtgagacacctgcttcgcctttgtcttctgccatgattggaagcttcctgaggcccctccagaagcagatatctctgctatgcttcctggacagcctgtagaatcatgagccaattaaacctcttttcttctaaattacccagtctcaggtatctctttatagcaatgcaagaatggcctaacacagctgggtgtggtggctcacgcctgtaatcccagcactttgggaggccgtggcgggcagatcacttgaggtcaggagttcgagaccagcctggccaatatgttgaaaccccatttctactaaaaatacaaaaattagccaggtgtggtggcgggtgcctgtaatcccagctacttgggaggctgaggcaggagaatcacttgaacctgggaggtggaggttgcactgagctgagatcacaccattgcactccagcttgggtgacagaatgagacaccatcttgaggaaaaaaaaaaaaaaagaacagcctaacacaatattaaagggagtttatttgggagaattagctcacacaattataaggcgaagtcccatagtaggctgtctgcaagcccgggaaagacagaaagtggtagtgtggctcagtccaagtccaaaagcctcaaaaatcatggaaggagacagtgcaaccttcagtctgcagccaaaggcccgagaacacctgggaggccactggtgcaagtgccagagttcaaaggccaaagaacctagagcctgatgtccaagggtaggaggagaggaaaccaagtgattggcacagcaggggaagagagagggagctgactcagcgagcaagccagcttctcccgccttcttccacctgctttgttctagccacgctggcggccgatgggatggtgcccactcacattgaggatgggtcttcctctcccagcccacggactcaaatatcaacctcctctgataacatcctcacagacacacccagaaacaatgcttcaccagccatccaggcatctccctccatccggtcaagttgacaccaggtgttaaccatcatagcatcacagcacagggcagagccatctgagatagactcccaggtgggacagcagtgagatacttacctagaggtctaactacttgatgagccagattaagtgattgtctggatgatacagacagattgtaatcaaacatactgacaatgaggtggcgactccggatcgaatgaagaacaacagagacagaacgacagacggacttcatggctgggtgtggtggctcacacctgtaatcccggcactttgggaggctgtggtgggtggatcacctgaggtcaggagtttgagactagcctggctaacatggcaaaaccccatctctattaaaaatacaaaaaaattagccaggcatggttgtgggtgcctgtaatcccagctactcaggaggctgaggcaggagaatcacttgatcccggaaggtggaggttgcagtgagctgagatcacgccactgcactccagtctgggtaacagagtgaaactccatctaaaaaaaaatttttttttaaaagaacaacagatggacttcaagtctgaccgacagcctcaatggggagcccctgccaggctgtcgtgacaaatgtacagcaacagcacgggcaggcacaagaggtttcagcatctcccctgaggatggagctgagaaagtgccagctgtggctgaggcagaaggaagagaggctgagtgcagtggtgtgcacctgtcatcctgaaacccacccaacagtctcatagaacaggggtcctcatcccccaggccgcagaccggtactgatctgtgccctgttaggagccaggccacacagcaggaggttagcagcaggtgagcaagcaaagctcatctgtgtttacagccactctcctttgcttgcatgaccacctgacctctgcctcctgtcagattagcagtggtattagactctcacaggagcatgaagcctattgtgaactgcacatcgagggatctgggtcataggataatcgaatgactgatgatctctcactgtctcccatcacccccagatgggactgtcttagttgcgggaaaacaagctcagagttcccactgattctgcattatgcagagtggcataattatttcattacatattaaaatgtaataattatagaaataaagtgcacaataaatgtcacgcagttgaatcatcctgaaaccatcccccaccccagtctgtggaaaagttgtctgctgggtgcagtggctcatgcctgtaatctcagcactttgggaggctgaggtgggcagatcaccggaggtcaggagtttgagaccagcccagccaacatggtgaaacgccgtctctactaaaaatacaagaattagctgggcatggtggtgtgcacctgtaatcccagctattcgggaggctcaggtgggagaatggcttgaatctgggaggcggcagttgcattgagccgagatcacgacactgcactccagcctgggcaacagagcaagactctgtctctaaaaaaaaaaagaaaaagaaaaattgtcttctccaaaaccggtccctggtgccaaaaaggttagggattgttgccatagacagttcttttcaataaacatagaaattgaccctgtggtcttttttttttttttgagacggagtctcgctctgttgcccaggctggaatgcagtggcgcaatctcggctcactgcaagctccacctcctgggttcacgccattctcctgcctcagcctcccgagtagctgggactataggcatgcgccaccacgcccagctaatttttgtatttttagtagagacagggtttcaccatgttggccaaggtggtctcaaactcctgacctccagtgatccacccacctcgacctcccaaagtgctgggattacaggtgtgagccaccgtgcccggcctgaccctgtggtcttaaagcttgaaatttagcattagttttatctggccaggcgcggtggctcacgcctgcaatcccagcactttaggaggctgaggcggatgaatcacttgagctcaggagttcgagaccactctggccaacttggcaaaaccctgtctctactaaaaatacgaaaaattagccaggcatggtggcgggcgcctgtaatcccaggtactcaggaggctgaggcaggagaatcgcttgaaccagggaggaggaggttgcagtgagccaagatcgcgccactgtgctccatcctgggcaacaagagtgaaactctgtctcaaataaacaaaccaaaaaaatttgttttatctgagttccttctcaggaaaggatccccaggctctcaaaaatcatcagagttgaaactcagcagatcattacatgcagacgatgagacaccaggctgctcattcatcacagttgcttcctgacccctcccgcgttcctgttttaccacatattgttctatttctcccctgctatataaacccctaattttaatcagccagagagatggatttgagactgagctcccatctccttggttgcagcatccaattaaagcctaaagccttcttgcttggcaataatccttgcctcggtgattggctatctgtgcggtgaacagcaggacctagaccaaacccctggtatttccgtaaacactcccagcactttgggaggtggaggtgggaaggtcacttgagtccaggagtttgagatcagcctggggcaacataccaagacctcatctctacttaaaaaataggctgggcgcagtggctcacgcctgtaatcccagcacttagggaggccgaagtgggcagatcaccagaggtcaggagttcaagaccagcctggccaacatggtgaaaccctgtctctactaaaaatacaaaacttagccgggcatgatggtgggtgcctgtaatctcagctactcgggaggctaaggcaggagaatcgcttaaacccaggaggcagaggttgcagtgagccgagattgtgtcactacactccagcctggaaaacagagagggactctgtctcaacataacataaaataaaataaaataaaataaaaataaaaggctgggcatggtggtgcacacctgtattctcctgtacttggaaggctgaagcagaaggattgcttgagcccaggaattccaggctacagtgagctatgattgtaccaccgcacaccagtctggcagagaccccagacagcagagttaaattggaactgccctgggatcctatccatggccagagcacgccctggagcccctggtacccccaggctcagattctgggggcagcagggcccaagggagctccaggtcaggagcccagagagccaagtggctggcctggatatgtccgtcctctcctcgccacctgccatctgcatttatgatcagctcacaagccctacctcccagtcgcctggctgtaacccaccagtgttccagaaggcccataatgaccccaaatgagagagtcaggtcccaggccccaggccacaccctccactccaagattcaacttctctgggaagaaaggaatccctggagcctatccctatttctggaacagaccttaaccttcagttggcttttgttttcctggaatattggtggtgccagaaagactattctaaaggctgacaggtggctgagtgtgatggctcacgcctgtaatcccagcactttgggaagctgaagtgcgaggatcatttgagaccaggagtttaagcccagcctgggtaacatagtgagacccccatctctataaaaagaaaattttaaattaaatgagctgggcatggtggtacatgcctgtagtcctatctactcaggaggctgaggcaagaggcttgagcccaggagttcaaggttacaatgagctatgatcacgtcactgcagcagtccaccctgggtgacataacaggatcctgtctctacttcaaaaaacaagcaaacaaacaaacaaaacaaaataaaataaaacaaaaaacaggctaggtgcggtggctcacgcctgtaatcctagcaccttgggaggctgagacaggtggattgattgcctgagtcaggagttttcaaccagcctggacaacatggtgaaatcccgtccctatcaaaaatacaaaaaattagccgggtgtggtagcatgtgcctgtggtctcagctactca

SEQ ID NO: 77 - DNA, 1175 bp, Homo sapiens
gttatgccagggccctggggacgctgggtgcactggagcaggagacccctcttcttggccctggctgtcctggtcaccacagtcctttgggctgtgattctgagtatcctattgtccaaggcctccacggagcgcgcggcgctgcttgacggccacgacctgctgaggacaaacgcctcgaagcagacggcggcgctgggtgccctgaaggaggaggtcggagactgccacagctgctgctcggggacgcaggcgcagctgcagaccacgcgcgcggagcttggggaggcgcaggcgaagctgatggagcaggagagcgccctgcgggaactgcgtgagcgcgtgacccagggcttggctgaagccggcaggggccgtgaggacgtccgcactgagctgttccgggcgctggaggccgtgaggctccagaacaactcctgcgagccgtgccccacgtcgtggctgtccttcgagggctcctgctactttttctctgtgccaaagacgacgtgggcggcggcgcaggatcactgcgcagatgccagcgcgcacctggtgatcgttgggggcctggatgagcagggcttcctcactcggaacacgcgtggccgtggttactggctgggcctgagggctgtgcgccatctgggcaaggttcagggctaccagtgggtggacggagtctctctcagcttcagccactggaaccagggagagcccaatgacgcttgggggcgcgagaactgtgtcatgatgctgcacacggggctgtggaacgacgcaccgtgtgacagcgagaaggacggctggatctgtgagaaaaggcacaactgctgaccccgcccagtgccctggagccgcgcccattgcagcatgtcgtatcctgggggctgctcacctccctggctcctggagctgattgccaaagagttttttcttcctcatccaccgctgctgagtctcagaaacacttggcccaacatagccctgtccagcccagtgcctgggctctgggacctccatgccgacctcatcctaactccactcacgcagacccaacctaacctccactagctccaaaatccctgctcctgcgtccccgtgatatgcctccacttctctccctaaccaaggttaggtgactgaggactggagctgtttggttttctcgcatt

SEQ ID NO: 78 - protein, 275 aa, Homo sapiens
MPGPWGRWVHWSRRPLFLAVLVTTVLWAVILSILLSKASTERAALLDGHDLLRTNASKQTAALGALKEEVGDCHSCCSGTQAQLQTTRAELGEAQAKLMEQESALRELRERVTQGLAEAGRGREDVRTELFRALEAVRLQNNSCEPCPTSWLSFEGSCYFFSVPKTTWAAAQDHCADASAHLVIVGGLDEQGFLTRNTRGRGYWLGLRAVRHLGKVQGYQWVDGVSLSFSHWNQGEPNDAWGRENCVMMLHTGLWNDAPCDSEKDGWICEKRHNC

SEQ ID NO: 79 - DNA, 54303 bp, Mus musculus
agcctgacagcctgaggtcccactctagcacccgcacacacgggaacaggacagaacagattctcacatacgcagagcaaatgaataagtgtaatttaaaaactatgaagagctggctcagcggttaagagtgcagactgctcttccaaaggtcctgagttcaaatcccagcaaccacatggtggctcacaaccatccgtaatgaaatctgatgccatcttctggagtgtttgaagatagccacagtgtacttacatataataaataaataaataaataaataaatatttaaaagatgtaatttagtgccagtgtgctggcttagcttgggttccaccccacctaccccccccccccgcccacacacacacagaggaggaagaggaggaagaggaggaagaggaggaagaggaggaagaggaggaagaggaggaagaatctttgctgaggagtttcagtgcctgtcacctctcagccttgaggcaggtgtctttgtctccactttccaggctgaaggagttgaggttttaaactatgtccacaaaaagcagagaagtggagctgaacctcccttcctaagctgttcttgttcaaggttattctatttctttgttttgtcttgctattgtagcccaggctggccttgccctcctgagctcaggtcatccctctgactcggcttccagagtagctaggatgacaggtgcatggtaggacacctgacccccttgtcgttattgctagcttcttttcacaggcactattattttctgtgtgcatagtgtgtgagggagcatgctgatgcctggtgtgtgtgtgtgtgtgtgtgtgtgtgtgtgtgtctgtatgtgtgtgtgtctgtgtggtgtctgtgtgtgtgtggtctccattccctttcacttgggtttgagacttaaactcaggtcgccaggcttaggcagccggtgcctgggcttgttgagcctgttttgtttttgagacagtgagggtgtcactcacacatagctcaggcccgattcaaactcccttgatttcctgatccttctgcctccaccttccaagtgctggaattatggctgcttatgcagtgcgctgggaccattacctaggtctgtgtgctaggccagccagctgcccactgaggcacatgaccaggctgtcattgcattacagggctcttgttttcatctctaccgctctgatcgacactggagaagcttgctaggatagccagagagttacacttggcgcatttttgagccccagggttgcagaaggactgtgctcactggttcagggcgctcagatggtgggcatctcattttacaaacacggaaaatgactctaagagaggtgaagccccttgccacagacggctggagaggacgggttcccggctcctggtcctgagccctaggcccgcggactcgcccggagtacctcgatccctcgccctctgcctcaccttgcccttgacgtccagaatgaagactgccgaggccgacatggtggcagtccgtgaagctaggaggcgagagcgagctgcagaggcggcagcgctgcggcttccttcttcctgcggaagcgccttcgcccaggtgagccgccaggtgagcgcgtcttaaaggggaggccgccaggtgaatgcgtcttaaaggggaggccgccaggtgagaggcacggtcggcggcaaatgccaaggctggtccaggagccgcgactgctgtcctgtctcaagttctccatcgatcctcgcatccgcctacccatgtatccattcacgctccgcttccactcacccacccacccacacatccatccatcacccccttccacatacgtatacacattcacatctacattaacccacccatacatacacgtatccacccaatcaagcatccatccacccaccagggcatcagcctgttcgtgtgtctatgtaacttgttctctcacccacacataccagtttcaacaggacttggccctttttctatgtgtgacccggtgcccaccactagatgttcagtagtgttaatccttctcacactaaacattttaattgtttcgttgtttctgttgttattattagtattgctgttgctgctagttgtatatatttttttcaaaacagagttctctgtgtagccatagctggcctcgagtccacctgcgtcttcctctcgagtgctgggattaaaggcgccaccatgcttcgctcgtgttgtttatttgttttgtgttattaattctagaagaagccgggcggtggcgcacgcctttaatcccagcactcgggaggcagaggcaggcgaatttctgagttcgaggccagcctggtctacagagtgagttccaggacagccagggctatacagagaaaccctgtctcgaaaaaccataaaaaaaaaaaaaaaaaaaaaaaatctagaagaaaggttgagatagcccggatggcctggagctcattgtgtggtccagactggcctcagccttacaagttctgtgattagtcacgaaccaacatgtctgactttgttttccgttttctaatttcattcttttttttttaatatcccaggctacccttaaactcaagatcattctgcttccccattgctgggataccgttttgcggaaggtgatggggaaaaaaacccactctaaaccttagcctagccatctacatgacgctccgctgtggaagaaacgtttcctgtgcagccgccagggggcgacaaagcccgtttgggcatcggtgcgggctctgacctttaacaggccgggagtccagatgcagctatgaggatctcccaaggcaattgtcctaaagcagagggcctgtgtgaagagcttatcagccaccacctgggaggaagcagagcacagacagtctcagggccacacagccgggttatcaggccacaattctcttattctggttgttttgacagtcctagggggtggaacgcccacctttgctggtgacaggcaagccctgtgcccctgattacattcccagcccttaatgtttttgtctggggcctcatgtatagcacaggctaaccttaaattcccccttttttctcttttttttccttttaaatctttttaaagattcatttatttattatatgtaagtacactgtagctgtcttcagacaatccagaagagggagtcagatctttttacagatggttgtgagccaccatgtggttgctgggatttaaactccgaaccttcggaagagcagtcgggtgctcttacccactgagccatctcaccagccctctttttttcttttttttcaagacagggtttctctgtatagccctggctgtcctagaactcactttgtagaccaggctggactggaactcagaaatctgcctgcctctgcctcccaagtgctgggattaaaggcttgtgccaccaccgcccagcttttttatttttcaccttaaattgccaagtcttctgcctaaccctccccagttgcagcactatcttcaggctcgccataaataccttccctacacccttttttaaagacccatctagggggctggcgagatagctcagtggttaagagcaccgactgctcttccgaaggtcccgagttcaaatcccagcaaccacaaccatctattccaggccttcatatttaaccaaggatcaccttgaactcctgagcacctctgtaccttctaagggacagggtgacatgcataccctaccacagtccattgatgtggtgcagtgatcagtgatcgggagggaacccagggctttgtgtatgctaggcaagcgctctaccggctaagccaagccctcattttctggataaccctttgagggaaccagcgagctgctgttatcttccattggcaagatggggagcctgaagtttggctccaagagggtaaaattgtccaacagttttgtttgtctggttttgttattaatgctataatatagtcccagacagcctggaaatcattatcctcctgcctcagtgctgcggggatcacaggaatgctcgatcgtgcccagtttacgtggtgctggggctagaacccagacactcttgcatgctagacccatgatctaccagctgggctcaacccctcagcttttagctggctccagctcataggctccaggagaggagtccttccttatcatcagcagacacaggcagcctgggctcgcctcacctctgctgggagtgggataggcagattccaggggcttccctgcttgcaaggacactgtgatatacatacatacatacatacatacatacatacacacacacatttacacacacacaaacacatgcttgagctcacacacacatctcaaaatacaaggtgtggagagagccagagaagccaggctggtaacacaagcttttaaccctagcactctccagatagaagcaggcagatctccacagtcagaactctccaggacagccagggctacatattgtcaccttgactaaagacagaactcataattgggggggggggtgtcagtgaaattgctcaaaggtggctgtttcagcaccagtctaatccccaggtccttcatgattgatgggagagaaccgacttctataggtggtcctctgccctctgcacacagacacagaaaataaaccaaatataattttaaagaaagatggctagctcctaagaagggaatgtgtctggagttgtcctcaggcctccggacttaaatgtgcacagcacaaagccagcaacaccctcctgggacctaagatgcattcacatggtaaatggaacccagaagcctgggcccaacgccctggaatctgaaactcaaggcctagttagctaaaaaattcatgagaccaagagcctccttgggggcagagaacagactctcactgtcttgcctcggccagcccagcccagcccagcccagcccagcctggcttagcacagcccagtttggctcagtagccaccaccatccccgggatggtggctttgtcccagtttgttctaaatatcttgtcctcctcctccctccctgtgtccgacctcagtttctacttatcagcctccttccttctcctccctctaaagaaatgtctaccccagcaatcagcgcccaccctccctctcacacctatggctcccaacccagcagtcagactccagctgacctatggccctcacccctcattacaaaactctcaccaaatttgctttctttatgtcattgtttctctgtggagaggtccctctgacttcctactttgtgtccaggacacagccctcctctgggtttttctatggccggcagggacccttcacaactggctactaaccttgctgttttgaggcagggtttctttgtgaaaccttggctactcattgagtagaccaggctggccttgaactcagagatccacctgcctctgtctcccaagtactgggattaaaggtgtgctccaccaccacccagcttgttgatatttttgagatggcggtggtggcacaggcctttaatcccagcactcgggaggcagaggcaggcaaatttctgagttcgaggccagcctggtctacagagtgagttccaggacagccagggctacacagagaaaccttgtctcgaaaaaccaaaccaaaaaaaaaaaaaaaaaacaaaaacaacaaaaaaaaacagggtctttctttataactctggctgtcctgaaattcattatatagactagggtggccttgaacttacagagatctgcttacctctcactgctgattaaagttgtactctcagagtgagttccaggacagccagggctatacagagaaaccctgtctcgaaaaaccaaaagaaagaaagaaagaaagaaagaaagaaagaaagaaagaaagaaagttgtactctcaacaaaaatgaagtaagtatttttaaacatcctccttcttcgcacctgcactgcctggttccagtctctctagaaaccattgcttgttcatgtcgtttatgtataagtgcatgcatgcacgtgatgtcttcccaagctcggttcctcttcacccatcatacccccattgccatatgggaccaaactactaaatggctgtacaaccgtggagagggtgtgggcttctcagccccacttcctgaggttcacctctttgttcctcctcatgctcactgtgtggcagtgcggaaattgcttaacctctctgagtactttccccacactggaaagttgttataaagacttcatataaaaaaaaattcgaatttctcctgactctgagtcagctctataaaaactcagcttttatgactggacacatggctcagaagtcaaggctcttccagaggacccaccctcaattcccagcatccacaccacaaccacctgtaatcccagttccggggaccaatgccgtctctggcttccacgagcagaaggaatacacaagatgtgcacgtgcagacaaatgctcacacacataagattaaaaagtaatattagtaccactcccaggctcttccactctagaaagacactgcttgtttatttgtgtgtatgtcacgtgtgtggggagcccggggaggccagcaaagagcctgggagtcagaggagctagagatgttggcacttgtgatccagcctatgtgggagcaggaaccgaacttgggtcctctgcaggagtagtgtgggaggcatggaggtctaacccatactaacacatattttcactataaacgataaagtttcttctgctgccacaaaacatttttcccttaaggaggcacagtctaattaagggaaaggcccctgtgttcttatgccagggtaagcctatgcttgtatccaaaatgctttccagaaaatgaactaagtcccagatggctcctgctccaatgcatccaaccaggacagcatcctggagaccaggagacaggaagattctgaagataatggataaacctacagagaggaaacatcccaatagaaaatccaagctggggccaggcgtggtggcacacgcctttaatcccagcactcgggaggcagaggcaggcggatttctgagtttgaggccagcctggtctacagagtgagttccaggacagccagagctacacagagaaaccctgtctcgaaaaaaaaaaaataaaataaaataaaataaaaaaagaaagaaagaaagaaaagaaaaagaaaggttgcctatagtagtagacatatgatgttgttttgttaagggttggtttcggggttttgtattaccagtcccataaataatgactgaaatacaaagagaggtttccaaaatcgcttgcatgattagtacaactattgatattacagcaaaaaaaaaattagaagaaattagttaagagaaaggcaaacggaaccacagttctacaaaatagagcaactatagattatttgtggctcaagcactggcctggtgatcaataatttcctggcgtgtgttgctttaatgtgtcagagttttctcatactatttggtgatcaaattaaagaggtccatccgcataaagagataagcaaaactctcttaagtcatctgcgaagggccatcatggttcagatggcttcctcgatccttggtcattccgttaggtgttcttgtaaccatcttgtgcgtgtaatagactagccacgcagcaatgccttcaaccttggcctccattacagtcgtaaagttctctgtaaggaaaaaaaaaaaaaaaaaaaaaaacaagtggagatgtaggagcatggagatccttgtgctcacagagaaacaacctggaatgttaaacacacgggatgttccttcacagaaagggatacaagggctgcaggacttgttatcagcacagcaggccaggagaagatgtgacctttgcactacccgtgtgacctctccaaaaccacactggatcctcccccaggccaacatcaagagcttggggatggctctatgtggctcaggctctcctgaaaccagctatatacatagccaaggatggcctagaagtcctgcacgccatgctaggttcttctatgcctccttccacggcccacagagctcccaactagactaccagacacccttgcgactcctctcctcctctcttctctcctctcttccttttctctccttctttctttttcttagctggggatagacctagccttacacatgctaggccaaatgctctaccacaaagccacacccgcttcccttcctctattttaagcattttccattttaactgtctcttttaattttggggggcgggaggggagtttcaagacagggtttctctgtgtagtcctggatgtcctaggcctcactctggagaccagggtgggctccaactcagggatccacttgtctttacctcctgagtgtgccaccaccatccggctcttttccggttttgtttttgtttttgtttttgtttttgtttttgttttttttgagacagggtttctctgtatagccctggcagtcctggaactcactttatagaccaggctggactcaaactcagaaatctgcctgcttgcttctgcctccagagtgctggaattaaaggtgtgtgccaccattgcccagcaacttctaaggttgctttttttcttttcttttcttttctttttttttctttctgtttttatcgagacagggtttctctgtatagccctggctgtcttggaactcattttgtagaccaggctggcctcgaactcagaaatctgcctgcctttgcctcccaagtgctgggatcaaaggcgtgccccaccacgcctggcttaggttaaccattctttattttctcaagatttatttctttattgtatataatagtgttctgcttgcatatatgcctgcatgccagaagagggcaccagatctcattatatattgttgtgaaccaccatgtggctgctgggaattgaactcaggtcctctgaaagacaggatctggaagagagcaggcagtgctcttaacctctgagacatcgctccagccctaatcattgttattctagaacttattttagatcatgtctgtcaacatttcaaaccttccactgatcaaagaaaatttttgtttattgagactgggtctcacgtaccccaggctgtcctcaaactcctgtgtagctaaggctagcctggaactactgtgcctccttcttcatctcccaagtgctggaatgataggtgtttttcaaaactaccttttaaggttggacatggtggcatacacctttaaaccccacactcagagatagaggcatgggtatctctcttagtctggtctacatagcaactttcaggatagctaggaccccagggaggctcagtctcaaaataataataataataataataataataataataataataaaggagatcctgcagcttctgcctccccagtgctgggattggaagattaaagtcgtaaacctcctacccagaggcccagggacatgccactccttctcttttattcctttctgacttgtgttcaaactctcaaaatcttaccaataggatgaatgagcacatgacaactttttctgcatccctagctcagtcagcgctcagtacctggacaaagaatgacttgctgagcggtggttgagcacacctttaatcccagtatttgaggcagacagatctcttgagttccaggccagccgtgttacagagttccggtacatccagggctgcacagagaaaccctgtctaaaaacaaaacaaaaacaaacccacaaaacccaaaacaacaacaacaaaaagaatgactgaccagcagatgcaacacactaattgtccacagagagagcggactggaaaccagaaggtggctgccccccaacgcccctccctgggcacgcccctaaggggcggggctgtcttgggcgtgcgcgctgggggcggtgtcaggcggggcagggcggggccagcagcgcgcggtgtctcccgcccgcttgggttggggtcgcgctggcttcggactcagctctcctcggttgaggccatggaggacgatcggaaggacgcagtctatggtaggagtagcctccggcctgtaggtcgcctgtgctgacttgggaaggagggggttttgaggaagggcaacatctgagagccttaaaacaaaacactcgtggctgcaggcagtacgaaggcccttctgtccgcgtcctcaggcctctgcatcccgcgctggctcagccggagctcttggccctagcccaggttgtcccccgtgtctcttttcggggatcttcaagcttactcccttcctgagcgatgagccgggacttatggcgcatgctcctcgcctggaggtcccgttatctgggagaattaggtgatgggcgggggaggggatgcgaggcgatcttagcttggggtgtgggcaagaatggggcccgacctcgccacatgtcccgtctccttaagacccaagtgtcctccacatcttcgccatttacatccagaatagcgactccaagcttagtactagatggggaaactgaggcaaggctgaagagtcccgtataactggaattaggtgcctaatgcgacagggaaggtcagagacgaggcgggcaggcggggagcaatgcagaaactttccctgcctgtgctgattgttgcaggtgcctgtaattttaagggttccaggagacccggacctcagtaaggcctgaggtggccttagccacttggagctgggggtggggccaagatgcggatttctcaccctacccgactccgggttcccacggactgggtgttgaactctgagcctccttcctcttatctattttaggttccttgggcctaaatcggccacaagccttaagaggcatagctgagactctggcagaggggctctatccctccccctgatataccactttgtgtgactggaacttcctggaaactgctagactctagagtcttggggagggggccggaaatggttcaaaaataactagaaaagcaagtaggctctctgccttcctcctctttcctgggtctgtgcggtccagggggaggaaaaaaaaagaatagacaggtcccagaggctgtgacacacccttcctggcctaaaggaaggtagcaagacctagcctttcagggctctcccagcttgaagttgccagcccccagaccactagaaggtctgaagccccaggctcttgggttgctgtgcaactattgagtgcttctggctgtctctggtgtgggattcttggtctgggagcctgagtatgcttgggtatcacacctgagagaatctttggtcttctcgaggtctgtttgaaataaaagtggggcagaatgagcgtggatattattttacctggcttcaatttgtccaaagggtggaactttttttgcggggagaggcagaggggggctgtacattgtgttgcgatggaaatcggagactcatgcatggcgcatggtcagtaagccgtgggtttgaagctagaaccctggctcatgtttagcaagaactggaatctagatggggtcgctcatgctcagaaagcactggtgtttatgtgtgggtggggctggaacccagggcttctacaagcgctgagactgaaactcaaggcaacacgcatgctcagtgggtagtagggcctggaagcctggaagcctcagtcgtgttcagcaagtgattggcctagatcccactctgctgctaagcccccaaccccccagccccaggcccccaggaatttaacgaacctttctcaggcaaaggtctgactgggaacgcagcagtccaccgaggagagaaaggcgtagaccgccagaaggaccagtgagaacatgtaattgtaggttgttaaggttgtagagcaacggacaagatgctatgtgtgaaagagccactagggtctattttaagaaatgaaggttttaagaaatgaaggttggcgtgtgccggccgggtgagatgattgagacacgtgtgttccaggcagaaggaaagcataatatttttctctatgagactcaggagcctgtgaaggaggatctacctggcttccagagccacaccacctcctccaggcggaccaccctgcttgactgcaaatggaaattttctgttctctctttttttctctctcttttccttttttccttccatccttactttctccctccctcatttcttcccttcctccctttcttccttatggatactgaggtttaaacgtaggcctcataggcctcgagcatacacattcttgaggtagatgtagctcagacagccttgacctgagtcatcctatctttgtacctcggacctcagcctttttttttttttttttttttttttttttttttggtttttcgagacagggtttctctgtgtagtcctggctgtcctggaacttactttgtagaccaggctggcctcgaactcagaaatccgcctgcttctgcctcccaaatgatgggattaaaggcgtacgccaccacgcccatctacctcagcctttaaaagtagctgggattacaggctaccaggccttcctattggaaggaccttgttttgcctgaaactcagtccacctgaccaaaataaaaattctgtgcaagcatcccggtaacattgctgtaaatagtttaagcttcctttctaaattcactatgtagctgaatgactgatccttttgcctccccttctaaattctgaggtgatggttgtgcaccaccccgcccagtttatgtagtgctaggggaaaaaacacccaagggttcctctgtgtgacttatcacgccatagctcaatgtcaggtttctctcgggcataatggctaatcccgcggtaagtgctttcccattcttcagtgtgaccaatgggaatggcttcggggttgttacaggaaggctttagagagatccagcttcaagtcaagctggggtctgatctttctgggttttgagacatggtttcagggttttactgtctggctgtcctcgaactctatttgtagaccagactggccttgaatttagatctgtctgcctctgtccctgcctctctgctctctgcccctgtccctgcccctgctgggatgaaaggcataacctcgcctgggtaaggttctgatctttaaaggctgtgagactgggtgagtgggtgacctctctgagtctgcaccattatgcataaggctggcaatttttgtttgtttgtttgtttgttgttttggggggttggtgtttgtttgtttgtttgtttgtttttctgagacagggtttctctgtgtagccctggctgtctggaactcactttgtagaccaggctggcctcgaactcagaaatcagcctgcctctgcctcccgagtgctgggattaaaggcgtgggccactacgccccgctggctgtttgtgttttgacacagaatccatcacatgtagtgcaggctggacttgaactcactgtctagcccaggatggccttcaatttattatcttgctccaccttttaagagcaggggtgacaggcatgtgccagcatgcctggctcgactccgttgtcagtgatgtgtgggaggaccttgtgtgctcatcagctacccctggggctgttggcatggatgatgcggcttttccgtgaactgatggacaggcaaacctacctcacgaacagcgtaagactcgaccgggccgggcagggcagggcagggcaggaagcgcctttcccggtagataacatgaatctggaaaaagatggcagctccacaggaaagggaaatggctcagggcctggcagtgtccttaatgtcacagcctttctcccagcccagccttggcatgagcaggcaaagattctggaacccaaagcagagtagtgcacagtgaagcttggctaactaactaactaaccaaccaaccaaccaactaactaactaactaagcagacagatggccttgctgggggattgttgctgtttgtactgcgcttgccagggacccatgggtcaatcctcaggctccgtcatccccagcacctcaggagccaggtgctgtggtgcataccagttctcaggaggcaggggcaggaagatcagaattcatcgttggaattcatcattggctacatatgagtttgaggccagcctaggctacatgggagcatgtctcaaaaaaagaaaagaaaaagaaagaaagaagaaaagcaagggcctggctaggtgcccatggttgagagtgttcactactctagtagaggactgatttggttcccagcacccaagctggagaacacaacctctgataactccagctctataggcgttcacatcctcctccgagcacacggtacacataacctcaggcacacataccacacacctgcacatgtatgaaaacaaataaagctgggtgtggtggtgctcatcttgagttccagcacttgtaggcagaggctggcagatctctaaaagctgtaggccagcctggtctacctagtaatttctttgttctctctctctctttcttttttttttttttttttggtttttctagacaggatttctctgtatagccctggctgtcctgaactcactttgtagaccaagctggcctcaaactcagaaatctgcctgcctctgcctcccaagtgctgggattaaaggcatgagccgccacacccagctgtaatttctcacccctcccgttcctggttgctcttcctaaccagtctcccacttttttttttaatttggattttcaagacaggtgtaacagtggaactcgctctgtagaccaggctggccttgaactcacagagatccacctgcctttgcttcctgagtactgagattaaaggtgtccccactacccactgttaggacacatgtccccttttgcttttctatcttttaatgtttgacccagtgagtggtagggtcacttacagagtgtgcatgaggggctatttacagggctgtcagctcctaaccagtggtcatagcgctgaggaaatgtctctcccttcctagcaaccatatcctcccatgtggatatatggatgtgtgtgtgtgtgtgtgtttgtgtgtgtgtgtgtgtgtgtgtgtgtgtgtgtaattggtggggttagagttctgccttgctgctgaggtgcttgaatgaggctcaggcagacagggaggtgctaggctaccaaccttggggtgctaggcttgtggaatgcagcccaagatgggggccccagcccaggtgagaaacagcccaggcagaggctgaggctgggttctcaaacatccagatgcccctgtgaactgagaggagctgagaactaggcggcactcagggctgagtgttcggtgcttggaagggccttctgcagagactcaggcggcttgattgtgatgaaggtttccttccgtggaggttctcgatgagaagacagtccttgcttgtccaaattgttttttttgttttttgttttttttagatttatttatttattatatgtaagtacactgtagctgtcttcagacacactcaagaagagagcatcagatctcattacagatggttgtgagccaccatgtagttgctgggatttgaactcaggacctttggaagagcagtcagtgctcttaaccactgagccatctctccagccccccaaattgtttactcatcgtggaaactcaggatttactcagggtggaccagagattaaataccttttgcaggaaggaatgtccaagaagggaagcttattggctgactctcaggcccatctagatacctaacatgaagaactctggatttctatgctacctgaccagttgccatggccatcgtgtggagtgtcatggtcatgtgcttcaggacaggaactcggctaggagcacatccaaatgcctaccattctcaattatgagaattgccggagtttcttcatctgctccaccttatcagtttttgtctggtgacacagttgcatgtgccccacatgtgtggtcatgtgtacatatgtggagaccacaagttgacacctggtgacctggtgtatagtttatacttttataatactggggttttgtgctgggcagtggtggtgcatgcctttaatcccagcacttgggaggcagaggcaggcagatttctgagttcgagaccagcctggacagagtgagttccaggacagccagggctacacagagaaaccctgtcttgagaaaaaaaaaaaaagaatggggttttattattgttgtttgtttgtttccgagacagggtttctttttttgtgtatccctgggctcttggaacttgctctgtaggccaggctgggcttgaactcacagagatccgcctgcctctgccttcctagtgctgggattaaaggtgtgcgccaccactgccagcccacttttgaaagtttttacaaatacatttactcatttattgtgtttgggtgagctggcttgtgtgtgaggacaggcttgggagtgagggagtgagttctcgccttcaacaatgtgaacctggaggatggtgctgagggcgtccaacttggcagcagtttgcttgtaccctctggctctctaacatgttctgagaccgtgtctgtgcctaagcctgttacagatcttaccccagcttttatgtgggtgctcatgcttcagaccaagggttttgctcacaaagccaatttctcctggactcctccatatctctatctttttagacttatgattttagttctatatgtatgggtgttttgcctgcatgtatgtctgcactgtgtgggtgcagaggtcagaagaagaggtcgggtcctctggaactggagttacagatggttgtgagccagggtgtggcaatgagaaggggtcctctgtaacagctgtgcccagtgaatacattgtagcaggactggagggagcgagggcttagtggttaagagcactggctgttcttgcagacaactcttcctttcccagaacccaggtggtggctcaaaaccatcattaacttccgtcccaaggttctctattctgacctctgctggcaccatgtgtccccattgtgcatagagagacatgcaggcaagacactcaggtaaaataaaaaccaatagtcctgatttaaacaagctttaaattggttactttgtagccttatccaagaaggaggctcgccttgctgaggagcaataatatgcagtactgttaccctatgaactaggcaggagagaatagtgtgggcgatgagactagggtgtgggtgagactcaaagtcagtgaatgtctctttggttcatcccagcaccaaacacgtggaggttagaagacagtaggttacagatgtgctgggtctgtggcctgcagaagcacctggagagaaaggggaactactcagaacttgtctcggagaggaagtgagggtaaaagtggtttcttcctctctgacttttgactgttgtatggttttgttttgtttttaaatctgtattgaaatgtctgcatgtgtttatgacagggtctctagtagcccaggctgtcctcacactcaggttcaaactcaattgaactcctgacctgcctcccttcaccatctgaaggctggggtgacaggcatgttccaccctgctcagttgatgggttgctagggaagagcccaggtttctcaggttttacgcgaagccagcgctccaccaatgacacctgtgagcttttatttatgtattcattctttcattcattttctttttaaaaaaattattattatttatttatttaatgtatgtgagtacactgtagctctcttcagacaccccagaagaaggcatcacatcccattacagatgattgtgagccaccatgtggttgctgggaattgaactcaggacctctggaagagcagtcagtactcttaactgctgagccatctctttagctccattcattcatatcctgagacagggtctctctattcaactctgggtatcctggtactcaatatgtaactaggctggcctcaaactcagagatctgcttgcctctgcctcccaagtgctgggattaaaggtgtgtgcccctatgcccagcttttaactaatttatgaattatttatttttagaggtaaacttaggctgatctagaattcactctgcagtctcaactggtctcactggtctcaattttaccatctccctgacttgttactccagtgctgggattgcaggcatcagctcccagggtcaactccatctttttctctccatcccttcactgcacgggcactgcccccaaattcttgtcagaagaacttgtctgaggagccagacaatctctctgggccaggcccagacttctgggaagacggggaatgtgtgggtgaggccttggacactggagcccttgacttagccagtgtttgaaagttgtgggggcagggtgccacttgatgtcccagcaaaagcatcgtggcacactgcctgtgttggttcttctttatcttgcccacgcaccacacaccacacacacacccaccacacccaccaccccggtgcttgggtagatgagtcctcatgcccagcttggctggatggaccttcctccactgacttcccagtccagctgccctgttcttccccaccacctctctctctctctctctctctctctctctctctctctcctttttttttttttttaatttttttattttttgagacagggtttctctgtatagccctggctgtcctggaactcactttgtagaccaggctggcctcgaactcagaaatccgactgcctctgcctctggagtgctgggattaaaggcgtgggccaccacgcccggcttctctctctctctctctctctctctctctttctttcttcctttctttctttccttctttctttccttttttttgtttttttttgtttgttggttggttttttggttgtttgagataggatttctcgctgtgtaaccctggctgtcctggaactcactctgtagaccaggctggcctcgaactcagaaatctgcctgcctctgcctcccgagtgttgggactaaaggcgtgcaccaccaccgcccggctggggttccctcttaggtgaccctagttgtgtcaagttgaggtaaagttagctatcacagggatactaggcaagtgcactactgctgagccccgcccccggctcctccatagtggattctcagcaagggttctactgcaagtcatgcgcttgtggggagcaggggttaaagagaatggtttgtctcatacttggaggtacagtcagggggaggggaggcaccaggagctttaggcaggggtcacatggcatccactgtgtggaaagagaatgacgtcattagggtggccttgcaccctttctgtatttgaatttgtcacattctgttctcagcctcctcagtagctaggatggcaggctcatgtcacagacccagctctattataaagccaccagggctctgccacaaggcaaaagtccctttcctaatcatctcccaaaggccccactgtgtacagatagtctttgtcttaatatctcccagtgaggattgtagctggggacggcacagacacattccagctcccacacgcaggagctaccggagaaacggccagattagacgctgaagggcttgatcatcagtctacatgattgctatgttggccaccagctgtggggattaaccaagtggcttcagtttaacttcctgtcaagtaagatcccacttaacttagctttttcttttctattttcatttttcctccccctccccttatgtgtgtgtgtgtgtgtgtgtgtaagtctctgtgtgtgcaagtgtgtgtgtgtgtgtgtgagagagagagagagagagagagggagagagagagagagagagagcatacacagcttcgcctgctcaggtgaggtgagcgtggtcccagcagaggctggaggctggagttccaggagctcaggctgagctcttaatggctgaaccgtgtctctggtcccccagtccctagtccccatcttgttgtgttattgtgacaaggtctcacgtagctcagattttgaaaaagatttattgggccaggcatggtgggctgggcctttaaacccagcactcaggaggcagagacaggcagatctctatgagtctgaggtcaacctgatctatagtgagtttcaggacaatgtagacagattgctttgaaaaaaaaaaaaacagcaaccaaaaagatgtatttagggctggtgagatggctgagcagttaagagcactgctcttccagaggtcctgagttcaattcccagcaaccacatggtggctcacaaccacccgaaatgagatctgatgccctcttctggtgtatctgaagacagctacagtgtactcacatataacaataaataaatcttaaaaaaaaaaaaaaaaggactggtgagatggctcagtggataagaacacctgactgctcttccgaaagtccagagttcaaatcccagcaaccacatggtggctcacaaccatccgtaacgagatctgactcccttttctggagtgtctgaagacagctacagtgtacttacatataatcaataaataaatcttttttaaaaaaaaaaaaaggatgtacttattttgtgtgcatgtttgtgccttgtgtttcatgaataaggctgagtacaacccgctagactctgctcctctggcggcctcaccagtccaggggtggcactgactctcgctgttttcttttgtgtgtggtgtgagcaacttgagagttgagtactgaggtaaccttatcttcctctgcaactctctgcctttgttcctttctttttttgtgtgtgtgtcagggtttctctgtgtaaccctggctgtcctggaactcactccgtagaccaggctggattcgaactcacagagatgtgcctgcctctgtctctcaagtgctgggattatggcgagagccacctcgagctctgtttttttcagggtcttactatgcagtcctgcctgacctgggactcgctgagattaaatgtgtgcgccaccatggccagtttatgcccattgtctgacaacatttcctgaggaaacgaaatacacttgtcccctcaccctagatagggaacccaacagaccaaagtggggcggataccaccaaagaccaacttggtgaaccatgaattttactggggttacttacaggaataatgggtgtggagttacaggagaagtgactcaaaaaccgctatatcaccaaagcccatctcagcatgggtgacagtttccaaagctgggaacctggagcacacagcacagcctgcagacagctcagcaggttggaggctgacctttccgggtgcctcagttggtctaaacctcctccagacagttcttttttgtctgagagtctttgtagttttatccctcttgcagcacagcctcatctcctccaagagggactctcagtctttattcttttctcaggcagggagggtctggtggatgtgtcagtttgagggagtttgaagctactttgttgttctttgcctctctgccggatagaatgtttgtagtctctgaggctgccacacagacacacaggaagacctcagttcattgatgctgttctcctcactcctccccatccccacccccaccccagggtttctctgtgtagacctggctgtcctgcaactctgtaagaccaggttgcttttgaagttatacagatctgcctgcctctcactctcaagagctgggactaaaggcatggtcgctacccccagctgaatgactccataaatggattcttggaattcacacctgggtcctcacgcttataggtcaagtgctctttactcatttagctgtagcttaaacttcccattctcctacctctattccccaagggttgccatggcgtgtggagcacgtgtgtattcagccccaggagtggaggacttcgtgcctctgagacaggggctttattcacttcccctccctactctggcactcagctttctgttcagattgtctggttttgtggttacaaagacccaggctcccatcctgcagggggtgaatcagcctccattaccagaaagttttgcaagcatcccctcctctctcatccctaagcagctgagcttaacgagggctgccggaacccatcagactgtgccaggagtggtctaggttttccccaagaggcctcagtgccaggctggagccaagccattcctgtgccttctctacatttaagtaaaattgcatttatctattatgtgtgtagaggcctgcaggcaggcatgctcacttccttgcctgcacacagacgtcagaggtcagaggctaacttgcaggagtcagtcctttgtcttcaatatgtggggcctggggatggaactcaggtcatcagcctcagcagcaagtacctgtatcttctgagccatttcacaactccccccgccccctactccgcaccccgcaccccgcaccctgcaatctaagatctgtctgaaggttaatccaaattctatctttctgtcactgtcaactgctagacaacacggacatctccttccttcaccgggtctatgttattgctcagtcactcttagtggctcccacgtgcccatcaaacctaagctgggggtgggcagtttaggagacctggttacacgagtttcccatgtaaagagggttgcaaggtgtcaacagtacctgtcttcatgtggctgtcccttgggccaggggtcccagttgacactagaagcatgaaatactcccttacctttctccccactcccctcccaaccttgctatcaagagacacagtttcctgcagtttcttcatgcttttaatagttgagggtttaactattagcatgattaattctcatggaatttgtttgcctctgagtcaggacaaggttaaatttattgtcttccacttacatatcaggtatactgacttaaagacttgcttaatctgtggactgaaaatttgtagctgaggctcactttctgttaccgtgtagtaggccctcaggttactgtgtagctgaggccagctatgtctatgtgctcctaataatcttcccaaaggcaccttcttaatgctgggtcaacaggtaaggggcatgggcaagattttattatttattacatgcaagtacactgtagctgtcttcagacactccagaagagggcgttaggtctcattacagatggttgtgagccaccatgtagttgctgggaattgaactcaggacctctggaagagaagccagtgttcttaaccgctgagccccaacaatgttttgtcttgttttgctttgtttttaaaaagctgggggctggagagatggctcagcagttaagagcaccgactgatcttccagaggtcctgagttcaattcccagcaaccacatggtggcttacaaccatctgtaatggaatctgatgccctcttctggtgtgtctgaagacaacaacagtgtactcataggcataaaataaataaataaatcttaaaacatacacacattgtctcactgtgtagcactgagttggaactccctatgtagaccaggctggcctggaactcaggagatccacgtgcctctacctccagagtgctgggattacaactgtgtgccacagtggcctgcagatctctaagttccagggctacacggagaaaccgtgccttgaacaccacccctccaataaataaatttttttaaaaattaaagtcttgggggctggtgagatggctcagtgggtaagagcacccgactgctcttccaaaggtcctgagttcaaatcccagcaaccacatggtggctcacaaccatccataatgagatctgacgccctcttctggtgtgtctgaagacagctacagtgtacttacatataatcaataaataaataaatctaaaaaaaaaatttaaagtctttatttacttttgtgcatttgtgagtgcctgcatatatgctcatcacattcctgcatggtcagtcttcttagaggtaggaagagggtgtctcatctcctggaactggagttacagctgccatgtgggtttggggaactgaattcccatcccctgcaagaacagcaaatgctcttaatcactgagccatctctacagccctaagtgttgaagcttttttttttttttttttcaccagggtttaagctatgtaagtcagaatggcctcaactcaaggcagttctcctgcctcagcttctcaggccatgcataggtggcagttgtaggccaccaagcctagcattagaggaaagagttttgggattggattgaaccctaaggctttacagaaattaagctacttagcgctctatctcaaaggaactggatatgaagcaagacacctcgggctctgccctgagccctgctggaaggagcagtcatcaccctgctggttctcactgagagacaaagatttggatatgaaggatgaggtgcacttgaggctgtgaagagtggtggggtcagggggagcccatgcgagggagccactagaaagtgtcattgaggatgtggttgtagaggcgaccacttggtttgactgtcctgaaggaactgtccgagaacagaagtggcttgttgcctgggaccagatctcctctgtccactgctaaatctaggtgaggtgtggccagctggtgtgagggctgcttggggctttgggaaacagagggagtttctttgggagttctggtcagcctcactcatgacttggagcttttggccctgcctgtttgttgaagcctgtggcttaggggtcacccaaggcttccttaccgagagccaggggaggggaggtagcctttttctaaggacaactgattagagagcagagcctggctgggtgtgctggactgggaggcgctgctggagaggtatgagtgtttcttgtgtgagggagctactcagtgctttcacatgttaggcactaagctggagcactgagtcagggccccagcaccacaccgggggattctgccactgagccggggccctagcccctcactgggggattcttatatgtcctcgtgtgtacacctatgatggtgaacacatcacaccaactgcatccctgtttcttcaatatactttctggtggattaaataccagtatagaaacatacaaattagccgggaagtggtggcatatgcctttaatcctagcacttgggaggatttctgagttcggggccagcctggtctacacagtgtgttccaggacagccagggctacacagagaaaccctgtctcgaaaaaccaaaataaataaaaaagaaaaaaagaaagaaagaaatgtacaaattgggctggagagatggctcagtggttaagagcactgactgctcttccagaggtcctgagttcaaatcccagcaaccacacggtggctcacagccatctataatgagatctgatgccctcttctggtgtgtctgaagacagctacagtgtacttatatataataaataaatctttaaaaaagaaatgtacaaattacttaagtgtgtgtgtatatagctctatccaactgtataatgttaacccagctgtatgccccacactgacccctacattgactgaacagtgactgtaagcaaaacatttttgcaatttacttttaataagtgtttaacttttcctctagcccagcagaggtagtggaagagaaaagttattaggatataggggaagtggatctgttcagcaatagttctttagagcagtcttgatcttctttggcagcagttcaggcctgtaacaaacactcatacgattcagcagctgcagaccagtccccctatgcaggcagacaccaggcacgaaccagcagccacagttcagtcctctcggcaagcagactctgcaagtggccagctttttcaggaaccaccgttctttggtgagtttctctcattggtggcgttaccacaagttgagctcaacagcactatgtaaggtgaaccaatacatgcgcgtcgttagcaaagagtattgaggcagagcaaaccaaagctcagtgcccgtctcccactgtgtgtggggtcatagttatactccatcatcaatcgtcttttcacgtgtttgctatagccaagcatcctttcacctgtgtctgcttcaggaaaacagtctttcacgacctgtctgctttagcaagaagtcctttcacctgtgtgccccagaaaacattatttgacataattgactttccaaagaattagaagtttccacttttacaactttaagctgttttgccagctgcttcccacagcctcctgtgcctgatctctgaggccgggattggtatttcctggggctgttgttgtgagacccatattactctgtagcccagactggttgagcttgatgtcacatttggtcaagccagaccacatacatacatacatacatacatacatacatacatacatacatacatacatacatagaaatagcaaatatatgtattttgctggggaggtggagacacaaggatgagtagattaaggttatgcttggctgaacagtgagttgtatgccagcctaacctatatgagactcaataaataaataaataaataaatagccaatcgattccccatttcatccatttatttgagttttagcccaagtgttttttctttggtgtctgctgttttccttcctccctgtgcctcagtttccatcctgcagggtgaaatagtctggggtgacattttagggttgagaagtgtccctggatgcattgcctcatgggtaggtggaaggtgggtggatggaggacaagaccagagccacctcaggttcctgggtgggggctgggtgaaggtggggggcagggagggctaaatctggcctgccaatgagtggcagtagcagctgccggccccacccggccctgccccctggatcggtccctccccttggttctttggctggggcctgtctgaccggtttgggccgtcctggagcagctgcagcgggtggcggctgtgtccaggagggctccgaccgtcaaggcgccgtcggggctgcaccgcaggaatggggaaggattcgcagaattactacgggaagcacggtacgcgagctctccttaggcacccctggggcagcagcgggcaccgtggactggcaaggaaggttgcaaaagggaggtaaaaggaattgcactcgagtcgcggtccacctttggcccacgctaggtcccatcaccccagtgttcccacggctgcctcagataccattccactctcctctaaccgaggacctgacccacaagcatccctagagcacttgaacctctccacagtgggctttgtgttccttgctctgctttgtaagtccttccaggcattttccttgggtgatagatagcaggctgatgaatcagctggtcacccccagggacaatggtctctgatgagcttaggtgtagtcccctgttggtagcatgcagacacaactcagagctccttatggcttagggggaccccggctctccagcttcttctgctggctgtcattttctcatcctacttaatcctgttgtctttcagggacgcctcagaaatacgaccccaccttcaaaggacccatttacaacaggtaagatcacatccctcgtggggaagagggcaaagatggggagatgtgtcccagtgtgtgttctccggcaaagcaggataaaccagtgcagtggtcagtgattcaaaagctagtttcctcaaggtcctagacacctgctcgtgagcctggaatggaacttttgcacacactaggcatgcactgtgcactatacatggggccttttcttgtttacatttatttatgcgtgcgcatgtatgggtgtggtgtgcatttgttactctgtgtgtgtgtgtgtgtgtgtgtgtgtgtgtatgtgtgtggtggtggtggtggtggtgagaggaaatttgcatgaattggttttcttcattatgtgacccaaagatccaaaacagtccacacccatcagctgagccatcaccattgctcccctgccaccccacccccagcctcagtactaagccggggctctataccactgggtggcattcccactctgcctttttgtttgtttgtttgtttttgaaacagagactctcaatgtagcccgggctgtcctagaacctaatatgtagtccaggttggccttgaactcacagatccacctgcctctgcataagccttgtacacatagacaaaattttattttgacctagataaatagctttcctagtcctatgatcccagctacttgagagacaagaggatcaaaagttcaaggccgggggaatggaggaagaattaatacaattataatctattgcatggaattctcaaattattagtaaaagtattatttttaaaaggacagtactgggttacaagtatgtactgctacacccagcttctgcttaatattcttttttagaattaattttgtgtgtatgaatattttgtctacatgtgtgtattgtaccacatgatagatgagagagggtatcagagcccctggaactgtggcaatgttttcccacatttatgtctgtggtctgcgttgtgcctggctggtacccaaggaggccagaaaggggggttcagatctgcttggactggagttacacaaggttgtggggctccaggtggatgattgaaatcaaacttagtgcttttaaactgagagctatctcttctgcttctctttctctctctctctgttataaatatatatttggtttttttgagacagggtttctctgtgtagccctggccattctggaacttgttctatagacgaacaggctggccaacactccctggctatttataaaaaaaaaagttccaggctttcctgggtgactttcagagatcctgtctcaatttttaaaatagaatattaaatttattttatgtgtgtgtttgtctaaatgtgtgtatgtgcatcatatgcatacctgctgcccactgaggtcagaagagggcactgtatcctttactggagttactgatggctaaaagccaccatgtaggtactgagaattgagcctgtgccctctagaagaccagagcaacatgctgatatggtttggtttggctttggttttgtttttttgagacaaggtttgggtttctctgtgtaacaaagccctggttatcctagacttgatttgctgaataggctggcctcaaactcacagacctccacctgcttctgcctccagagttagggattaaaggtgcaagccatcatactgactgaggtttgttgttgtgggttttttgtttgtttggttggttggtttggtttggtttttttgttttgttttgagacaaagttacaaggtttctctatgtggtcctggctgttctgaaactcatgaagatcaggctggctttgaactcagagatcctcctgtctttgcctggtgaatgctgagagtaaaggggtgcacaaccacacccaacctgcaacaagtggtttttcattactgagacaactttccagcacctcagatttttaaaaaaatatatttatttatgagtgctctatctgcaagtgtacctgcgtccagatgagggcatcaggtgagtcaccatgtgggtgctaggaattgaatttaggacctctggagagcagggggtgctcttaaccactgagtcatctctccagccccaggattttgttttcttaaagccaggactggagataaggtttggctgacagagtgtttacccagtgtgcaggaaggcttgttccactccacgctggggaaactcacctcatcggggatgagaaggcagcccaagcacagagtggaggcgggagcatcaggatttcagggtgaacttggctgtgtagcaactttgagggagccttgagtatgtgggaccctgtgttaaataaaaagtgaagggtgataaggtggctcagcaaggccattgccagaaagcctgacgactggcattcagtcccttggacctgcatggggggagagaaaatggacccctcaatcatgtgcatacattcacaacacagacgcacacacgagtgtggtggactgagaagtgtggcagtggtggctgaagagatggctcagcgattaagagtacagactgctcttccagaggtcctgagttcaattcccacatggtggctcacaaccatctgtacataaacatgcacctgcacacacccccacacacacccccatacacacacatgcacacccacacccatacacacacacacacacacacacacacacacacaccattaggaaatgtagtagcagtaaaattcgtatgacctggggctggcgagatggctcagggttcagctcccagcactgcagttcaggggactcggtgcccttctggagtccttggacactaggcacacacatggctcacagacacactgggcaggtaaaacacccatatacataagtaaaaattaaaagttttcaaaatgaacagagaccagacctggtggcacaggcctttaatcccaaaattcaggagtcagaggtaggtgggtctctgagtttgaggccaacctggtctacatagcaggttttaggccagccaaggttacatggtgagaccccttttcaaaaaatgggggaaaaaaaggccaggcgtggtagtatacatctttaatcctagcatttgggaggcagatacagacaagattgctttgagttcaaggccagcctggtctacagagtgaatttaaggctagccaaggttatatacacagaggaaaccctgtctcaaacaaccagggcagaaagcccgtgattcttggcccacatttcagattattcctaaaaaggggatgtataatgtcatttgttgctctgctccccaggggatgcacagatgtcatttgctgtgtgttgctcttcctggccatcgtaggctatgtggctgtgggcatcataggtaagtgctggaagggccggcatggcctctttgatccagggtggtgctgtggctgggaagtgacagagttctgcatctctccacagcctggacccatggagaccctcggaaggtgatctaccccactgatagccggggcgaattctgtgggcaaaaggggacaaaaaatgcgtgagtttatttatttgtttgtgcagttaagcaataacatccatgtgggggtcttggcaggccatggcaggcttggtgttgagtgccttaaccccctgagccatctttgggttgggtaagaactcccaaccgactctattcaccctcctccaaccccagggacaaaccgttcttgttttacttcaacatcgtgaagtgtgccaaccccctggtcctgctggaatttcactgtcccacccctcaggtaatgcgtttcacctcttccccttggtgtttccccggagctctctcctcatgagcatcatgtggagcctccgtcccggatggcgtctctgtcctgattctatagccccttccttgtgctcccccagatctgcgtgaagcagtgtccagaccgctatctcacccttctgagtgcgcgcaacactcgcgactttgactattacaagcagttctgtgtgcctggcttccagaacaataaagtgagcagaacgaccgacccctttggtgctcgggtggtggacaccggaaggggctttcatcagggattcgcttgttcccattctctctgcagggggtgactgagatactccgagatggggagtgtccagcggttatcacccccagcaaaccttgtgagtatggggatcccacgtggatgaggtgcagactggggaatctgcaaggactccctctgacagcgccttctggtcccacagtggcccagcggtgctttcccgccatccatgccagcaaaggagtcctcatggtgggcaatgagacgacctatgaggacggacatggcgccagaaagaacattacagatctagtggagggtgccaagtgagaggacagccctctagtgtgtggcatcgggcatcctggggtgggactggagcggaccttctctgggtatgacttgagtctctttcaaccctagaaaggccaacaagattctagaggcccggcaactcgccatgcagatatttgaagattacactgtatcctggtactggattatcatgtgagttggaaggaaagtggctgtcccctggctaccacatctgtgagctaaggatagtgtcactcatgcccctgtcttatcccccagaggtctggtcattgccatggtgctgagtctcctgttcatcgtcctgctgcgattcctggctggcattatggtctgggtgatgattgtcatggtgatcctggtgcttggctatggtgcgtctccccttccctgcagacctagggtctgcaaagtgccaaatgtctgctaccccgggaccgctttcagaaaagccagcctcagccttcagatgttctccactgtttaaccgaccaacgtgcttaagtagagattcatgcggttgtaggtactttgaggcagccagaggccgtcaggagtggatggatgaaatccagcttgctggggctaagcttgtaactcaagcacttacctgtggccctccagtgaggtgctatggttgtggctcaatggtttaatgcaagcacgtgcagggccctgacttcctttccctctctaccacagaaaaaaagaaaagaaaaaataacttacctctcaactttgagacccagagccccgtttggcattttaatcaacaacaagagacattgtgaagacatctctttagcccagtgactaggcttctcgcggtggtgcccacggtgccagttcaaatcccagctttgctgcttcctagctctgtcctggggcacatgactaagcctcctgtgcataattacttccaccatctaatgggaataattgctcttctgggtgggaaacgtaatgagaaggtggtaatgtagtattatgatgatgatatcaagaggagagcctgcgagggtggaggcctgccttgcaaaccagtgtcttatgttctgattaagttttcttctgtggatttttttttggggggtggggtgtgtttgagagagtttctcaatgtagccccggctgtcctgaaacttactctgtagaccaggctggccttgaactcagttccacctgcttctgcttcctgagggctgggattgaatgtacgcagtgctatgacctggcttttctgtattctgatgctcatttactatgtgtgcttgtgtgcatgtacatgtgtgaggacaagtttcgaaagtggttttcctccttttactatgtgggtatcggagtttgaattcaggcttggcagcggaagcctttatccgctgagccattactggtccttattctgattttcttccttttaaacttcctgaaaggaacttttatcttgggatccagataccaaagcatgcatgttagcgtggtggtcatgcctgtcatcttctgccaggggaggcggagtcaggaggctcataatttgagtatggatcctgctacataataagaccttgtctcgaaaaccaaagagaggtgttcacgttaaccatggtttgttctgttattggcaagttaggcgacttgatatttgtttttgatttttgagacagggtctcagtgtatagccctggctggcctggaagtggctgcatagatgtctgcctttttctgcctcccaagttctggcattaaaggggtgtgcctccatgcctggctggctcaggttgtcatttgacaggaggcttcccaatacctgttcattctttcatccactttcaagcacaagcctgggcaatatattaagttccaggccagtcagtgctccatagtacctgtccctacatactaccctgtctcaaaagacaatcgggaaagttactgtctgcgtttgcggctctacgcaggcatcttccactgctacatggagtactcgagactccgtggagaggcaggctccgacgtctccctggtggaccttggcttccagacggacctccgagtgtacctgcacttgaggcagacctggatggcttttagtgagttgcagcaccccttcctcccccatgcttgtattatgggaaacctaggagggattgaagtaggactctgaaacgggtgactctcagcttttagagaaatcatttaagtgtatgttattttatttatatcttaaatcaatttcatttcttattacttttaacttttaaaaattgtatgcttccttgttgagaggggtggtctgtaacaaggccctccggtgtggagggcagacagaggaagctctcactaattctctgcttcccccgtgactctggggactggaagtgaatttacagccctgatggctgcccacccttcttcacagtgatcattttaagcatcctggaagtggtcatcatcctgttacttatctttctgcgcaaaaggatattgatcgccatcgccctcatcaaagaagccagcaggtggggcctggagagccgggggggggggtgccttgggggctcagcccggccgtctgagcttgatgtctgtctctgttcctccccagggctgtgggacatgtcatgtgctccctgctctacccactggtgaccttcttcctcttgtgtctctgcattgcctactgggccagcacttctgtgtatctacccctcatgagtctggggtccccaaggacaggtgtccctaaagtgccctgcagttagggtgggtctgcccccttcgttttacaaacttctataacctttatattgggtaaaggggtggcaatatttagaggtctaaagacaacttgcaggagttgtgtactccctctgtgagtgggtctttgggcttggtggcaagtacctttatcagatgagctagcctcctacctcagctctgaagtctcaggattccaagggtgagccagcactcctgaattcccccacacctttgggtctcagttccagctttcagtttccttaatgagccttcagattcctgtccacctccaacaccgccgtgtacaaggttgttgatgacacagcctgcccacttctgaggaaaacctgcaacccagaggtaggcgtccctgtgggggaggacagggctgccctggctacctcttcttgaagatgtttacctaatgtcactcttttccctctctttcttcattctggtatgtatgtgtgtgtgtcatatgtgtacatatgtgtttgtcaaggtccctgctttatatttctcaaccttactcctttcagacagcatctctcactaaatagtaagctaagctggtatcttagctccctatggcactggggctacagactagcacatggtcacacccatgaatttatgagcaggatggagacttgaactcaagtcctcatttttaagtccccttacctattgagccatttctccaggcctgctaacacctttttctggactaaagtaatggatagtttgtttgtttgtttgttttgtgttttgttttgtgttttattttgtttttttgttttttgttttttgttttttgttttttttgtttttcgagacagggtttctctgtgtagccctggctgtcctggaactcactctatagaccaggctggcctcgaactcagaaatccgcctgcctctgcctcccaagtgctgggattaaaggtgtgcgccaccactgcccagcgtaatagatacttttgcttctaggacctgtccttggtctagcctcagctactctgaactgacactgtggctccttatccctctcccagaccttccccttgcggaatgagagcctccagtgtcccactgcccgctgccagtttgccttctatggtggcgaatcgacctaccaccgtgccctgctgggcctgcagatcttcaatgcattcatgttcttctggctagccaacttcgtgctggccctaggccaggtaaccctggccggagcctttgcctcctattactgggctatgcggaagcctgatgatatgcctgccttccccctcttctctgcttttggccgagcactcaggtaaataggagtgttggggtggggaggggagggatgcagggacctcttctggccgggccactgatccaagattttgattccaggtaccacacgggctccttagcttttggctcccttatcttagccatcgtgcagatcatccgagtgatgctggaatacctggaccagcgcctaaaaggtgccgcccttcctgtagcttcagccagggtctggacttagtccctgattgggtgttgcttgaggggtggggccggagctatgcctctcctgggtttccctttgtgaaggggtggggctgagtggcagaggagcaggtggaagagccaactgaaggcaggcatggtggcacaggcctttaatcccagtattccagagtcaagcagaccttttgtgagagttggaggccagcctggcctacagagcgagttctaggacagccagagcaatgaagtgaacccctgagaagagtgaactgagttgctcagagttctgggtgtctaggggcggggtggatccaggaagggcagctctgactaacaaagctgtcttgttttgaggcagctttttactaagtaggcctagctgacctgaaactctgatatgagatccacctgcctctgtttctgagtgcttggattgaaggtatacatcactgctcctgttttgttttaaaaggctggcatccaaactcactaaactgccaaggatggccttaattcctgatcctgagcaattacttttgtgggttacttttgtggattgattaatttacttacactgaggcagactcacttagttgttgaggctggcctagtagtagttctggcaagcctcagactttgcaatccttagctgtcttgctggagcttggtgtctcattcaaatgaagcccatctcatgccatcctttcatcccttccattctctttcagctgcacagaacaagtttgccaagttcctcatggtctgtctcaagtgctgcttctggtgcctagagaagtttatcaaattcctgaataggaatgcctacatcatggtgaacagcagggctgtattgctgccctgggtgggaggattccccatctccatcccgtgggcctcaaaccttcttctgttcactccagattgctatctatggcaccaacttctgtacctcagccaggaatgccttcttcctgcttatgagaaatatcatcaggttagcaggacacacctccaccccccagcctccctgtcccatctcacctttcccagcccccctttgccctagccctctttctgaaccagccttccacttactgtgcctcccctcccacctccaccctctcccaggctctgaacccacgctcacaccgctcccttcactctcccctacagggtggccgtcctggacaaagttacagacttcctcttcctgttgggcaaacttctgattgtgggtagtgtgggtgagtgatgccaccaggcctgtctatactgacatctgggagcctgttgggagtgacctgtaagctggtgtcaggctcaggtagtcttctgtgaagtccttccttgaagactcagccttgtcccctcatcccaacacaggcatcctggccttcttcttcttcacccatcggatcagaattgtgcaagatacagccccacctctcaattattactgggttccgatcctggtgagcacctttggggacagaccagggtctgggtagaagcggggggttgaaggtaggggtcgggaattgcgcagattcctttggtgacggttgggggtggcacagtcattggttatttggtccctaaatatttactgaatacctgctgaaggcacagggatggagggacttttccttagggactagagttactgccgtttacatttgtttattgtgtttgtgctgggtagatgcacttgtggaaaggcaaaaacacttagacacttgtaggaagtggttctcttctccttctatgttttaggggttggattcaggtcatctggcttggtggtgtcttcatccaccaagccatcttgccagccctaataataattatatatacacatatataatatatattacatataattaataatatattattaataataggtcttattatcactcttactattattgtagaaaaatgttattttgttatttaggtttctttcccattttgtttcgtttgttttttgagacaaggtttctctgtgtagccctgcctgacctggagctggctctgttgaccaggctggcctccagttaacagagatccacctccctttgcctcccaagtgctgggattacaggagtgggccaccacagccctgctcttttcttgtttttttgagacagggtttgtctacataactctggctaacctggagctcaccatgtagaccaggctgtcctcagactcagtggttttgttttttattttgagacaaaagtctctctatgtagccttggctgacttgaaactgattatgtagaccaggctagcctcagactcagacatctgcctactccagcctctttagtgctgaaattaaaggtgtgtacctttaattatctctatttattagcttttattttatatgtattggtgttttgcctgcctgtgtgtctgtgtaccacatgcatgcatgatgcccgtggtggccaaaagagggcatcaaattctctgggcctgggatgtgggattacaaatgtttgtaagctgccattcgggccctgagaattaacccccggttctctggaagagcagccagtacgcttgtctgctaagccaactctccaaaactctcctctttgccttttttccttgactgacacccaggccaacatagaacttttgatctttttgcctaccaagccctgggattgtgccacattgtgtcaccacagaaaaagccttgcaggttagatgcgttggacattatccaatgatgatgctgacggcacacacctaccatctcaacactaggaagaacaggcagaagaatcagaaatagaatagtaaattcagggccaattctagctacagaattctctatctaaaaaaaaaaaaaaaaaacaaaacaaaacaaaaaacaggcaggcagtggtggctcatgcctttaatcccagcgtttgacaaagcaagttccaggacagagaaaccctgtcttgaaaaatcttaagaaaaagaaagtatggaatgactaggcaaaggggaatagcagagagcctgaggtctggatctctttatttcctggtagtgtctcctaccctggttttggctagtccaggtggccagtttgccctggggctgctatcgtcagtctcaagtgctgggattacaggaggccgcctcactcacctgatgcttgcatgggttcagagagtctgtctcaggtccccaggtttgcacagcaaatgcttatccactgaccatctctcatgtgccccaggcagtcctggcacctgctgtatagcccaggctggcctcagattcaggctggccttgcacttgagctgccaaaatacgcaccatgtggccctgtggaatgtgggatccagctccataatgcctcagaatgcctcagaaaactccagctgggggctggagagatggctcagcagtttagagtactgattgctcttccagaggtcctgagttcaattcccagcaaccacatggtggctcacaaccagctgtaatgagatctgacgccctcttctggtgtgtctaaagacagctacagtgtactcatatataaaataaataattctttaaaaaaaaacaaaaaactgcagctggataaaacctcaagggaacgtctatagtgctaggagcatctgtagcatgagtggtctagaatcagacattactgcccggggcatgacctgaggacttgctgttagaggtgaaagcaaaagctaggtgagctagaaactcaacagcatgtgccaaggccctggggttggaaaaagcaaggagcactgtggagctgattgggttctcctaaggtgaaatgtggaaggccagacctggtggcttaggcttaaggtagaggcaggaggataaggtggtcagtttcatcttggctacttgtttgaggccagacggaaaaatgtgtgagactatctcaaaagaaaaaaaaaatctaatcggggaggcagaggcaggtggatttctgagttcgaggccagcctggtctacaaagtgagctccaggacagccagggctatacagagaaaccctgtctcgaaaaaaaaaaaaatctaatcagactgggtgtggtgactcatgctaaggtgaggatcataaattcctgccacagtacatacacagcacggtggtgcaatacctccagtactgggcaaatccccatacacagcacagtggtgcacatggagaactccagtactgggcagatccccagagcacactgccaaactttctagccaatcactgaatagcagtttatctcctaaaactaaggcgagggtccagcaaggaggctcagaaactcgccaagcctggagacatgagtgccgtcctctggacccacatggtgggtggagagagtcacctgccgcagttctcttctgactccatagcgtactgtggggtgtgtatgttaccatgaaatgtaatgtagatattaaaacaaacatttaaactaaggtggcgagagatgatatccgatactgacctggccttcacacacaccaacagccaagtggactgagctgtgcactgacccataacagcccactgaaggctaaggctagagaagggaccatgcagtacagtaagagggtgatggtcttactacagactcatgtcagttcccagcaactgcactagactctaattccagttccaggtgatctggatacctgtgcacgtacatataatcaaaagtaaacatgacggaaaataggaaaagatttactcatggccatattgacatgataagtaaaataagtgattttttttttttttttttttttttttttttttttttttgagattggatctcactatctcactatgtagccctggctggtttggaactctatgtagaccaggctggtcttgagcattctgtttccaggtgttgggattaaaggcgtaaaccatgcttttagggctggagaaatggctcagcagttaagagcactgttattcttgcagaggacctgggttcagttcccagcacccatatagtgccccacagcccttctcaaccccagccccagggggtctggcaacttctgatgttcatggttatcaggcacacacatgctacccatataaacacgctagcaacacactcacacaaatcttttgtaaaaggtaaaaagatgttctaaagatgaggcaggaggattgccatgagttctataatggcagacagcctcttggctcatgagagggagaggtttcttagcctagggaggacagtgatgggacggggttgctcttcacctgagccaggctggaacaagatgttttctcctgaacagacagtgatcattggctcctacttgatcgcgcacggcttcttcagcgtctatggcatgtgcgtggacacgctgttcctctgtttctgtgagtggcccctttatctcagcccaccagggaccctgacttccttttccccagaggacaggaaatgcctccctccaatgaaagcacaaagccaccctcaccccagagttccccggggctggaggtgtcccttccaggcccatgcatgcctttctggcttcctcactgcgcttcaagctaactgttccccacacccctgccaccgagatgtagctggaacactctgtcccctgggtctgtggctttaaaatttctggctttgttggggactagcacagggtccatggctgccactaactctggtctccacgtgtcttttttctccctcctccccttctcccccatgcctgctggcttcttttccattttttcttctgcctcccttttccaaccccctcctttcctgaccaccccactttccaccccctgctggttcccggggggcccaggtgaggaccttgagaggaatgacggctctcaggagcgaccctacttcatgtcgcctgagctgagaggcatcctattgaaggggaatccgcaggagggcaagcaggaggaagtggaggaggagtagacagtgagggagccgggcaagctggccagggggcctctggagaccgggtttgtgcatgtgacagcggcgcttctttgactgggaacatgtggggctcctgcagtcattccttaccccttgttccaaaaccaggcagtcatcctctccctgagtcctaagcccatcccctcactggagcatttaggcaggggctcagccactgagcccctcccccaggccctccctgggggattctgggcgagtgctctaccacgaaactatgcccctagccttgttgattttgtattttgagacattgtctgtctctctctctcagttgcccaggctggcctgggacttaaggtagtgaaagcagcccttgagcctggcttgtttcagcttcttaaataccttggataacaggcctttgctgccacgccctgttctcctgtttgttgctttctaaccctgaggcttttctatagccctcccttcccttccctgctccccacccctagcccccacacctgcctgttgactccctctcatgttacctgctttggggctctgtccacagtggaggatctggagagaaatgacggttcagccgagaggccttacttcatgtcttccactctcaagaaactcttgaataaaaccaacaagaaagtagcagaatcctaaagacacctgcctcccagccctctcaggacgccgggataggtgcttgctgtgcagctgggtcagagtccccagctcatcagacttgcctaacacatcactgcctctctgcaccctccccgagttcccatttccaggaacctagaggactggggcatctctttcctatgccaaagggcacttgggagttttcagtgcagccctggaagatgggacagaatggatctctccagctcttactggctcagatggtgccaatatggtgaagtaacttgaagtcgaggatgggagatggccctaggatgtctgcagcaagcttctttgtatttcagtaacccttctggccaagagggaaagactggatgagagtgggcaagtcagctcagcgaacactagcgccaagctccccagcggggacagaattggatctccatagctgatgtacctaagggccagcaaatacacgtctcactcttagtcctttgtagcctaggcagacagtaagggatctacctgcttctcttccatcaggctccagaactggatggagccaccaagagtgccttcatatgtaaccccacctccagcgtgggctggctatggtcacaggaagaagtgtgcacccagaactggaggagtcttctggataaacagacagcatctgcgaggagggccctgtgtgaggaacgattggtgttgctgctggtggttgggagtagttgtggaaagcaggcctctgtacttagaccctacagagttgctttgactgatgacttctaaatggaaaacttgaggttggaaaatgaatgaaaatagggcctgtctccccagccctttttctgccagtaatgcacactgctctctttgtaagagatgagaaacttaagttcacccaagggatggtttcagggactgaggtgtgggtgtgttctatattccaaattaactaggcctatctggtttctttcacttgaaactagagaatctgtttgccaaacttcttgatcttgggagccagtagactggttcttcactttacctaccgtatgctaaggcccgcccctcacccctactttggccatccgtaagatagcaggatcttggagacaccgctcccagcctgaggtcccaaggtttcctgtgcctgccttgtgtgccatcccaacccaccctcttgtatgcccagccctgtgcttatgtaattgcattccggccagttaataaagtgcctcttgtacagagactgacctggtatgcttaataggagtgtgggatgctgctggaagggaaggagggagagagccagcctggagcttacctcccaagcttgctctgcagcttctgttgtcccgtaggaccctggtgaacagaagcttcagagtaggaactgattcctagaatccagaaacagccactgcctctcctgcccctcagtaactgccctggacacagaccctgcgccagcacccgagcctgaggtctcacagtcgaggatagctagtattactttagtctattctgtaatttctgggtgagtgtgccccacgtggatgcagctccatggagacgaacggctggcattggagctgctggagctggacttagggtgttgtgagcccccctttcagggctgaagtcaattggttcctctgcaagatcaggatacagttattgtttacattttttatgcttttggacatttttgtctgcatgtgcatctgtgcacaatgcccgtgcctccttggtatcagagaccaggagaggacttagggtgctccggacctaagacacttgtgagctcccccccctccaatttgtttttatgttgtttttgcttctttttaaagctgcaagtggagaaggaaagaaggctcagctatgaagaggaatgggttcagggcccagcacctgaatggcacttacatattcaaaatagcaaatgatggtgatacaataataataataacagccgggcagtggtggcgcacacctttaatcccagcactctggaggcagaggcaggcggatttctgaatttgaggctaacctggtctacaaagtgagttccaggacagccagggctacacagagaaaccctgtctcgaaaaaataataataatgatacagaggctggagagagggctcagcggctctatgtgttctctgctccacagaggaccagattggttcccaggttcttcatcagccaaatcacaacctcctgtaacttcagctccaggggaactgacacattggtcgtcttggacacccacatgcaaatacaaacacaagtacttttaaggtttttttttcaagacaggatttctcggtgtaacagcccttcctatcctggaaatcactctgtagaccaggctgaccttgatattttaaaaatatttttagccgggcgtggtggcacacacctttaatcccagcactcaggaggcagaggcaggtggatttctgagtttgaggccagcctggtctacaaagtgagtaccaggacagccagggctacacagagaaaccctgtctcaagaaaaccaaaaaaaaaaatttttttaaaaagctggtgagatggctcagcaggtaagagcacccgattgctcttctaaaggtcctgagttcaagtcccagcaaccacatggtggctcacaactatccataaggagatctgactccctcttctggtacatctgaacacagctgcagtgtacttacatataataaataaataaataaatctttaaaaaaaaactaggccaggtgtggtggtgcatgcctttaatcccagcactcaggaggcagaggcaggtggatttctgagtttgaggccagcctggtctacaaagtgagttccaggacagccagggctacacagagaaaccctgtatcaaaaaaaaaaaaaaaaaaaaaaaaaaaaacctaagctggatgtgatggtgaaggcctttaatcccagcactccagaggcagaggcaggcagagctctgtgagttcaaggccagcctggtctacaaagtgatttccaggacagccagggttggttatattgagaaatcctgtctcaaaatacaagcaacaaacaaacaaatccagagctggagagacagctcagaggttaaaagcactgtctgctcttgcagagggcccaggttcaatttccagcacccacatagcagctcacaactatctgtaactccagttccagggcatctgacaccttcatacacatacatgtgaacaaaacaccaatgttcatataatttaaaaagttattaagaaatgtttttttatttgtacaggtattctgtctacatatgatgtctgtgtaccaactgcatatttattgcctgcagaggccagaagagggcactgtacccctggaactagatttacagatagctgtggttgctgggaattgaacttgggacctctggaagaacagccagttctcttaaccaataaaccatctctctagtaatttacatttattctttcagtgtgtgtgtgtgtgtgtgtgtgtattcaggcaaaaaaaaatacgtgtgtgtgtgtgtgtgtgtgtgtgtctcctatggtcctaagaagaaaactgaggtctccaggtttggtggcaaatgcctttagctgctaagccagctttgtttctgagtggctctttgggtcagtctggttgtcatactgaaggtgtactactgccacctgttgccttcttttgttactgcatgtagccaactatagctcctggaaaatctcagctctatcaaaggccccataatcccatctgtctctggctctccttagtagaaagcattgtattgaacaggattggcacacaccaggcaggtgtcttcctacacagtcacatctccactttttgaggcagtgtctcatgtagcccaggatgtcttctgactccatctttagctgaaggtaaccttgaactctcctgtctgcatctctccagcagtgggataacaggcctgtgataccacattgagcttatatgatggtgttgaggataaaaccaggactttggaggctaaagagatggctcagcttccagaagtcctgagttcaattcccagcaaccacatggtggctcacaaccatctataatgggatgattcccttttttggtgtgcgtaaagacagagcactcatatatataaaataaataaatctttaaaacaaaaagtaacaccagggctttgtgtatgctgggcaagcactctaccaactgagccagccctccttttcaaatatatctttaattttaactttatttttacattttatatttaagattatgtatgtgtctgtgtatatgtgtgagtaaagaggctataggaggatggtgtcagatgcccaggagctgtagttataggtgattgggagccgccatgtagatactagaaaataaacacaagtcctctgcagaagaagaatattctcataagcacagagccatccctccaggccaccctccccacttttaaaaacaaatctaagacagggtctctctatataaaccaagctagcctcaaactcagagagacccacctgcctgtctcgaaaaaaccaacaaataaacaacaacagaaaagaatccattgttcctacttcttagatgtgatgtaaactgcaaaagctgtttttcagtgcacactaaccctgtaaccgcattcagatgatctatgtccttaacccttattccttctctttcatttatcgtctgtttgtttgtgacagagtttctctgtgtagccctggctgtcctggaactcactctgtagaccaggctggcctcgaactcagaaatccgcctgcctctgcctcccaagtgctgggattaaaggcatgtgccaccaccgcccggctatgtgtatctttctaacaatgtatagcatccaactgtctctcctatgcacaccttatctctcctataaaagggcctcaaggtgggcagtggtggcgcacacctttagtcccagcactctagaagcaggcggatctgagtttgaggccagactgatttacagagtgagttccaggacagccacatctacacaaagaaatcctgtctcgaaatccccccccccccgcctctcaccccaaaaggacctcaagtccacaagggctgctgtctcaaatcccaatttagggtgagacagccagcttgccatcccaggtacacccccaaatacagttgctttagctagacaattatagatttggcattttctcctcagaattcttcccccacacccaccctcaccccggagacagtgtttctctgtatagccctggctgtcctggaactcactttttgtagaccaggctggccttgaactcagaaatctacctgcctctgcctcccgagtgatgggattaaaggcgtgtgccaccacgcctggcattctcctcacaattcttagatttaactcaagtactaagattaaaggtgtgtgccaccacagctggctaattcttaattttgttttatttattttatgtgtatgagtttttacctctgttttgagactctttctgtgtcagtgagcgctcccacaccaatgagaatggaagagagatgattggatcgaagccaggatgctccccaaaaggcctcagttctagatctagatctcgtcggtgtcattttatactctaaagccccaaggtggggcaggcacacaagcccggcagtcaccaggttacagttactgtttcagttacttccgggtcaatctgttcctggtagcaagagacgcagtattttaagtaaaccactaaataaaccaataaatcagtatctaatgtcttttctacttattctactttattccctctacctcacctagataacacctcatgagtctatcctggaggaatgggttgctgcttcacgggtatcatctgcgcggtatcccaccggctctcctttgtacctctagccttaatcccttttaatgacttttggacattttttttatactatccttgatcaattagcataaatcagcatttctcattaaaaaccatatgcgtccctttccagtggtactcaaatctaaccctctatagtcgcagaggacgctgctgctgctgctgctgttatctgctgctgaagattgctcttctgcacagttgtgaacctgtcttggcctgagtagagctggctacgttgcccctgttccttgcctaccactacagcatcggtgtccacgcactctgccagggccattgctagcaggactggtaaaggtagagaagttttcttatcttttgaacctgagggatataagaactgctggatattccttcctggaaacacatctaagtctggggccaagaatcccagtctgcaactgtcttcccgggagtgttattttccccaggttttctcctgtaagacaggctctttatggccttaactccgtgtccctccctagaagctcccttccaggcccctttcatggggaaggtcacatatgaccagtattagagatgagactaatagctcctcccacaatccccgttgtgtcttctgtccactgtccacaggctgttgctagccggggccatctccaacaggaatcagtctgctgtgctgctgtgggcagtcagaatgcagcagtgggatgagatgagcaggtgtagcaactccggattggcccggctgtggttgctgaggagattttccagctcttccccagcaaccaatatcacaaacacctggcaatgggcttcttcagtgggcacacacatgggttcaaggaacggtcaaaacattggcagacacacgggttcaaggaatggccagagcattgtgcacctctattttttcagatcagtgaaactagttctgctaacaatgaaatctactttgccaatttcagggcttctgtgaccttttatattttgtcaggatctttcattagcatgggccttgggtccctgtgtgggatcatcctgattgtttttgtgttagcatgggtcttgggtccctttgtggaattattttgattgtttttgtgatagcatgggccttgagtccctgctcgggattatcctgagagcactgcagacaggtaggctttgctagcttgttgggtcagcattagcaaccttggaaccaacaagtatctttgcaacaattcttgtagggaagcagcatttatagttgggttgtttagccagcttgtcacagaagtctggggactgtcatctctggaattatctatgatcaccagccagccctcctggttttgagtatcctctacacaggttgcttttctttcttcttgcttctatgagagagctctgcaagcagaaagagggtaaacatatcttttgggggcgttggaggggactgcagagtggaattttcatggattagaccttgggtctttgtgtgagcttggcagagcaccaatgccacaggccagggtgtgtgtgtgtgtctgtttgggataggcagcttctaggatttagtttctgttttaatttctttgcccctgaggtaagcagtttcctttctccatatatgactgctctgagtgttgatgttaggggtgattccccctgttgtatgcttcaactcccaactgtaaacactttcatatccaaattcgggagagttcatccatcagacttgcactgagaagaaaatctcttctaaaacccctgtaatcatagaggggctccccattctcttcagacaatcttgtttctgaacttaggtcctggtgacattgctgtgacttcgtgggtgagtggagagcctggcactttcctggggatatatacatccccttgtatataagtacattgtagctgtcttcagatacacatgtggttgctgggaattgaactcaggacctctggaagagctcttaaccactgagccatctcagcagcccctgtatatactattattacagtggcagttattactaaacccattattttccaaataaaagacaccattcagatttacaaagaagccttccaatactagagctgggcagatatcaactctctaagcttatctgtctgcttccctgacaaaatccccattaatacttgttctatatgggctgtttctgttccatcagacctgtcctcagaacaaactgctcttcaccatatgctcatggtccatactactccatggtgactcgcttcctcctcctcctcttcctcctccttctcttcttccttctcctcttcttctcttccttttcttcctcctcttcttcttcctcttcctcctcctcctattcttccttctcctcttcctcctcctcctcctcctcttcctcctccttctcttcttccttctcctcttcttctcttccttttcttcctcctcttcttcttcctcttcctcctcctcctcttcttccttctcctcttcctcctcctcctcctcctcttcttcctcctctttacccttgtggttccaacctgggaccctaagcctggcaattgaagctttgcctacctgtcttctgcccagctataggctgtcagcaactttattaactaatcagggataacttgggggtcaaggtttatacaacaaaagctggtgtatgtgggaactcactggttttggggcagccagatcttgggatgtggcatttagcttttgaatacactgcagcatcagaccaaccctagtgtttcccgacccttttgtctatgtaataaagaaggtctttctctcaataaaaaaatatacagtaggaataatgtgagacaattatgaaaagtattaggtaaagtaacattcataaaatccaggccatttgtgtttggcaactttgaataacaattttattatctatcttatcttggtgagttcagagttatatttaaattattttttcattagtatcttaagtatttaaatcctttaactttcataacttgtaattaccaaccttaaaggaccacagtaccagcgtcttggaatccctttgaggcttggcttcggaggccagtgccacctctcaccaaagctttagatgcaatagtttgcaggatgcttaaacccccttggctcttcctaattctctgggtagtggctggtctatccttacatggtctggaggtccagcctagtatcgtcttctagtcagagaccatggttctgagtatcacagtccccttgtcccctggcaggggacccaggaatctcttcagaggtgcactattcccagttctgaagacgttcaattcgctgagacaaatatcagtctcttgattaactttgtctgttgaaggagcgctcactgcagtctccagggatgctgtgagactccctctggagttaagtgttctgaaaccaaggagactggaggagaggagtaccacaccacctccagtaggatttgtgtgacaagatccatagactgaggcgattgacctcaaaagggggaggcctcctggaaccagttatggaactgttcactggaaaaaaattatttttttaattaggtattttcctcatttacatttccaatgctatcccaaaagtcccccatatcctcccccccccgaaaaaattattgagccgtagttttcatggcaaactatcctctttgttattccttttcttttttacatgttcctggtagcctaggccaaaatcttaagcaagaataatgggcaaaaaaccatccctagagatgaggtcactaacatgaccttatcccagggaaaccaacgctttactttttaaatcatttacaaaactattatgataaaaactttcccaacaataaaattccatatggctacaagtgtgtcgttggtggtaacacacttaattagaaagaattaaaatagtttaaatttacaaattgaagatttataaaaaatcaggcattagatgttaagtaataactgaccatggggctggagagttagctcagcggttaagagtactgaccataaagatttattaacctgctcttggaaatatgccactagccttggatgacagaccccactgaatacatccttttagaattgttttattttgatgatttatattaagaatgatgttacctgttctgtatgtgattcactgaatacatagtttcagagttgtaatgcttggatgatttttgtgctctactgtgacaaatgatttttgttggtatttgtgatagttttactggatacagtttctaagagttgtaatgtttgtttttttaatgtataaaatcccctgcttgagagttgcaaaatacactcagattcaaactgcctctgtgtttgtttctgtttgtcaccaccaaatccttacccatctagcttcgaggaccctcattccagggatccccatacctgactggggtggtccatggcagaggagatgtcattggaggaccagagttaggatgctcaggaaggcttcaatgctggggccagtttgctttatctctctccacctctctgcttcccaagtgctgggattaaaggcgtgggccaccaccacttggttaccttttcttttcttttcttctcttttcttttctttttttttaaaagatttatttatttattatatgtaagtacactgtagctgtcttcagacactacagaagagggcatcagatcttgttacagatggttgtgagccaccatatggttgctgggatttgaactccagaccttcagaagagcagtcgggtgctcttacccaccagccccgcattttcattttgtactttaaaaccacaagcaaaagccgggcgtggtggcgcctttaatcacagcattcaggaggcagaggcaggtggatttctgagttcgaggccagcctggtctacagagtgagttccaggacagccagggctacacagaggaaccctgtctcgaaaaacaaaacaaacaacaacaaaaaaggcaatgagaaatcagaaaactttcttcatagccaatgtgctgttgctcttgcttttagactgggtctcactctatagccctgattggctttgagtttagagatttgcctgcctctgcctcctgagttctgggattaaatgcttgaaggtccacaaccagttaaggatgtatttaagggctggagagatggcttagtgattaagagcactgattgctcttctgaaggtactgagttcaaatcccagcaacctcatggtggctgacaaccagccataatgagacctgacaccctcttctgttgcatctgacaatagct

SEQ ID NO: 80 - DNA, 2909 bp, Mus musculus
cagcagcgcgcggtgtctcccgcccgcttgggttggggtcgcgctggcttcggactcagctctcctcggttgaggccatggaggacgatcggaaggacgcagtctatgggacgcctcagaaatacgaccccaccttcaaaggacccatttacaacaggggatgcacagatgtcatttgctgtgtgttgctcttcctggccatcgtaggctatgtggctgtgggcatcatagcctggacccatggagaccctcggaaggtgatctaccccactgatagccggggcgaattctgtgggcaaaaggggacaaaaaatgcggacaaaccgttcttgttttacttcaacatcgtgaagtgtgccaaccccctggtcctgctggaatttcactgtcccacccctcagatctgcgtgaagcagtgtccagaccgctatctcacccttctgagtgcgcgcaacactcgcgactttgactattacaagcagttctgtgtgcctggcttccagaacaataaaggggtgactgagatactccgagatggggagtgtccagcggttatcacccccagcaaaccttgtgagtatggggatcccacgtggatgaggtgcagactggggaatctgcaaggactccctctgacagcgccttctggtcccacagtggcccagcggtgctttcccgccatccatgccagcaaaggagtcctcatggtgggcaatgagacgacctatgaggacggacatggcgccagaaagaacattacagatctagtggagggtgccaaaaaggccaacaagattctagaggcccggcaactcgccatgcagatatttgaagattacactgtatcctggtactggattatcataggtctggtcattgccatggtgctgagtctcctgttcatcgtcctgctgcgattcctggctggcattatggtctgggtgatgattgtcatggtgatcctggtgcttggctatggcatcttccactgctacatggagtactcgagactccgtggagaggcaggctccgacgtctccctggtggaccttggcttccagacggacctccgagtgtacctgcacttgaggcagacctggatggcttttatgatcattttaagcatcctggaagtggtcatcatcctgttacttatctttctgcgcaaaaggatattgatcgccatcgccctcatcaaagaagccagcagattcctgtccacctccaacaccgccgtgtacaaggttgttgatgacacagcctgcccacttctgaggaaaacctgcaacccagagaccttccccttgcggaatgagagcctccagtgtcccactgcccgctgccagtttgccttctatggtggcgaatcgacctaccaccgtgccctgctgggcctgcagatcttcaatgcattcatgttcttctggctagccaacttcgtgctggccctaggccaggtaaccctggccggagcctttgcctcctattactgggctatgcggaagcctgatgatatgcctgccttccccctcttctctgcttttggccgagcactcaggtaccacacgggctccttagcttttggctcccttatcttagccatcgtgcagatcatccgagtgatgctggaatacctggaccagcgcctaaaagctgcacagaacaagtttgccaagttcctcatggtctgtctcaagtgctgcttctggtgcctagagaagtttatcaaattcctgaataggaatgcctacatcatggtgaacagcagggctgtattgctgccctggattgctatctatggcaccaacttctgtacctcagccaggaatgccttcttcctgcttatgagaaatatcatcagggtggccgtcctggacaaagttacagacttcctcttcctgttgggcaaacttctgattgtgggtagtgtgggcatcctggccttcttcttcttcacccatcggatcagaattgtgcaagatacagccccacctctcaattattactgggttccgatcctgacagtgatcattggctcctacttgatcgcgcacggcttcttcagcgtctatggcatgtgcgtggacacgctgttcctctgtttcttggaggatctggagagaaatgacggttcagccgagaggccttacttcatgtcttccactctcaagaaactcttgaataaaaccaacaagaaagctccagaactggatggagccaccaagagtgccttcatatgtaaccccacctccagcgtgggctggctatggtcacaggaagaagtgtgcacccagaactggaggagtcttctggataaacagacagcatctgcgaggagggccctgtgtgaggaacgattggtgttgctgctggtggttgggagtagttgtggaaagcaggcctctgtacttagaccctacagagttgctttgactgatgacttctaaatggaaaacttgaggttggaaaatgaatgaaaatagggcctgtctccccagccctttttctgccagtaatgcacactgctctctttgtaagagatgagaaacttaagttcacccaagggatggtttcagggactgaggtgtgggtgtgttctatattccaaattaactaggcctatctggtttctttcacttgaaactagagaatctgtttgccaaacttcttgatcttgggagccagtagactggttcttcactttacctaccgtatgctaaggcccgcccctcacccctactttggccatccgtaagatagcaggatcttggagacaccgctcccagcctgaggtcccaaggtttcctgtgcctgccttgtgtgccatcccaacccaccctcttgtatgcccagccctgtgcttatgtaattgcattccggccagttaataaagtgcctcttgtacagag

SEQ ID NO: 81 - protein, 804 aa, Mus musculus
ARVSRPLGLGSRWLRTQLSSVEAMEDDRKDAVYGTPQKYDPTFKGPIYNRGCTDVICCVLLFLAIVGYVAVGIIAWTHGDPRKVIYPTDSRGEFCGQKGTKNADKPFLFYFNIVKCANPLVLLEFHCPTPQICVKQCPDRYLTLLSARNTRDFDYYKQFCVPGFQNNKGVTEILRDGECPAVITPSKPCEYGDPTWMRCRLGNLQGLPLTAPSGPTVAQRCFPAIHASKGVLMVGNETTYEDGHGARKNITDLVEGAKKANKIARQLAMQIFEDYTVSWYWIIIGLVIAMVLSLLFIVLLRFLAGIMVWVMIVMVILVLGYGIFHCYMEYSRLRGEAGSDVSLVDLGFQTDLRVYLHLRQTWMAFMIILSIVVIILLLIFLRKRILIAIALIKEASRFLSTSNTAVYKVVDDTACPLLRKTCNPETFPLRNESLQCPTARCQFAFYGGESTYHRALLGLQIFNAFMFFWLANFVLALGQVTLAGAFASYYWAMRKPDDMPAFPLFSAFGRALRYHTGSLAFGSLILAIVQIIRVMLEYLDQRLKAAQNKFAKFLMVCLKCCFWCLEKFIKFLNRNAYIMVNSRAVLLPWIAIYGTNFCTSARNAFFLLMRNIIRVAVLDKVTDFLFLLGKLLIVGSVGILAFFFFTIRIVQDTAPPLNYYWVPILTVIIGSYLIAHGFFSVYGMCVDTLFLCFLEDLERNDGSAERPYFMSSTLKKLLNKTNKKAPELDGATKSAFICNPTSSVGWLWSQEEVCTQNWRSLLDKQTASARRALCEERLVLLLVVGSSCGKQASVLRPYRVTDDF

SEQ ID NO: 82 - DNA, 62124 bp, Homo sapiens
ttatcttcatttgacagatagggaaactgaggccttgagagagtaagtgatttgtacaatgtcatccagtcagaagaagcagagctgggatttgagctctggaaagcacaaggtttttttgttttgttttgttttttgttttgagacagagtctcgctctgtcgcccaggctggagtggagtggtgtgatcttgactcactgcaacctccgcctcacgggttcgagtgattcttctgtctcagcttcccaagtagctgggaccacaggtttgtgccactatgcctggctaatttttgtatttttagtagagatgggggttcgccattttggccaggacggtctcaaactcctgaccttgtgatccgcccgcattgcacgttggcctcccaaagtgctgggattacaggtttgagccactgcacccggacttttttgttttttgagatggaatttcactcttgttgcccaggctggagggcaatggtgcaaccttggctcaccataccctccgcctcccaggttcaagtgattctcctgcctcagcctcccaagtagctgggattacaggcatgcaccaccatgcctggctaattttgtatttttagtacagacaaggtttctccatgttggtcaggctggtctcaaactcccgacctcaggtgatccacccacctcagcctcccaaagtgctgggattacaggggtgagccatcgcacctggccctgattattattattattattattattatttttgaggcagggtctctgtcacccaggctggagtgcagtggtgtgatctcagctcactgcaacctccacctccccaggttcaagcaatcaagcaattctcccaccccagcctcctgcacagctgggaccacaggtgcgtgaccaccacatccagctaatttttatactttttggtacagacaggtttcacaatgtcgcccaggctggtctccaacttgtggacttaagtggtccacccgcctcggcctcccacagtgctgggattataggcgtgagccatctcgcccagcctaaagcccaagactttatgttgcttctgcccaaaggaggggggtggtccttcatgctcccagcaactgcctgctgagaaggtcacctagggggatgcagtcactgctaggccctcaccccagcctagacattgctgaacctcaaaataactcgtctcctggcagccgggcgtggtggctcacgcctgtaatcctagcacttcgggaggctgaggtgggtggatcacctgaggtcaggagtttgagaccagcctggccaaaatggtgaaaccctgtctggactaaaaatacagaattagccgggggtggtagcacatgcctgtaatcccacctactcaggagactgaggcaggagaatcacttgaaactgggaggcagaggttgcagtgagccaagattgcgccattgcactccagcctggggcaatagagtgagactctgtctcaaaaacaacaacaacaacaaaatgaagaactcatctcctggggccctgagatgttttcaggcagtaagcagaacccgaaagcctgggcccagtgccctggaatctgaaactccaggcttgtttggcatgaaaaattcatgagcccaaaagcttacttggggtcagagaacagagcagctctgtgtgctggctctgcctgccccgcctgccccacctcagtggcggcctcccccatccccctgaggctgtggccttgtcctagttccttctggatgcctggagcctcctccagcctctcccagggaccacgcctctaggccctgtccacaatcccttctccacaccactaaagagatctctctgaaactcacaattattttttgactctcactctcacatcctctatggccccccattgccctccaaccacccccacctggcacagtcagacacctgctgacctctgccacaggacaccacctgaacctgctgtcccagacaccctaactgcccgaatttcagttcctctcctgctgtctcaagccatcctcccacctcagcctcccaagtagctgagactatagacacgtgccaccacagctggccaccttagccattttgaagtgcacagttcggtggcattaagcacattaatggccatgcaaccgtcaccaccatccatctccagaactttctcatcttcccaaaggaaaacttctccctatgaaacactccttctccctctcccaacccctggcacccactcttcttcttcttcttcttctccttttccttctcctcctcctccttcttcttcttcttttcttttttttatttattttgagatggagtctcaccgtcaccgaggcttgagtgcagtggcacaatctcggctcactgcagcctccatctcctaggttcaagcagttctcctgcctcagcctcctgagtagctgggattacaggcgccccccaccacgcccagctaattttatttttttatattttatttattcatttacttttattattttattattatttttttttgagacagagtctcgctctgttgcccaggctggagtgcagtggcacgatctcagctccctgcaagctctgcctcccgggttcatgccattctcctgcctcagcctcccgagtagctgggactacaggtgcctgccaccacacccggctaatttttgtatttttagtagaggcagggtttcgccatattggccaggctggtctcttggccaagctggtctggaactcctgacctggagatgtgcctgcctcagcctcccaaagtgctgggattataggcgtgagccgccgcgcccagcttttttttcttttttttttgagacggattctcactttgtcgcccaggggctggagtgcagtggcgcaatctcagctaattgcaacctcctccttctcctagttcaagtgattctcctgcctcagcctcccaagtagctgggattacaggcatctgccaccacgctgggctaatttttgtatttttggtagagactgggtttcgccatgttgactaggctggtctcaaactcctgacctcaagtgatccacccatctcagcctcccaatgtgctgggattacaagtgtaagccaccatgcccagctactcaggagtctgaggtgggaggatcactggagcccagaagattgaggctgcagtgagctatggttgcaccactgcactccagcctcggtgacaaagcaagaacctatcttaagaaaatactgtgctgagccagttcctgagaaaacaaaatagaaaacaaaactaaagaaaaggcaaaagttcctcccagcagagatgtgagagaaaaagaaaaaaaaagtcccctgtgacacccccataccccaatcttcgtccctctcataaccactggctgattcagatctttttcagctgggttacatgcaggggggtgtgtgtgtgtgtttgtgtgtgtgtgtgtgtgtgtgtgtgtgtgtgcgcgtgttgccctctttctctctctttctcccataccatataagactatacaacttgtggatgggcacagtggctctcacctgtaatcccagaactttgggaggcagaggcgggtggggcacttgaggccaagagttcaagagcagcctgggcaacatggcaaaaaatctgtctctactaaaaatataaaaactggccaggtgtggtggctcacgcctgtaatccctgcactttggaggctaaggcaggtgaatcacctgaggtcaggagtttgagacaagcctggccaacatgataaaatcctgtctctactaaaaatacaaaaaattagccaggtatgctggcggacacctgtaatcccagctactcgggaggctgaggcaggagaattgcttgaacccaggaggcagaggttgcagtgagccgagatcatgccactgcactcgagcctgggtgacagaacaagaatctgtctcaaaaacaaaacaaaacaaaacaaacaagcaacaacaactatatatatatatatatatatgtatatagattaagctgggcatggtggtgcgtacctgaaatcccagctactccagaggctgaggcacacaaatcacttgaacccaagagaaggaggtttcagtgagctgagctcgcaccactgcactccagcctgggcgacagagagagactctgtcttaaataaaaaaaaaaaaatacaacttgctattatcactcaacaatatgacctggacgctactccggaaagcatgtggttgaaggggaaggaagtgtgtcttgggtgtaaagtcggactccctgggttcagatccttgcagagccacgggctcattatgttactgtgggtaaattacttcacctctctgggtcactttccccaattggaaaatgattataatgatttaatacagagtgcttgggccagacgcggtgtctcacgcctgtaatcccagcactttgggaggccgaggcggtggatcatgaggtcaggagattgacaccatcatggctaagacagtgaaacccgttcttcactaaaaatacaaaaaactagctgagcgtggtggtgggtgctgtaatcccagctactcagaaggctgaggcaggagaattgcttgaacccgggaggcagatggtgcagtgagctgagatcacgccactgcactccagcttggcgacagagtgagactccatctcaaaaactaaaacaaacaacaacaactatatacacacacacacacacacatacacacacagagagcgctttactgggtgagccaagatcgcgccactgccctccagcagccttggttcaaaaaaaaaaggtgcttggccagcatggtggctcatgcttgtaatcccagcacttcaagaggccaagatgggcagatcgattgaggctaatgagacctggtctctatttcaaaaaaaagaaaaagagttaaaaaaatatataaagcatttaataccttgtctgacactgactaagctttctataaacattcactctttctttccttttttttttttttgagaccgagtctcgttctgtcacccaggctggtgtgcaatggtgcactcttggatcactgcaacctctgactcccaggttcaagtgattctcctgcttcagcctcccaagtagctgggattacatgcatgtgccaccacactcggctaattttgtatttttagtaaagacgggatttctccatgttggtcgggctggtctcgaactcccgacctcaggtgatccgcccgcctcggcctcccaaagtgctgggattacaggtgagagccactgcgtctggccttagagacagattttcatcgtgttgtccaggctaatcttgaactcctgtcctcaagtgaccctcctgcctcccagagtgctgggatcacagatgtgagccaccactcctggctgtaaacagtcactcttattataatctgcaggaccacctccttttttcttaaactattttaaaaattctcattttgaaatgtaacttttttatttattatgtatacaaacacacatatatatttgcatcataaatgttattcccaatatgggacagattcctttcaacccccaggtgaatcacatggtaccctggaaagacctaggaagccctccctcccaccatctccagggaggtagtgagaacggcaggtgctggggactgggaaggctttggagtttcccagcctacctcttctccctttctcaacaaaggatacctgttccctattattccccttatccactcttcccttttttaaaaaaaacccacaaaaccatcattagtaaaaaaacaaacaaaaccccttcaagtattgggagttaggggtcctgggctgggacttggagttacaggtcaccaaggaagagggaagggaagagaaggaggggctgtcacttactactgctggctttcttccttgctgcatgctatggcaactgtgtgtcgacctcctttgctggcaactgcacgtatgggaccactgagcccggaatgaaacagtcctttttaaaaaactttttttgagacagagtctcgctctgtcacccaggctggagtgcagtggcatgatttcagctcactgcagcctccacctcccgggttccagcaactctcctgcctcagcttcccgagtagctgtgaatacaggcgcccgccaccacatccggctaagttttgtattttagtagagatggggttttgccatgttggccaggctggtctcaaactcctgacctcaggtgatccacctgccttggcctcccaaagtgctggggttacaggtgtgagccactgcacccagcctagaagttcttcactgataaaatgtgaggatatttctcaaggtgtgtgatactgatgtcagctcatttgatgttgagatactgatccaccgaatggagggtgccacagatgttcaggtctttcttgagttccatgaccacattcatgcccacaagggacttgaaaaaaggaatagaagagcatgatgctggcgacctgaccaggaagagcaacacatattttattttatttatttatttatttgagatgctgtctcactctttcacccaggccggagtgcagtggtgcaatcttggctcactgcgacctctgcctcccggggtcaagcaattctctgcctcagcctcctgaggagctgggattacaggcgcccgccgccacgcccgtctaatttttttttttttttgtatttttagtagggaccaggtttcaccaagttagtcaagctggtcttgaactcctgaccttgtgatccactcaactcagcttcccaaagtgctgggattacaggcgtgagccaccgtgccgggccagcaacacatattttaaaagggcagaagtcggttgggcacagcggcttacacctgtaatccctgcactttgggaggctgaggttggtggatcacctgagatcaggagttcgagaccagcctgggcaacatggcgaaaccccgtctctactaaaatacaaaaattgccactgtactccagcttgggcaacagagcaagattctgtctcagaaaaaaaaggcaggcagagtacgggggagaaggtcaagtattcacaaactaaactaagctatgtaactacaattctgtttccagtgcccagaagctgctcctatcatcccagtagttattactaccccaaaagtcaaccactgatatatgttctgttactataggttgattagctatgcctgttctagaacttcagaaaaaagtgtgtggtttctttcacacaacattatgctttttggggagagattcatccatatttttgcctgtatcaatagtttattcctggaccaggcgctgtggctcacacctgtaatctcagcactctaggaggctgaggcagaaggatcacttgagaccagcctgggcacccatagggagaccctcatctccacaaaaatttaaaaaattagccgagtatgtccaggtgcggtggctcatgcctataatcccagcacttttggaggctgaggggggcggatcacctgaggtcgggagttccagaccagcccgaccaacatagagaaaccccgtctctactaaaaatacaaaattagccaggcgtggtggtgcatgcctgtaatcccggctactcagagactaaggcaggagaatcacttgaacttgggagacggaggttgcggtgagctgagatcacaccattgcaccattgcactccagcctgagcaacaagagtgaaactttgtcaaaaaaagaaagaaagaaagaaagaaattagccaggcatgatagtgtgtgcctgtagtcccagcaacgggaggctgaggcaggaggatcacttgagctgaggaggtcagggcttcagtcagctatgactgcaccatcgcaatccagcctgggcaatacagcaagatcctgtccctaaaaaaagaaagaagaaaacattcattcctcatcactaaggagaatcccatggtatgggtgaaacccaccatggtttgcttcaccaatgatctgttaatgggcatttgggctgctcctagtttttttgcccactacgaataaggatactataaggctatcatgaacatttatatgaatgtgtctgtgggtttttcttttcttcacttatactttttcttgggtatatacctagaagtgcaatttctagggtattaactttgcaagaaactgccagatcgttttccaactggttgtggcattttacattctcaccaacagtgtaggagagcccccatatgcttcccatcttcctcaacacttggttcgaccagtctttttaattttagctattcaggtgggtgtgcaatgatatctcatcgaggttttgatttacatttccctgatgacttcgtgctttattcttttttctttctttctttctttttttttttttttttgagacagggtctcactctgtcacccaggctggagtgcagtgatgttttcacccatttttctttctttttttttttctttttgagacagagtttcgctttttgcccagttctgttgcccagtttggagtgcaatagcgtcatctcagctcaccgcaacctccacctcctgggttcaagcgattctcctcctcagcctccagagtagctgggattacaggcatgtgccaccacaccaggctaattttttgtatttttagtaaagacagggattctccatgttggtcaggctggtctcgaactcccgacttcaagtgatccgcccgcctcggcctcccaaagtgctgggattacaggcgtgagcctccgcacccggcctgttttcacccattttttccacaataactgtcaaggctgcagggaacaccccttggttactacatcccatgcacacacacctgcagtggtttgtccagggtcagtgccagacaggaatcgcaccaggtgaacatgacttggatatactctttctgccaggaaacattctgcttcaaagtattcactcacctgattttatgttattaaactctaaaattcttaccaatctgatgaatgaaaatggcatcttttggtatgttcagtggtacacggtgatcaatatttacctatcaattatttatctatccatcttctattattatttttattttattttattttattttattttttgagacggagacggagtgtcgctctgtcgcccaggctggagtgcagtgacacggtctcggctcactgcaagctccgcctcccgggttcacgccattctcctgcctcagcctcccgagtagctgagattacaggtgcccgccaccactcccggctaatgttttgtatttttagtagagacggggtttcaccgtgttagccaggatggtctcgatctcctgaccatcttcccgcctcggcctcccaaagtgctgggattacaggcgtgagccactgcgcccggcctattattattattaattcttattattattttgagacagggttgcccaggcagtggcacaatcatagctcactgcagcctcaaactcttggactcaagtgatcctcctacctcaggctcccgagtagctgaattacaagtgtgcctcaccaagcccagctaattttttaaattttttgtacagatgagggtcttcctatgttgcccaggctggtctggaactatttggcccaagctatcctcccgcctcagcctccggagtggctgggattacaggcccgcgccaccacgcccagcctcaatatctccttgacgatgaaatgcatagatgaatgaatgaatgaatgacctctgtttgctcaccatgcacaccctcaagagggttacttgagagctaagactggaaacaaaggttggggccccacccctcccgggccaggccccgcccccggtccccgccctcgccctctcgaggctcccattggaggaggcgcgcgggggctggcccggcgggaggggcggggccggggcccggggcggggcgctgcagcccgcggagcctcccgcccgcccgggctggggtcgcgctggctcggactccgctccccgccccgccgcggccatggaggacgagcggaaaaacggagcctacggtaggagccgcctccggtcaggggccgcctctgctgacctgcgggtgggaggaccttgagccagggggacatctgagaccctaggcaccggcgctgcggctggatggccctccgcgctcgggcccccgcatccgacactgcgcggatcccacgccccctgctctaaccgggtcgccccgcgtcccctccccgggagccccagctccccctccggctgatgggccggggctcacggcgcatgctccgcccggggaggtcccgttatctgggcggctcggatggcgggcgggggaggggaggcgcggcgatctgggctcggaaaagagacagggccctgacctcctcaaatccccctcctcttccaatcccctttgtccatttcttcctccttcccttttccgccagaagtagccgtccggggcttttggccagatggggaaactgaggcaagactgggcagaccgaatacccagctgagagcccaccgagtctggccagccgcctggaaacggcggaaagaagggcgcctttggtgagggggcaggaaggaagcaggaaaaaattgagaaactttcccctccctgtgcaaggggctggcggctcccacctcccatttcgagaggtgctggcgactggaacttcctccggcgaacctcttggggcgacctcaggcatttggccccggggatgggcccaggatgtgggcttctccatcaccagcgccctgtggtgccgccctcccctgaattcccacggtgggaggagttgccatcctcagtttctcctttctcttctccattttgggtccccaagacccaactgagccccagccccacgtgatactaccctgggggcaaagaagcactgtcgcgcccctctttgtgtgacaagaacttcctggaaactgtgacactgaagggccctggggagggggccggaaacggctcgaaaatattcaagaaaaacaagttgggtagagctgtgcctccctgcccccagggactgtatggcctcaggaggctgccaggagagacagatcagggaggctgggaccttccctgcagagcccagccaaggggaggcagcaggacctggccacctcccagcaccccctccccaattgaagcttccagcccagtcccctggagggacccccttggtcttcatttgggctcaaattccagccccagtggctgtgggtgctgtgtgtcccttgggtgtggcaggctgtctctgacctgagagtctcagcctgaggttctagccaggtcttgcccgcttgtgggcagcatctgagggggtcttgggtctctatgaagtttggctgggacagggacgaggggcagaatggacaatgatatgattcacccagccttgaatttggccaaaggatggaattgagctgtggtcggagctaggcagacctcccaggcccacacatgagacaggggaccctgccagacagagcctttgctgggcttaagggagtaccttcaatcaacaaatatttattgagcacgatttaggcaggggtctagacactggaaacccagcagtgaatagaccagtgaaatccttgaccgcagggagtagtcaagggaaggaatgtgtaattttaggttgttgtaagttgtgaagcaaagaacaagacgtcgtgtgatcttgtgtggcagaaacagcagcgattattttaggttactaagggctggaggttgagccagccgtgggaagatttaggggaagtgtgtttcacacagaaagaacagcaaacaaaccacgtagttacttaattacattttgccttggggccaaagggggcatctggtttgattgcttgaagtaggggttttgcttagcttggaagtagttccttcacatcagaaccaaaaacctgggggccttggactggcccatgacgtccctgatagatgaagggagctttcccctggggatggtgtggaagaggggctcacttatcctaccctcctgccccagtggcttcccatccgtcatgagtttaggggctgacatcagacaaacctaggctcaaatcctggctctgacacttaggagccgtgtggccctgggtgagtccgtgacctctctgaagctctgtgtctttgtctataggactcggtggaccacactcactggtgggggaagaattttgcataggctgtcaagctcgatgtgctcaggaggcctctggggctggtagtactggggacatggctttcccgtgagctgatagagaagcaacccaaggcattgacttgggtgagaccaggttgggcaggaagtgcattcctcagcagagatcatatctaaaggaaggcagcagttccaagggaaatggggaaatggctctgggccccggcggatgtcagcaatgggcattgccatccttcccagccagcccacccttggcaagagcagtgcagaaaaagattctgcaatccaaaacaataaactctgaccatggagaaataaaactggggtcggggggacagtagtgatgcttatttaaaaaacggactcttgccaggtattgtggctgacacctgtaatcccagcactttaggaggccaaggctgggggatcacgaggtcaggagatcgagacaatcctggctaccacagtgaaaccccatctctacaaaaaataacaaaaaatgccagccacagtggttcatgcctgtaatcccagcactttgggagccaaggcaggtggatcacctgaggtcgggagttcgagaccagcctgaccaacatggtgaattcccatctctattaaaaatacaaaattagccaggcatggtggtgcatgcctgtaatcccagctactccagaggctgaggcaggagaatcgcttgaacttgggaggcagaggttgcggtgagccgagtttgtgccactgcactccagcctgggcaaaaagagtgaaattcagtctcgaaataaataaataaataaataataaaaatacaaaaaattagtgtacctatagtcccagctactcgggaggctgaggccggagaatcgcttcaacctgggaggcagaggttacagtgagccaaggtggcgccactgcactccagcttaggtgacagagtgagactccgtctcaaaaaaaaaaaaggactcttggccaggcaaggattacaggttcacacctgtaatcccagcactttgagaggctgaggtgggtgggtcacttgaggtcaggagatcgaggccagcctggccaacatggtgaaaccccgtctctattaaaaatataaaaattagccaagcatggtggtgcacatctgtaatcccagctacttgggaggctgagacaggagaactgattgaacctgggaggcagaggttgcagtgagctgagatggtgccactgcactccaacctgggctatggagcgagactccatctcaaaaaacaacaaaaaccagactctggctgggcagtcgctgatgcctataattccagcactttgggagtcccaggtgggaggatcgcttgagcccatgagtttgagaccagcctgggcaatatagtgagaccctgtctctacaaaaaaatttaaaaattaactgagcatggtggtgctcaactgtattccagctacttgggaggctgaggtgggaggattgcttgagcccaggaggcagaggttgcagtgagcaaagatagcgccactgcactccagcctggatgacagaggaagaccctgtctcaaaataaaaagcagattccctggtcccatttgctagaatacaattcagcctgcagtgaggccctggcacctgatttaaatatatatatatacatgtggccgggtgtggtggctcacgcctgtaatcccagcactttgggaggccgaggcaggtggatcacctgaagtcaggagttcgagaccagcctgaccaacatggcgaaaccctgtctctactaaaaatacaaaaattggctgggcacagtggctcacgcctctaatatcagcactttgggaggccgaggcaagtggatcacctggggtctggagtttgagaccaaccttaccaatatcgtgaaaccctgtctctactaaaaatacaaaaatgttcttggaatagtgacgtgcacctgtagtcccagctatgtgggaggctgagacaggagaattgcttgaacccaggaggcagaggttgcagtgagctgagatcgtgccatttctctccagcctgggtaacaagggcaaaactccatctcaaaaaataattatatacatatatattaaaatatatatatacacatacacatatatatgtatgtatgtatgtatgtatgaaaaggtagttacttacggcttttttttttttttttttttgagacggagtctcgctctgtcgcccaggctggagtgcagtgacacggtctcggctcactgcaagctccgcctcccgggttcacgccattctcctgcctcagcctcccgagtagctgggactacaggcgcccgccaccacgcctggctaatttttttgtattttttagtagagaccgggtttcgccatgttagccaggatggtctcgatctcctgaccttgtgatcagcctgccttggcctcccaaagtgctgagattacaggcgtgagccacctcgcccggcctcttggggctattttctttgaaagggataatacattcacatgctttaaatacaaaagatacaaaagatgttacggctttgagatgaaagtttccctcttgctctcccaccccggaccatactttattctttgttgttgttgttgttgtttatacacagggtctcactctgtcacccaggctgggctagagtgcagtggtgcgatcatagctcaccgcagcctcaaattcctgggctcaagtgatcctcctgcttctgcctcctgtgtagttgagactacgggtgtgtgccgtgatactcaactaattttttttttttttttttttagaggcagggtctcaccatgttgcccaggctggtcatgaagtcctgggctaaagcaatcctcctgtactggcctcccaaagtgctaggattataggcgtgggccaccacacccagcttttttttgtttatttgttttgcctaatatacattggagaggatctcttgtcaacacctccaaagcttcctcaatcatttattattattattatttttttttttttttgagacggagtctcactctgtcgctcaggctggagtgcagtggcgtgatctcggctcactgcaagcaccgcctcccgggttcatgccattctcctgcctcagcctcccgagtagctgggactacaggcgcccgccactgtgcctgccactgctcccggctaattttttgtatttttagtagagacgggatttcaccgtggtctcgatctcctgacctcgtgatccgcccccgcctcggcctcccaaagtgctgggattacaggtgtgagccactgcgcccagccaccccgtttctactaaaaataaaaaaattagctgggcatggtggcatgcacctgtagtctcagatacttgggaggctgaggcaggagaatcgcttgaacccaggaggtggaggttgtagtgagccgagatcgcgccactgcactccagcctgggcaacagagcgagactccgtctcaaagaaaaaaaaaaaaaaaggagagacagggtcttgctatgttgccttggctagcctagaactcctgagttgaagggatcctcccgcctcagcctcccgagtagctgggactgatcacaggtgtgtgccatggcgcccagcacaatcttttttcacggtagcatagaatagtacatttgtggatgggctgtcttttatttagccaatcaaagggaatatttattttaaactttttttcgaagttggaaatacatacataaaagggcatagatcctaaatatatgaggctgaaggagctttcacaaggtgaacaccttatctggccagcaaccagatgaggaaaaaagaacatttccagggccctgtcatgtgcaaggagggcctatttgtattattattttattagtatatatatattttatttatttatttatttttttaatttgagacagggtctcactctgtcacccagggttaagtgcagtggtacaatctcggctcactgcaacctctgcctcctgggtttaagcaattctcctgcctcagcctcccaaggacctgggactacaagattcgagttaccgtgcccgattaatttttgtattttttgtagagattgggttttgtcatgttgcccaggctggtctggaactcctgggctcaagctatccacgtgcttcagcctgccagagtgctggggctagagtcgtgagccactgcacccagcctacctttttttttttttttttttttgagatggagtcttgctctgttgcccaggctggagagcagtggcgccatctcagctcactgcaaactccacctcctgggttcaagcgattcttctgcctcagcctccccagtagctgggattacaggcatgtgccaccacgcccagctaatttttgtatttttggtagagacggggtttcaccatattggccaggctggtcttgaactcctgaccttgtgatctgcccaccttggcctcccaaagtgctgagattacaagcgtgagcaaccatgcccggcccagcctacattttaaattgaagtataatttggtttgtttttgttgcttttttcttttttttcaagacagaatcttgctctgtcgcccaggctggagtgtagtggcatgatctcagctcactgcaacctccgcctcctgggttcaagtgattctcctgcctcaggctcctgagtagctgggattacaggtgcacctcaccacgtccagctactttttgtatttttagtagagactgggttttgccatgtttgtcaggctggtctcaaactcctgacctcaagtgatccacccgcctcagtctcccaaaatactgggattaaaggcaagagccactgtgcctggcgaagtataatttacatactaaaaaaaccacacattattagtttttttgtagagatagagtcttgctatgttgtccaggctggtcttgaactcctgggctcaagtgatcctcccacctcagcctctcaaggtactgagattacaggtgtaagccaccatgcccagcccataactctttttaaatgtacagatctatgatgttactcttatttatttatttattttttgagacagaatctgtctctgttgcccaggctgaagggcagggcacaatctcggctgactgcagcctctgcctcctgggttcaagttattctcctgcctcagcctcccgaatagctgggattataggcatgcacaaccatgcccggctaatttttgtatttttagtagagacagggtttcactatgttgaccaggctggtctcaaactcgtgacctcaaatgattctcccactttggcctcccaaagtgctgggattacaggcgtgagccaccgagcctggctaatgttacttatatttagattgttgggtggtggcctgtttttgtaaggctagtgggctaagaatggctcttatatttttaaatggttgtgaaaaaagaaaaaaatatatatatatatgacagatgatatgtgaaccacaaagcttaaaatctttaatatcttgtccttaacagaaaacatttgcagagccctggtagagaattctccctagagacttttcttttccttttttttttttttttttgagactgagtctcactcagtcacccaggctggagtgcagtgacgtgatctcggctcactgcaagctccgcctcccgggttcacgccattctcctgcctcagcctcccgagtagctgggattacaggcgcccgccaccatgcccggctgatttttttgtatttttttagtagaaacggggtttcactgtgttagccagatggtcttgatctcctgacctcgtgatctgcccgcctcggcctcccaaagtgctgggattacagtcgtgagccaccgcgcctggctttttttttttttttttttttttttgagatggagtttcactcttgttgcccaggctggagtgcaatggcgtgatcttggctcactgcaacctttgcctcccgggttcaagtgattctctggcctcagcctcccgagtagctgggattacaggcatgtgccaccatgcctggctcatttttgtatttttagtagagacggggtttcaccatgttggccaggctggtctggaactcctgacctcaagtgatccgctcgcctcggcctcccaaagtgctgggattacagttgtgagccaccgcgccccgccaagacttttcttttgccatttcccaatcgatccccaaggtgaacatgatatttatttatttatttttaatttaaaaaaaaattttttttgagagggagtcttatgatgttccccaggctggttgaattccccggctgaagcgatccttccccttcaacctcctaagtaggggactataggcatgtgcctctgtgccgggctagagagcattattttaaaatattattttaggctgcgtgcagtgcctcacgcctgtaatcccagcactttgtgaggcccaggcgggtaggtcacttgaggtcaggagttcgagaccagcctgaccaagatggtgaaaccccatctctgctaacactacaaaatttagccaggcgtggtggcaggtacctgtaatctcagctactcagggggctgaggcaggagaattgcttgaacctgggcagcagaggttgcagttagccaagattgcgccactgcactccagcctgggcaagagagtgagacactatttcaaaaaataataaataaataaataaacaaacaagagacccggtgcagtggttcactcctgtaatcccagctgtttgtgaggccaaggtgggtggatcgtggttcactcctataatcccagctgtttgtgaggccaaggtgggtggatcgcttgagtccaggagtttgagactagcctgggcaacattgcaaaaccccttcttcccaaaaatatgcaaaaaaattagctggtcatggtggcttatgcctgtggtccgagccactctggagggtgaggtgggaggattgcttgagcctaggaggcagaggttgcagtgagccgacattgtgccactgcactccaacctaggtaacagaatgagaccccatctcaaatatacaagtaaacaaataaactcttacataataaaattaataaattccctctgttctggcagggggactaaaagctaattataagtaagtcctcaagtccatggaagattttagctttccatgtgaaagaatcttctacaaatctttggctagctgttttcacctcagaggtagctcagccaagaagtctccttccagattgtgacctattaatttctgtgtgtgtgtggcatctggatctttttaaagcttcttaggctgagccgggtgtggtggctcactcctataatcccagcactttgggatgccagggcggaaggatcacttgagcccaggaattttataccagcctgggcaacatagtgagaccctgtttctgcaaaacaaaaaattaaaaattagcggggcgtggtggtgcatgcctgtggtcccatccactagggagtctgaggcgggaggatcacttgagcccaggaggtcaaggctgcagtgagctatgattgcgcccctgcacttcatcctgggcaaaaaaggagaccctgtctcaaaaaataaaaaataaaaaaaggttaaatgtttctagaagcaaatctctggtttggtgcctaacatagtccagcatacagtaggcgctctatcttttgcccttaacccttctgagcctccccacccagatgctgtcctcaaaccctttgtcaaaagaggtgtctgggcagctggcgatgctcattccccaggcacagacttctgggaaggcagaggccagtggctggctgtacgggtgaggccttgggccgctgcagcccttggggacttggccagtgtccggaagctgtgggggctgggtggcatttgatgtcctggcaccagcactgtgactgggcaggctgtggcagttctcttatcgcccacgcccactgcacttgggtgggtcagccgtcacagccagcaaggctggcacccgaaggctgcctctcccaatcctggccttgtccaacagctcaattttcccaatttttcttccacaccattgccgcaacgttatctctgcttctcccagtacctgccaaggaaaaggcctgggttggctccagcagggcgttggtttgactcctggctgtgctcctcaccagctgtgtggcccgagcaagcaacctcagtgtgcccgtcgtgaaatgggatcacactaatggttagtggggattggagaagtttttgttttgttatttttatttgtttggttttggttttttagagacagtgttttctgtcatccaggctggagtgcagtggcgtgatcacagctcactgcagcctctgcctcccgggctcaagcgattctcccacctcagcctcctgagtagctgggaccacaggcatgcaccaccacacccagataatatagttattttttactttttattttctttcttttttttttttgagatggagtcttgctctgtcacccaggctagagtgcagtggcgcaatcttggcttgccacaacctctgcctcctgggttcaagtgattctcctgcctcagcctcccgagtagctgggactacaggcgcccaccactatgcccggctaattttttgtatttttagtagacatggggtttcaccacgttggacaggctggtctcaaactcctgacctcaagtaatctgcctgccttgacttcccaaagtgctgggattacaggtgtaagccactgcgcctggccaagttgaagactttggctgggtgtagtggctcatgcctgtagttcaagcactttgggaggctaaggcaggaggactgcttgaacccaggactttgagaccagcctgggcaacatagtgagaccccgtctctttaagaaaaatggaagagggtggtagcagagtcagaggaggacatggaacgacggaagcgaggtgggtttgatgtgattgctgtctttaaaaatggaagaagtggccaggagccaaggaatgtgggcggcctctagaaggtgaaacagacaaggaaacagattttcccctaaaatctccgaaagaaacagccctgcctacacatcgattgtagcccagtgagatgcattttgtgcttctgtcctcctgagctgtgagataataaatttgtggtttttatttattattattattattatttttgagacgagttttgctcttgttgcccaggctggagtgcagtgatgcgatcttggctcactgcaacctctgcttcctggtttcaagcaattctactgcctcagcctcctgagtagctggaattacaggtgcacaccaccacgcccagctaattttttgtatttttagtagagatggggtttcaccacgttggccacgctggtctgaagctcctgacctcaggtgatccacctgcctcggcctcccaaagtgcagggattacaggcatgagccaccgcacccgtccataaatttgtgtttttttaagccaccaaggcattggtgtcttgttacagcaacgaaaggaaataatgcatttgaccctcaaaccacatgggtgtgaggggcaccaaccccctgtgaaattagaaatctgtgtatgccttaagtttttgtagagacagggttgtgatctgttgatcaggctggtctccaactcctggcctcaagagatcctcccacctcagcctcccaaaatgctgggattgcaggcatgagtcaccatgcccggcctgcatataactgcatataagtcccccaaaacttaattagtgatagcctactgttgactcttagccttacggacaacatatcaacatacacatattgtgtctctgtattatatatatcgtattcttacaataaagtaagctgaagaaaagaaaatgtggctgggcgcggtggctcacgccgataatcccagcactttgggaggctgaggcgggcggatcacccgaggtcaggagtttgagaccaacctggccaacatggtgaaaccacgtctctattaaaaatacaaaaattagccggacatggtggtgcgtgcctgtaatcccaggtacttgggaggctgaggcaggagaatctcttgaacccgggaggtagaggtcacagtgagccaagattgcgccactgcactccagcctgggtgacagaatgagactccgtctcaaaaaaaaaaaaaaaaaagaagaagaaaagaaaagaaaatgttattaagttggtgcaaaagtaattgcgttttttttttttgccattccttttaagggaaaaaatattaaaatgtaaggaaaagaaaatacatttattatttattaagtggaagtggatcatcaaaaaggttttcagaggctgggcgtggtggctcacacctgtaatcatagcactttgggaggccaaggcaggtggatcatttgaggtcaggacttcaagacaagcctggccaacatggtgaaaatcctgtctctaccaaaaataaaaaaaaaaattaggggccaggtgcagtggctcatgcctgtaatcccagcactttgggaggccaaggtgggaggatcacttgaggtcaggagtttgagaccagcctggccaacatggtgaaaccccatttctactaaaaatacaaaaattagccaggcatggtggctcacacctgaagtccccgctactcgggaggctgaggcacaagagtcgcttaaacccgggaggcggaagttgccgtgagccgagatcacaccagtgcgctccagcctgggcaacagagggagactccgtctcaaaaaaaaaaaaaatggtcttcacattgagtgagctgaggaggaagaggaagaggaaggggaggggttggtcttgctgtctcaggggtaacagaggcagaagaaaaattgtgtttaaggggaaccatgaagctcaaacctgtgttgttggaaggttaactgtccaaacattgacttgggagctggacagcttgggtctgctgattgaaatctttcacaccatgggcaccttctttctctctaggcctcagttgatctgtctgtcaaatggggataatgataggaggtgctgtaaagatgaaatgaggcgggctggacatggtggctcacacctgtgatcccagcactttgggcggccaaagcgggattgcctgagccaaggatttagagaccagcctgggcaacatagcgaaaccctgtctctaccaaaaatacaaaaattagccgggcatggtgacatgtgccagctgaggtggaagatcacttgagccctggaggtcgtggctgcagtgagccaagatggtgccactgctttccagcctgggtgacagtgagaccctgtctccaaagaaaaaaaaaaaaaaggatgaaatgaggtgaaccatgtaacattttattattatgtttatttatttattgaaacagagtgaaactgtgttcaatatacacagtgagaaagacagggtctcattctgtttcccaggctggagtgcagtggggcaatctgagccctctgcaacctccgtctcccccggctcaaagattttctcacctcaggctcgcaagtagctgggactacaaaggcatgtcaccacgcccagttaatttttgtttttttgttttgttttgttttgttgtttttttagagacgaggtcttgcctgttgcttagtctgctcttgatctcctggactcaagtgatccacccaccttggcctcccaaagtgctaggattacaggattgagccaccatgtcctgtctctatttttacttttatttttagagaccgggacctggcatagtggctcacgcctgtaatcccagcactttcggaggctgaggtgggcggatcacctgaggtcaggagttcaagaccagcctggccaatatggtgaaaccctgtctctactaaaaatacaaaaactagctgggcatggtggtgggcgcctgtctcaaaaaaaaaaaatagagactgggtcttgctctgttgccaaggctgtagtacaatggtgctatcacagctcactgccgcctgtaactcctgggctccagtcatcctcccacctcagtctccctggtagctgggactacaggcacggaccaccacgcccagcttgttcttcttatcttttattttttatttttttgagatggagtcttgctctgtcgcccaggctggagtgcagtggcgcgatctcggctcactgcaagctccgcctcccgggttcatgccattctcctggctcagcctccttagtagctgagactacaggctctcgccaccacgcccggctaatttttgtatttttagtagagacggggtttcatcgtgttagccaggatggtcttgatctcctgacctcgtgatccgcccgccggggctcccaaagtgctaggattacaggcatgagcaaccacgcccagcccttgttcttcttcttatcttgcagcattgttgcaaagatatagcgagttcccatcctgcggggtttagattaggctctcagggcagaaaccattagtatttgctgttcccctcccttcgtccccacccagctaatgttaataagagctaatggaacccatcacaagatattaccaatgttccctctttacagagagcccacaaagccaggccttgagccaagtgtatgccaggcacctctctctgcattttcagctccatctcacagaggagtaactcaagttcacacagctaggcatgtcccagctttaccattcatggcaccaaaccctcaggctccccaatcttttcctgagacagctgagactccctcatgtgttccctccccggtgcggccctgtcatgctcctgctcaaacaccctccgtggctcccacgtactcatcaaacctagactgggaacggaccgctcaagtgactagcaaagcccttcccttttctgagcctcggttctctctcctataaaatgggttgatgaaatggcctccagtatggtggagaggatctgaaaggtagtgagttcgctttgctcaccactggctgtctctatgcagccgctcaccctctgccattctagctgacaccagaaacttccggtactcccttgtctctctgccttctggctttaccggtcttactgcctatctgatggtagaagtattctcttatgctttcccttcatacttgtaatagttttgagttttctgtgtttgcgtgattaatccatgtggaattttttttcttttagacagtttcactcttctcatccaggctggaagtgcagtggcgtgatctcggctcactgcaacctccgcctcccgggttcatgccattctcctgcctcaaactcccgagtagctgggactacaggcgcctgccaccatgcctggctaattttttttttttttttttgagacggagtctcgctctgttgcccaggctggagtgcagtgtcgtagtctcggtttacttcaagctccacctcccgggttcacgccattcttctgcctcagcctcccgagtagctgggactacagacacatgctgccacacccggctacttttttgtatttttagtagagatggggtttcaccatgttagccaggatggtctcgatctcctgaccttgtgatctccccaccttcgcctcccaaaagtgctgggtttacaggtgtaagccactgcgcccggccttttttttttttttttgagacggagtcgtgctctgttgcccaggctggagtgcagtggcgccatctcggctcactgcaagctccgcctccctggttcacgccattctcctgcctcagcctcccgagtagctgagactacaggtgtctgccaccacgcccggctaattttttgtatttttagtagagacggggtttcaccgtgttagccagaatggtctcgatctcctgacctcgtgttccggccatgctcgcctaatttttttgtgtattttagtagaggcagggtttcgccgtgttgcccaggctggtctcaaactcctgagctcaggcaatccgcctgcttcagcctcccaaagtgctaggattacaggcatgagccaccatgcctggccttttcttcctaatatacattcagggctactgaataaagaatttatcctttccctgtaaattctacatgtatcatgtatacaattctttttttttttttttttttttttggatacagggtcacactatgtcacccaggctgtagggcagtggcgcaatcacagctccctgaaacctgaacctgaacctcctgggctgacgtgatcctcccaccctaggcttccccagtagctgggactacaggcacatcatgcccggctagtttttaaaaattttggccgggcacagtggctcacacctgtaatcccagcactttgagaagccgaggcaggtgcgtcgctggaactcaagagttcgagaccagctgggcaacatggcaaagcccagtccctacaaaaaaatataaaaaattagccgggcgtggtgttgtgtgtctgtagtctcagccacttgggaggctgagggagatgggcttgagctcagggggtagaggttgcagtgagccgagatcatgacactgtactccagcctgggcaatacagccagaccatgtttcagaaaaaaaaaaaaaaagtgttttttttttttttaagcctcagagcctactttggctcaggaggctgctcgatttgcaatacaaaaaagaaaaaatatttttgtagagacgaggtctcaatatattgcccaggctagtgttgaactcctggagtcaagcaattctcttgccaaatgttgggattacaggcgtcagccactacgcctggcctgagattcatttaagtataaaattagcaaatctccgccggacgcagtggctcacacctgtaatcccagcacttccagaggccgaggcaggcggattgcctgagctcaggagttcgcgactagcctgggcaacacagtgaaacccccatctctactaaaatacaaaaaattagccaggcgtggtggcgtgcacctgtagtcccagctacttgggaggctgaggcaggagaatcgcttgaacctgggaggctgaggttgcagtgagccaagatcatgccactgcactccagcctgggtgacagagcgagactccgtctcaaaaaaaatctgcaaatctccaacctgggcaacatggtgaaatcctgtctctacaaaaaaaaatccaaaaataattagctgggtgcaatggtgtgtgggtagtcccagctactcgagaggctgaggtgggaggatcactcgagcccagcaggtggaggttgcagtgagccaagattgtttcaccacactccagactgggcaacagagtgaggctttgtctcaaaaacaaaaacaaaaaaaaaattactgggcgctgtggctcatgcctgtaatcccagcaccttgggaggctgaggtgggcggatcgcctgaggtcagcagttcgagaccagcctagcaaacatagtgaaaccccatctctactgaaaatacaaaaattagcctggcatagtggtgtgcgcctgtaattccagttacccgggggtgctgaggcagaagaatcacttgaacctggatgttgcagtgagccaagatcgggcaacagagcaagactccatctccaaaaaacaaacaaacaaacaaaaaacgcaaattaatttttaaaatatgtacccttagaaaattctaagctcgtttttattttcagtgttcactctacatacatgtattatatattgtggctattcattcaacaaatacttattaaatgtttgttttatgccaggggctatgctgtatactggggacgcagccggaatgaaagacacacaaatccctgtccttatgcaggcaataggcaagagggcagataattaacaaccaataagcaaatgtctaacatgtcagatggtgataagaagcaaaatgtatcacatctgtaatcccagggttttgggaggccgaggtgggaggaaggcttgagcccattgagcacaggagtttgagaccagccttgggcaacatagcgagacactggtctacaaaaaattttaaaattaggcaggcatggtggtgtgtgcctatagtcacagctacttgggaggctgaggcgagaagatcatttgagcctaggaggtttaggctgcagtgagctatgattgctccactgcattccaggctgagtgacaaagcaagactctatttgataataacaacaaagagaaagtcataggggccaggtatagtggctcatgcctataatcccagcactttgggaggccaaggtgggcagatcacttgaggtcaggagttcgagaccagtagtagagacatggtaaaagccagtctctgctactaaaaatacaaaaatcagccaggcacgttggtgtgtgcctgtagtcccagctacttgggagcctgaggcaggagaactacttgaacccgggaggtggaggttgcagtgagcctagatggcaccactgcactccagcctgggcgacagagcgagactctgcctcaaaaaagaaaaaaaaaatgaaagaaagaaaagaaaaggtcataggacagagaggaaagggatggttgggtgtttttttttttttttttttggtttttgtgggttttcttttagatggagtcttgctctgtcacccaggctggagtacagtgccaggatcttggctcattgcagcctcgacctcttggtctcaggtgatcctcccacctccacctcccaagttgctgggactacaggtatgtgtcaccacacctggctaatttttaatttaatttatttatttttgagacggagtttcactcttgttgcccagactggagtgcaatggcatgatctcagcttgctgcaacctccgcttcccaggttcaagcgattctcgtgcctcagcctcccaagtagctgggactacaggcatgcaccacctcgccccggctaatttttgtagtaatagaaacagggtttctccatgttggtcaggctggtctggaactcccgacctcaggtgatctgcccaccttggcctcccaaagtgctgggattataggcgtgagccactgcgcctggcctcacctggctaatttttgtacttttagtagagatggggtttcacagtgttgcccaggctggtctcgaactactggcctccagtgatctgcctgtctcagcctccccaagtgctaagatgacaggcttgagccaccacgccttgccaaggtgatatttcaggcaaggcctgaaggcaacggagctgtatggatgtctgagagaagagcattctaagcagagggaccgagcagctagtgcaaaggccctgaggtcagaccatgcctgctgagcgtgggacgtacccaggaggccagtgaggctgaacagagtaagccatggagagagagagggaggaggtgagggcagggaggtgacagggcaggtcatgcaaggctttgtgggctgtggcgaagagctgggctttttcctcggaatgaggtgggaaccatggaggtttctgagcagagcagggatgtgtcctgacttaggtgtgcacagatgtctctggccgctatagtgaggatagaaagtgtctgtgttggtccaggcaggagatgacagggctgtgtgaaagggtgggtgcttgaggagcaggtgagaagaggttggattctggatagctctgaaggcaaaactgatctcaagcagagaggcagcccaggttcctggccagagcacgtgggaggatggagcggagtcatgggataatcagaagcttggacaggccaggcacggtggctcacacctataattacagcactttgggaggctgaggtgggaggatccctgaggccaggagttccagaccagcctgggcaacattgcgagaccctgtctctactaaaaatacaaaaaattacctgagtgtggtggcgcgtgcctgtgatcccagctactcaggaggctgaggtgggaggatcgcctgagcccaggaggtcaaagctacagtgagctgtgattatgccactgcattccagcctgggcgacagagtgagaccctgtctcaaaaacaaaaaagcttagatgccgccgcactgagtatgagatgctcacgtgtgttggggggagacagatgtcacataggtgtgcagctcagagacaagggtttccagagggcttaacttttgggactcctcagtgtggagctggtgggtggggcctgaataaattgtccccagggcaccctgtgtagttgggaagagaagaggcctgtggctcgctctctttgtccactgcttggaatgggtagggtgggaccagccagcctttgggctggcagagacttcgagaaccacagggcttctttaggagtctgggtcaccccagggcatgacctggcgcctcaggccttgcctgtggtccaggtgtttagacagggcccctctgctggtggctactaggaggagagggcgcctttttaaggataagttgagttagtgaccagagccctgcctgcgagtcctagagtctaaggcagcagctacaattattggacaccaaatgtatatgatcacgctgactgtataacctcatgctgtctgtgtacacccagcactaaatgtatattcctgctgaggatacctccacaccacctgtataatgccatgttaaccaaataattggctgcactataaatatctataaatattcaagtagaggcaggttgtggcgtggtgactcgtgcctgcaatcccagcactttgggaggttgaggtgggaggattgcttaaggccaggagtttgagcccagcctgggtaacacagtgagatcctgtctctatttttattgtattgtatttttttttttttttgaggcggagtctcgctctgtcgcccaggctggagtacagtggcataatctcggctcactgcaacctctacctcccaggttcaaacgattctcctacttcagcctccccagtagctgggattacaggtgcccaccaccacacctggctaatttttgtatttttagtacagacagggttttgccttgttggccaggctggtcttgaactcctgacctcagtgatctgcccgcctcggcctcccacagtgctgggattacaggcatgaaccaccacacccggctaatttttgatttattgattgattgattttttgagacactcgctctgtcacccaggctggagtgcagtggcacgatctcggctcattgcaacctccgcctctcgggttgaagtgattctcctgcctcagcctcccaagtagctgggactacaggtgcacaccacaacatccagctaatttttgtatttttagtacagacggggtttcaccaagttggccaggatggtctcgatctcttgacctcatgatccgcccacctcggcctcccaaagtgctgggattataggtgttagccaccacacccagcctattttcttttttctttttctttttggagacagagtctcactctgtcccccaggttggagtgcagtgaggcaatcttggctcactgcaacctccacctcctgggtttaagcgattctcctgcctcagcttcccaagtagctgggattacaggcatgtgccaccacactggctaatgtttgtatttttagtagagaaggggtttcaccatgttggccaggctggcttagaaatcctgatcgacctgcctcagcctcccagagtgctgggattacaggcatgagccactgcacctggcctatgcctgctctttgaggtcagttttggtttcatactttagcctcattttgcagttgaggaaactgaggcttaaggaagataagccctttgttaagtatcctctagttcagagggtgcagaaggagcatttgaattcagggcgacccaggaggatgtgggctccacaagggtggagattgggtctctctggttcctcactgtatgcggtgccccgcccaaggcctgcacccactaagggctgaataaatacttgttctaaggccaggcccagtagtgcacgcaggtaatcccagcactttggggggccacggtgggaggagcccacgagtccaggagttaaagatgagcctgggcaacatagcaacatcccatctctacaaaaaaaattaaaaattagccgagtgcagtagagcacctgtagtcccagctactcaggaggcttagtcaggaggatggcttgaggcagggaggtcgagactgcgatgagctgtgattgcaccactgcactccagcctgggcaacagagggagatcctgtctcaaaaaaaaaaagcagcagacagaaagaaaactaatttcctgcacagcttggagaagttttcagcaccaacattccacagttggttgtctgggtttgggcagtaggccgttttccctcccagtgcctcagtttccacacctgcaaaacgaagccacggaaacgccctttcagggtggccaggggttctaggcggcatcgcccggtggcagggtgttcccagggtgaagccgcagggttcccgggtgggggcggggaaggctaaatgcggccggccggtgagtggcgggagcagctgcagccccgcccgcgccctcccgggtcccttagtctgggcagctgcccagctcgggccggtctgaccggtttgggccgccccgcctggcgctgtgctgggaggagccgccgccagtcgcgcggtcagtgcctccctccagactcgggagggtcgagggggcgcgggagagagcgcgggcggccgccggggctggtcgcctgcagggatgggggacgagcggccccactactacgggaaacacggtaggcagcgacccccgcccgtagccccgggccgacccctcggtccctcggagggggccttgagagaacatggggcgcagggaagggggctggagggggagcgcaattgcaaatctgcgcctggagcctccccaccatcagccaggccccttcaccccacttatcccccgcagcctcgcagacgaccctccttactctcccctacccgaaggacctgcccctgtacccctctgcctggcactgctgccggcgcctccttccccctatcccacctcagatcttccccatctccacctggttccgtggtggtcaccatttcagccctcttcccagtgggtggccgccagttaataagtttgttcacagttagtgatccctccttcctcccctgtcctggcctgccagaactgggggcttgggtgtggtcacctggaggtgggtgaggcagaaaattccacaggtctctgaattttattcttgccaaggcaaagacacccctaggggcttttgggagggggctctcccagccctgtcttggttcaggtctccaatcccatccatcttaatcttcttgactttcaggaacgccacagaagtatgatcccactttcaaaggacccatttacaataggtaagagctctgggttttggggggttctccccgctaatactaccccaatccctgtctcttcacaccccctcccatctgttctccaacaaactggtgacaaatatttgaaacttttttttttttttgagatggagtcttgctctgtcaccaggctggagtgccgtggcgcgatctcaatctcggctcactgcaaccttcgcctcccgggttcgagcaattctcccacctcagtctcccaagtagctgggattacaggcttgcaccaccacacctggctaatttttttttttttttgtacttttagcagagatgtttcgctgtgttgcccatgctggtctcgacctcgtgagctcaaagcgatccacctgccttggcctcccaaagtgctgggattacaggtgtgagttaccacacctggcctggacttaatttttaccatgtttatatttatttatttatttatttatttttgagatggagtctcactctgtcacccaggctggagtggtgcaatctcagctcactgcaaccttcccctcctggttcaagcacgtcttctgtctcagcctctccagtagctgtgactactcagaggctactcagaaggctgaggcaggagaattgcttgaatctgggaggtggaggttgcagtaagctgagattgcgccactgcactccagcctggaggacaagagcgagactctgtctcaaaaaaaaataacaaaaaaataaaatacagccaggcacggtggctcacacctataatcccagcactttgggaggccaaggcaggtggatcacttgaggttaggagttcgagaccagcctggctaacatggtgaaaccctgtctctactaaaaatacaagaattagctgggcatggtggcgggcacctataatcccagctacttgggagactgaggcaggagaatcgcttgaacctgggaggtagaggttgcagtaagctgagatcgttccactgcactccagcctgggcgacagagtgagattccctctcaaaaaaaaaaaaaaagtctagcttgggcaacatagcgagaccttgtctctacagaatgtatataaattaaaaaaaaaatgtgtggtggtgtgcacctgtagtctcaactacttgggaagctgaggcaggaggatcacttgagcccaggagttcgaggctgtagtgagctatgatcatgccactgtactccagcctggatgacggagtgagactctgttgcacaaaattaaaaaatgaaatgaaataaaaattaaaatgcatgtgccctttggtacggcattcaaacgactcaggaaaatttgtccaaataacacatggatgagggtgtttgcagagggcagatgggcccatggtgcacacagcaccaagcctcctccaaacactgcccctctgctccccaggggctgcacggatatcatatgctgtgtgttcctgctcctggccattgtgggctacgtggctgtaggcatcataggtgagtagagaatgagcaggacttggagttgcagggtaggcggaggcagccatggcctctggagtgggaacagggctggatctgaggagtggcagtgtctcagtatccctggatctttccacagcctggactcatggagaccctcgaaaggtgatctaccccactgatagccggggcgagttctgcgggcagaagggcacaaaaaacgagtgagttgactccttgcggcctggtggggctggggaagagggggcagaagattctaggcattccccatctctctaagtccagttaacaagtgcttataggctgggcgcggtgactcacgcccgaaattccaacactttgggaggccgaggcaggagtattgctttaggctaggagttcgagaccagcctggccaacatggcaaaaccccgtctccactaaaaatacacaaattagccaggcatggtggcacatgcctgtaatctcagctactcaggaggctgaggcaggagaatcacttgaaccacaggaggcagaagttgcaatgagccgagatcgtgccactgcactttagcctggggcacagagtgagactctgtctcaaaacaaacaaacaaaaattaagtggacgtggtggggcacacctctagtcccagctacccagcaggctgaggtgggaggatcgcttgagctgggaggccaaggctgcagtaaggtatgattgtaccattgcactccagcctggacgacagagcgagacctggtctcaacaaaacaacaagaaaagaaaacaagtactgataaacgtcccactaccctcagccactagtctagtccttggggacacacagctctaaatgagatagtaagcatcctgttctctggcagcacacattttaagggcgggagagactgagaggggacagtcctggattacgcgtcaggtggtgatgaacaggtgagacaacagagcaagcatagcctgagtggcgtcacttcctggctctgtgacctagggcaggtgtctcaatctctctgaacctcgttttcctcatctctaaaatgaggatcataacagtcccaccctcatggggctattttgatggttagatgtgccaatacatgtacagagcttagaatgccacctggcatcgctgggcgtggtggctcacacctgtaatcccagcacactttgggaggctgaggtgggaggatcaagaccagcctagtcaacatggtgaaaccccgtctctactaaaaatacaaaaaaattagctgggcattgtggcatgttcctgtaatcccggttactcaggaggctgaggcaggagaattgcttgaacctgggaggcagaggttgcaatgagccgagatcgtgccactgcactccagcctaggcaacagagcaagactccatctcaaaaaaaaaaaaaagaatggcacctggcatagagttgctgatgctgcagtttttaaactattattattattattattattattattattattactattattattttgaaacggaattttgctcttgttacccaggctagagtgcaatggcacaatctcagcccactgcaacctccgtctcccgggttcaagcggttctcctgcctcagcctcccgagttgctgggattacaggcatatgccaccatgcccagctaatttttgtatttttagtagagacggggtttcatcatattggtcaggctggtctcgaactcctgacctcaggttatctgcctgccttggcttcccaaactgctggtattacgggtgtgagccaccacacccggcctattattattattactattattattattttgacacagtgtctcactctgtcagccagtggcaggatcatagctcgctacagcctggaactcctgggcttaagcgatcttcccacctgggccttccaaagtgctggcacaagacaggcctgagccaccctgcctggccctatataagatatctttttttttttttgagacagagtctcgctctgtcgcccaggctggagtgcaatggtgcgatcttggctcactgcaacctccgccacccaggttcaagcaattctcctgcctcagcctcctaagtagctgggattacaggcgcccgccaccacacccagctaattttttgtatttttagtacagacggggtttcgccacgttggccaggctggtctcgaactcctgacctcaggtgatccgcctgccttggcctccaaaagtgctgggattacaggtgtgagttactgcacccggccatataaaatatcttaaaggaaacaataggccgggcacggtggctcacgcctgtaatcccagtacttagggaggcccagactggaggattgcttgacaccagcctgggcaacatggtgaaattctgtcgctaccaataatacaaaaaattagccaggtgtggttgcgcacacccgtagtctcagctgctcaggaggatgaggtggaggatcacttgatcctaggaggtagaggctgcagtgagccaagattgtgccactgctcgctctgtctgggcaacagagaaagactcttgtctcaaaaaagaaaaaaaaacaaaagaggccgggcgcagtggctcacgcatataatcccaacactttgggaggctgaggcgggtggatcacctgaggtcaggagttcgagaccagtgtggccaacatggcaaaaccccgtctccactaaaaatacaaaaattagctgggcatcgtggcaggcacctacctgtagtcccagctactcgggaggctgaggcaggagaattgcttgaacccaggaggcggaggttgtagtgagcccacatcacaccattgcactccagcctaggcaacagagcaggactccatctaaaaaaaaaaaaaaagagaaaaataaaaaaagttttctatagggtggttaagaagtcttaacaggtcgggtgtggtggctttcacctgtaataccaacactttgggaggccaaggcaggcggatcacctgaggtcaggagtttgagaccagcctggccaacatggtggaaaccccatctctactaaaaatacaaaaattagccgggcttggtagcgggcacctgtaatcccagctactcgggaggctgaggcaggagaattgcttgaacccgggaggcggaggttgcggtgagccgagatcacaccattgcactccatcctgggcaacaagagcgagactctgtctcaaaaaaaaaaaaaaaatcttaacagtttccattctcccttctctaactccaggaacaaaccctatctgttttatttcaacattgtgaaatgtgccagccccctggttctgctggaattccaatgtcccactccccaggtaacctggtccccaccgttccctttttcctctccccgcttcccatccttttccccctgtgaatgtgggctgcgacctcagtcctgagcggtctgccccaactccacccaatcccttccttctcccctcccagatctgcgtggaaaaatgccccgaccgctacctcacgtacctgaatgctcgcagctcccgggactttgagtactataagcagttctgtgttcctggcttcaagaacaataaagtgagttgtagactgtcctgagagcacaggtatgggcagtggcagtgtactagacttggggactcacctccctccatctctcttggcagggagtggctgaggtgcttcgagatggtgactgccctgctgtcctcatccccagcaaaccctgtgagtcaggggatcccaggaggctcaggtggtgacggggaggctctgcagaggctcagcctgactggtgccatcttctgctccatgcagtggcccggagatgcttccccgctatccacgcctacaagggtgtcctgatggtgggcaatgagacgacctatgaggatgggcatggctcccggaaaaacatcacagacctggtggagggcgccaagtgaggatattggcgcatcgcgccagggtctcacttttctgggtgggacaggcaatcccctgtggttggcctgatcatggaagagggtctgacccgagccttgtcctccttcccccaggaaagccaatggagtcctagaggcgcggcaactcgccatgcgcatatttgaagattacaccgtctcttggtactggattatcatgtaagtcaggagggaaggggcctctcccctggctgccccctctaagcctggctgagggtggagtctgttcatgaccgttttcttttccccagaggcctggtcattgccatggcgatgagcctcctgttcatcatcctgcttcgcttcctggctggtattatggtctgggtgatgatcatcatggtgattctggtgctgggctacggtgcgtcaccccctccctgtggcttctctttcctgaatccgcacactgccctgccctttcccgtggaaatggcccatcaggaaaacaaaaaaaagtcaggccgggcgtggtggctcacgcctgtaatcccagcactttgggaggccgaggcaggcagatcacccgaggtcaggagttcaagaccagcctgaccaacatggagaaaccccgtctctactaaaaatacaaaatcagccgggcatggaggtgcatgcctgtaatcccagctactcaggaggctgaggcaggagaatcgcttgaacctgggaggcggaggttgtggtgagccgaaatcacgccattgcactccagcctgggcaacaagagcgaaactccatctcaaaaaaaaaaaaaaaagaaaaaatgtctcagcaccgtagttaaggatgcatactctggtatcagaatagcagaggttcaaatcctggctttgccaattctttgggcaagtgcctcaacctaactgtgcttcaatttctttcttttttttttttgagacggagttctgttcttgtcacccaggctggagtgccatggcgcgatcttggctcactgcaacctccgcctcctgggtccaagctattctcctgcctcagcctcccaagtagctgggattacaggcatgcacctccatgcccggctgatttcgtatttttagtagagatggggtttctccatgttggtcaggctggtctcgacctcctggcctcaggagatctgcccgcttcagcctcccaaagtgctaggattacaggcaggagccaccgcgcccggactgcttcaatttatttctctataaaatgagggtaattcatatttctagttggcaaactaaatgacaaggaggtaatgagcagataaaatatgggtaggggcctgtttagttcaggcctgtggaatccagaggcacaatatcgtgctcaacaaaacagtgcttcatattttggatttttgttgtttttgagttgttgttttgttgttgttgttgagacggagtcttgctttgtcacccaggctggcgtgcagtggtgcagtctcggctcactgcaatctctgcctcccgggttcaagcaattttcctacctcgcctcccgagtatctgggattacaggcgcacaccaccatgcccggctaattttttttgtatttttagtagagatggggttttaccatattggccaggctggtctcgacttcctcgtgatctgcctgcctcgacctcccaaagtgctgggattacagacgtgagccaccgcgcccagccttgatttgttttttgagacagagtctcactctgtcacccaggctggagttcagtggcacaatcacagctcactgcagccttgacctcctgggctcaagtgatcctcccgtcttggcctcccaagtagctgaaaccacaggcaagcaccatcatgcctggctaaatttttaatatttttgtagagacaggttctccctatgtggcccaggctagtcttgaactcctgagcttgagcagtcctcccgccttggcctccctaagtgttgggattacaggcgcaagccactgtgcctggcccatattttgattattccttgaactttcctggaagaaaaatgcttggcaatccaatttgaggacactcatagtaaaatattcatattaatagtggtttctagctgggtgcggtggcgcacgcctgtaatcccagcaatttgggagacagaggtgggcggatcacctgaggttgggagttcgagaccagcctgaccaacatgtagaaaccccatctctatttttttttttttttgagacagagtctctcactgtcgcccaggctggagtgcagtggcgcgatctcagctcactgcaacctccgcctcccgggttcaagcaattctcctacctcagtctcctgagtagctgagattactggcgcccaccaccacgcccagctaattttttttttttttttttttttttgtatttttagtagacacggggtttcaccatgttggtcaggctggtctcgaactcctgacctcgtgatccacccgtcttggcctcccaaagtgctgggattacaggcgtgagccaccgcgcccggccaaccccatctctattaaaaatacaaaattagccgggcatggtggcgcatgcctgtaatcccagctgctcgggaagctgaggcaggagaatcgcttgaacccgtgaagtggaggttgcggtgagccgagattgtgccattgaactccagcctgggcaacaagagtgaaactccgtctcaaaaaaaaaaaaaaagagagagaacttagaccatggcagcatatgattatgattccaagtagggggaaagggttctggaagttctcttctgaaggtgacacttgagcagagacctaaggatgtgtgggatccagccatggggagagaatgcaccgggcggtgggaactgcaagtgtaaagtccctgaggcagaagcctcgatgtttgcttctgttaaatgggggcagttgtagctgctttgcaaagttgcaggaggcactgctggactgagcttgtggttcccccatgcaggaatatttcactgctacatggagtactcccgactgcgtggtgaggccggctctgatgtctctttggtggacctcggctttcagacggatttccgggtgtacctgcacttacggcagacctggttggcctttagtgagtcacagtctcccattcctgcccccacatgaggccttggagggagtggggagcccagccggctcagcctttgccctttgcagtgatcattctgagtatccttgaagtcattatcatcttgctgctcatctttctccggaagagaattctcatcgcgattgcactcatcaaagaagccagcaggtggggggccagggtgccaggggccaggatggagctgtccctagagttgtgtcttttgccctgacgcctgtgtctctgctcttccctagggctgtgggatacgtcatgtgctccttgctctacccactggtcaccttcttcttgctgtgcctctgcatcgcctactgggccagcactgctgtgtatctgcccccagacactgatctctgaccccagggatggctaaagaccaactttgcctagaagtgacctgcagcttagggatagggctggaaactggtgggagaatggattctttcccacaaaagtccctggggtcctcagtcctagacctctgcttccttaacgaacctccagcttcctgtccacttccaacgaagcggtctataagatctttgatgacagcccctgcccatttactgcgaaaacctgcaacccagaggtgggcgtccccggggtggggagggcaggtattgccccagcaggccccagatgatttgaaacctctcatgtccacttggaggttcagcaaacaattggcccctgttgcatgtcctgtgctaggtgtgggggaggacgcacagtggggaagagactctctaactggatcgaacaacttcccagggcaagctggcttcctctcttcaacttgaccaggccttcaccctgggtgctaaatcacccatttttccctacttcctttttttttttttttttttttaataagacagagtcttgctctgtcaccaggctggagtgcagtggcatgatctcagctcactgcaacttccaactccctggttcaagcgattctcctgcctcagcctcccgagtagctgggattataggcacacaccagcacaccaggctaatttttgtatttttagtaaagacagggtttcaccatgttagccaggatggtctcgatctcctgacctcgtgatccacctgcctctgcctcccaaagtgctgggattacaggtgtgagccacctcgcccggcccatttttccccatttcatttcctgtctccatgccctcttcttgaccccagtgatggccacgtcttgtttctagaatcccttcctttgcacaagccatattctgaactcttaattccttcccttaacttcaatccctatgtctcctgtcctacctcatggttttcctggccccacacctgatgctcagagcccactgtgaacccctggtgcctctttttggactcggttctcccttctctcccacagaccttcccctcctccaatgagtcccgccaatgccccaatgcccgttgccagttcgccttctacggtggtgagtcgggctaccaccgggccctgctgggcctgcagatcttcaatgccttcatgttcttctggttggccaacttcgtgctggcgctgggccaggtcacgctggccggggcctttgcctcctactactgggccctgcgcaagccggacgacctgccggccttcccgctcttctctgcctttggccgggcgctcaggtgggctggcgttgcaggcaggatggggtggaggacgaggcctggcccagccaccgaccactccctcggcccgcaggtaccacacaggctccctggcctttggcgcgctcatcctggccattgtgcagatcatccgtgtgatactcgagtacctggatcagcggctgaaaggtacgtcccacccacggttcgcattagctcctgttgcggggcgaggctgaatagcgaaccaggattgggtcttgcttggaggtgggcggggccaagataatagagcagtgatgggtttctgtctatgacggggtggagttcaggagttggcgtgattgagtcctgcgatggaggagcaaaccagagaacctactgggtggaattcttgctgttgaggggacaggcccaagaggcctggcccaccattggttattaccagagtgaattggagtggtatatatttgcgctgaagagagcaggaataagactggtttattagccgggcgccgtgactcacgcctgtaatcccagcactttgggaggctgaggcgagcggatcacctgaggtcaggagaccagcctggccaacatggtgaaaccccgtctctactacaaatacaaaaattagccaggcatggtggtgtgtgcgtctgcagtcctagctacacgggaggctgagacaggagaatcacttgaactccggaggttgaggtttcagtgggccgagaccgagcgactgcactccagcctgggcaacagagcgagactccatttcaaaaaaaggaaaaaaaactggtttatttttcttagaggaagggctgtggggctgggattgatggtactttgttttagagacaggatctctcactctgtcacccaggctggagtgcagtggcaccatcatagctcactgcagcctcaaactcctgggcttaagtccctgtctctttgacagcgtggactcaggagacctggacattggcaagtgtgtgtgatagggaagaggggatcccttccaagtcaggctggtgtcccctcacttccacatcccttcccttctcttccagctgcagagaacaagtttgccaagtgcctcatgacctgtctcaaatgctgcttctggtgcctggagaagttcatcaaattccttaataggaatgcctacatcatggtgagtgggcctgggacccccaaccaacccgccagctcctgctgggtgagaggaccaccccccatgcccacccagtgggtctgatctctccctcccactctcctccagattgccatctacggcaccaatttctgcacctcggccaggaatgccttcttcctgctcatgagaaacatcatcaggtcgggaatcattatcatcttcctcctgccacccgcctcttcccctagtccctgaagccagcattcacacctgcccctcactgtcccctgcagagtggctgtcctggataaagttactgacttcctcttcctgttgggcaaacttctgatcgttggtagtgtgggtgagtgccgcccacctagcctctcggggtgtgggagcctgatttctgtcctctgtgatgagtgtcatcttcttaggaggctgtttcctatatccagaacccttcgccatcttgctttcttctccttctccagggatcctggctttcttcttcttcacccaccgtatcaggatcgtgcaggatacagcaccacccctcaattattactgggttcctatactggtatggacctctggggagagatgggggtttgggaagaaagaggtgttgggatttgcttggtcttctttgactagataaatgtggatagaggtcagaggtggggaattgattatttattcagaccacaaactttttgtttgtttttgaatcaagagtcttgccctgtcgccctgactggagtgcagtggtgcaatcttgactcactgcaacctctgccttccgggttcaagcgaattctcgagctcttgcctcccgagtagttgggattacaggtgcctgcccccacacctgcctaatttttgtatatttattttttaattttaatttaattttttttttgagacagactcactctgttgcccaggttggagtgcagtgaaatgatcttggcttactgaaaccttcacctctctagttcaagcgattcttgtgcctcagcctcctgtgtagctgggattacaggcacctgccaccacacctggctaacttttttttttttttgagatggagtttcactcttgttgcccaggctggagtgcaatagggtgatctcagctcactgcaacctccgcctcccaggtttaagtaattctcctgcctcagcctcccgagtagctgagattacaggcacgagccaccacgtgtggctaattttacatttttagtagagacggggtttctccatgttggtcaggctggtctcgaactcccgacctcaggtgatccacccgcctcagcttcccacagtgctgggattacaggcgtgaaccaccacacctggctaatttttgtatatttaatagagatggggtttcaccgtgttggctgggctggtctcaaactcctgacctcaagtgatccgcccgcctcgggctcgcagagtactgggattgcaggtgtgacccaccacgcccgacctcagaccacaaacattatcaagcacctactgtgtgtcaggcatcgaggtggagggcttccctctaaaggccttagagtttgggggtaaacagatactcctccataatgatattggtgaatgtatgattgcaaactgggacatgccacgagtatgtctgtatagcacagggaactgtttgaaactgtggtgggggctgggcaggtgtgggggggtccaggtggtgccatgcaggtgatgttggatctgagatctgaagctgcaggcaatatccaggcagagggaacagtacagtggccctgaggtgggagtgtgccaggaagcagtggggctgacgtggaaggagtaaagaagtggagataagggccaggcaccgtggctcacacctgtaatcccagcactttgggaggctgaggcaggtggatcacctgaggtcaggggtttgagactagccttgccagcatggcgaaacccagtctctacaaaaaaaatacaaaaattagcggggcgtggttgtgggcacctgtaatcccagctactcgggaggctgaggcaggagaactgcttgaacctgggaggcagaggtttcagtgagccgagatcgcgccactgcactcgagcctgggtgacagagtgagactctctctcaaaaaaaaaaaagtggagatacggccaaggaggttaacaaggctgtggagggattgagccttcattgcaagggcagtattgtatctcagtgtaggtcttgaagcccattgacctagtttcttattttagttcctctatttagtagttctaagatgagtaagagtaatcttgggcaaattatttaatcctctaaggtccactgacttttttttttttttttttttttctgcgatagagccttgctctgtcacccacgctggagtgcgatggagtgatctctgctcaccacaacctccacctcccgggttcaagcgattctcctgtctcagctccctgactagctgggattacaggcatatgccactgtgcccggctaatttttgtatttttagtagagacggggtttcaccctgttggtcaggctggtctcgaactcctgacctcaggtgatccacccacctcggccttccaaagtgctgccaataaaggcatgagcccctgtgcctggccatttcattgttttaaatttttaatttaatataatagagataggccaggtgttgtggctcaggctctactataataacaataataatagaggcagtgtctccctatattgccaggctggtcttgaactctggactcaagggatcctcctgcctcagcctgccaaagtgcaaggactacaggcatgagccaccacgcccagccaggtccactgacttcagtcaacaaatgtttatctagcagctaccaaggccgtgtgagtctccagattgctagggatgcagcagtaaatgggactgggtctagtgaggatgtgagcattaaacctgaaagccctaaacatgcataaaattgcagctgcaccaagagctcaggaggggtgcccagtgctaggaggacataaaataggctctagaggccgggcatggtggcccacacctgtaatcccagcactttgggaagccaaggcaggcggatcatgaacgtcaggagattgagaccatcctggctaacatggtgaaaccccatctctactaaaaatacaaaaaaattagtcaggtgtgctggtacgcacctgtagtcccagctactcaggaggctgaggtaagagaatcgcttgaacccgggaggtggaggttgcactgagccaaggtcccaccactgcactccagcctgggtgacagagcaagattccgtctcaggagggaaaaaaaaaaaggctctcagccagacgcaggggcccacatgtataatcccagcactttgggaggccgaggcaggcagatcgcttgagctcaggagtttgaaaacagcctgggcaacatggcaaaaccccatctccacaaaaaaatacaaaaattagctgggtatgctggaacatgcctgtagtcccagctccttgtaagcctgaggtggaaggatcacttgagcctgggaggtcaaggctgcagtgagctgagatggggccactgcactctagcctgagcaacacagtgagaccctgtctcaaaaaaaaaacaaaaaaaaaacgcccactctaggtgtcgtaggtggtttcctggaggaggtgggacttgaggacttgctctttgagctgaaagcagaaggtcgatggggcataaattagatttaagtcaggacaatagcacatgcagaggcccaggggttaaagaaagcaagggtgaggctgagtgcagtggctcatacctgtagtcccagcacttggggaggccaaggtgggcgaatctcttaagcccaggatgggtaatgggtaacgtggcaaaaacccatctctacaaaaaatacaaaggttagccgggcacagtggtgcacatctgtaatcccaactactccggaggctgaggcgggaggatcacttgagcccaggaggcagaggttgcagtgagctgagattgcaccactacaatccagcctgggctacagagtgagaccgtgagaccctgtctcaaaaaaagaaaaaaaaaaaaggccgggtgtgcggtggctcacgcctgtaatcccagcactttgggaggctgcgaggcaggtggatcacctgaagtcaggcgtttgagaccagcctggccaacatggtgaaaccccgtctctactaaaaatacaaaaatgagccaggcgtggtggcacgtgcctgtagtcccagctcctccggaggctgaggcagaattgcttgaacctggaaggcagaggttgtagtgagccaagatcgtaccatggcactccagtctgggcaacagagtgagattccgtctcaaaaaaaaaaaaaaaagacggagagagagaaagaggattttgtgtggatggtggggccctgccagcgggggtgaggggttgggatgtcactaatccaaagagggtttctcagcaggggaaggatgtggtcccagcataggatggactcagggggtgggggctgctctgggaaggacacggagcagggacagctcgtttctccttgcccagacggtgatcgttggctcctacttgattgcacacggtttcttcagcgtctatggcatgtgtgtggacacgctgttcctctgcttctgtgagtgacccctcaccccaaaccttgctgggccccgaatcccttctttccactgggcatcacatcaccctccaacggggcaacacgcttgcctgcccccagcttccccagggcttggctgtccctcgtcctgggtccccagcctgtcttcctggtttccttttgcgcttagaagcagctccgacctcctgtccactggcccaggctgcagcctggacgctgccctggagcccgcccgcgcttcgcagtttctggctttgactggggggaggggatctgtggctgccactaactctggtctctccatctgttttttttgtttgtttttttcttctctcttcctctcctccatgcctgctggcttccctgttcttccctgcctccctctttccctcccttcccgaccaccccattttccccctgccggttcccggggggagcccaggtgaggacctggaaaggaatgacggctctcaggagcgaccctacttcatgtcgcccgagctgagagacatcctgttgaaggggagtgcggaggaggggaagcgggcagaagccgaggagtagagagtgagggagactggcgtgggggccaggtttcctccatgtagactgggggtgcatgaagcgggggggttcctggcctgcgagtgtggggatcctgtgtgtccctcggagcccactacagtctgcccctctctggtcccagtgtgtctgctttctaaccctctgaggcttctctgtgaccctcatccacctaccctgtccttgaggcccctgcccgtgggctcccctcatgcctcctgctctgggacctctctccacagtggaggacctggagaggaatgacggctcggccgagaggccttacttcatgtcttccaccctcaagaaactcttgaacaagaccaacaagaaggcagcggagtcctgaaggccccgtgctccccacctctcaaggagtctcatgccgcagggtgctcagtagctgggtctgttcccccagccccttgggctcacctgaagtcctatcactgccgctctgcccctccccatgagccagatcccaccagtttctggacgtggagagtctggggcatctccttcttatgccaaggggcgcttggagttttcatggctgcccctccagactgcgagaaacaagtaaaaacccattggggcctcttgatgtctgggatggcacgtggcccgacctccacaagctccctcatgcttcctgtcccccgcttacacgacaacgggccagaccacgggaaggacggtgtttgtgtctgagggagctgctggccacagtgaacacccacgtttattcctgcctgctccggccaggactgaaccccttctccacacctgaacagttggctcaagggccaccagaagcatttctttattattattattttttaacctggacatgcattaaagggtctattagctttctttccgtctgtctcaacagctgagatggggccgccaaggagtgccttccttttgctccctcctagctgggagtgacgggtgggagtgtgtgtgcccaggtgggggtgtctcctggctgggaaggagggaaagggagggagagttttgcgggggttggcagtggagagcaggctggagaggagatggctaatagctgtttaatggaaacctgctgggctggagggagttaggctgaatttcccgacttcctctgccagttattgacacagctctctttgtaagagaggaaagaaactaaacccacccaagggatgatttcagggggagaggtggagggcagatgtcctgggcaaaccgggcccctctgcccacacacctcacttgatccttttgccaaacttgtcaaactcaggggaactggcttcccagttgcccctttgccatattccaagtccccctcagacttcatgtctctgctcatcagcactgtcccaggatcctggagagggagaacccctggccccaggggaaagaggggggggtctcccgtttcctgtgcctgcaccagccctgcccccattgcgtctgcacacccctgcgtgtaactgcattccaaccactaataaagtgcctattgtacaggtccaggcctggtgtgtttgttgggggcagtgagccagtggcggctggtagggggaaccccagcttccaaggccctaggagtctctgaactagggcgattctctcaaagggaacgaggagggggcaggaaacccactggctgctggctctgcctgaattccaaccttcaggcagctcagatttcccctgattaggctctaatccctggactccagaaggcagaggcagcctgtccacctccgccatcacccatcctggacacacgcccccaggcctcccctctctcagggcccaggcacctgaggtcctgcagtcactatgctccccagctactttggatctgcgaagggactgactgcccttggggtgggccccactgcctggaagctcgctgctgccccctcgtgccagctgccagtgtcagtcacctccaggcaatccgccccaacatttcaattctttccacctcctctcagggaatttttcttcaatatccacttttttttttttttttttttttcagacagtcttgccctgtcacccagggtggagggcagtggtgcgatctcggctcactgcaacctccacctcccgggttccagcgattcttctgcctcagcctcccgagtagttgggattacaggtgcctgccaccacgcctggctaattttttgtgtttttagtagagaccaggtttcgccatgttgggcaggctggtctcaaattcctcacttcaggtgatccgctggcctcggcctcccaaagtgctgggattacaggcgtgagccacctggcccagccttttttttttttttttttttttgagacaggatctcactctggctgaagctaaagtgcagtggtgcaatcatggctcaccacagcctcaggtgatcctcccatcttagcctcccgagtagctgggactacaggtacacaccaccacacctgactaatttttgtattttttgtagagattgatttttaccatattgcccatgctggttttttttgtttgtttgtttgttttttgagacagagtctccctttgtggcccaggccacagtgcatagtgccacagtgcagtggcacagtctcagctcactaaacctcctggattcaagtgattctcgtgcctcagcctcccgagtagctgggattacaggcgcgtaccaccacatccagctaatttttgtagttttagtagagacggggtttcaccatgttggctagcctggtctcaaactcctgacctcatgtgatccacctgcctcggcctcccaaagtgctgggattacaggcatgagccaccaagcctggccagcatttttgtttgtttgtttccaagaaggcatttgaacccaggtcttggctccagagtcctcaagttctaccctatgctggcactgaccccttcctcgatgcctttgtttccctggatcctttgaatctggcattttattcagccccagctcctgttaccatgcccacctaaaaaatagctcctggcggccgggtgcggtggctcatgcctgtaatcccagcactttgggaggctgaggcgggtgaatcatgaggtcaggagtttgagaccagcctggccaacatggtgaaaacctgctgctactaaaaatacaaaaattagccaggcatggtggcacatgcctgtaatcccagctactcgggaggctgaggcaggagaatcgcttgaacccaggaggcagaggttgtggtgaaccaagatgacaccattgcactccagcctgggcaacagagcaaaactctgtctcagaaaaaaaaagaaagaaagaaaaagatttgtggtacgatacatatagcataaaatttgccatctccatctctttcttatttattaagccactgggtctcactatgttacctgggctggccttgagctcccggactgaagggatcatcccgcctcagcctcccaagtagctgggatgacaggcactcgccactgtgcctggtttatgtttaattttttgaggaaccaccatagtgttttctggcttcatgctttggctccacttctgggttggcttcactctctgccaagttcctttatctgggtatattccctgcctccaaccacactgtgctgtgatagttaattttaggtgtgaacttggctggattagaaaatactcagatttgagctgtgatgtggtaaaaataagacaaagaaaaaaaaaaaacagtggctgggctccgtggctcacgcctgcaatcagcactttgggaggccgaggtgggcagatcgcttgagcttgaattcgagaccagcctgggcaacatgtggaaagcttgtctcaacaaaaactatgaaaattagcagggtgtggtggtcatgcacatgttgtcccagctactcagtaggatgaagtgagaaggtcactttagctcagggggtggagggtgcagtgagctgagatcacactactgtgctccagcctgagcgacagagcaacacgtctgataaagcattatttctgggtgagcgccatccaacttgctggggctccgacagaacagaaaaaggagagaaagcattttcctcctcagaactgggacactcttctcctcctgtcttgacactccaagacttataccagtgatccctggttctcaggccttcggccttggactgggaattacaccattggtgtccctggctctgaagctttaggattcagactgagcctcgctactggctttgcagggtcttcagctactggagctgctggcttttcagggtctgcagtcaatgcatgtggtaggacatctcagcctccatgatcacatgagccaattattctgctaaatcccctctcatctacctacctcctattagctttctcggagaaacctagtaatacacacatcatacattttcctggcctttttttttttttttttttttttttgagatggagtcttgctctgtcactcaggctggagtgcagtggcacgatctaggctcactgcaagctccgcctcccgggttcacgccattctcctgcctcagctcctgagtagctgggactacagctgcccgccaccacccccggctaatttttttgtatttttcgtagagacagggttttaccatgttagccaggatggtctcgatctcctgacctcatgatccgcctgccttggcctcccaacgtgctgggattacaggcatgagccaccgcacgcagctacattttcctggctttaagatgagaagtcttctctttttttgagacggagtctcgctctgtcgcccagcctggagtgcagtggcatgatcttggctcactgcaacctccgcttcctgggttcaagcaattctctgcctcagcctcccgagtagctgggattacaggagcccgccaccatgcccggctaatttttgtatttttagtagagatggagtttcaccatcttggccaggctgctcttgaactcttgaactcttgatccacccacctcggcctcccaaagtgttgggattagagggccagaaaagtcttttcttgctcctaagtctcaggcctggagctcactgactctgaccagcctgattatgatcatttactcattgtaaatcattgagtcaatcattgtagtcaaggtgtgggcctagtttgggagtcaggcagcagggacctgccatctagactacagtttgatcaagggagaggaatggttccccaacaactgtggtcatcccacagtgtccatcccagagtggtcacccatgtccaccctgggggggggcaagaagggaacaggcataggacaaaaagctttcgagagggaagttaactgggtgtgattgggagagtgggtggaatctttcaagatgaggaagacaatgaatagagaggctgtaaggacagcagagtcactgagagtgacaggacctgtctagactgacagattacaagagggggatgacctcaatcttcaaccaatgagtgggagggagggaagagagaaggaatagccagatgacagatgatgtcactaaggcaaggaggagagaatggtgttgtatacagggtttgtgaccactgagtggtggaaggacaagggcagaggtgcgaggtcgggtcagggtagcagttcagcaagacagggcagatggcatcttgtgtcttccatcctttacggtgaccagggactaggaacctgatggatggggtttattggaaagttgggctgaaaactttttacttcaaaaaatttttttctttttccttttttttttttttgagacgaagtctcactcttgtcccccagtctggagtgcaatggtgcaatctcagctcactgcaacctccgcttcctgggttcaagtgattctcctgcctcagcctcccgagtagctgggattacaggtgcgtaccaccacgcccagctaattttttatattttaaggagagatggggtttcaccatgttggccaggctggtctcgaactcctgacctcaagtgatccacccgcctcggcctcccaaagtgctaggattagagggtgaaccaccacacctggccctttctttttttttttagacacagtctccctgtcacccaggctggactgtagtggcttgatctcggctcactgcaacctccacctcccaggttcaagcgattctcgtgcctcagcctcccgagtagctggaattacagatgccagccatcatgcccagctactttttgtacttttagtaaagacagagtttcaccatgttggccagggtggtcttgaactcctgacctcaagtgatccaccaatctcggcctcccaatgtgctaggattacaagtatgagccactgcccccagccttctttttgtttttattcttgaaaactttttttttttttaatgtagagatggggctgggtgcagtagctcatgcctgtaatcccagcactttgggaagccaaggtgggtggataacttgaggtcaggagtttgagaccagcctggccaacatggcaaaacccagtctctactaaaaatacaacaattagctgaccatggtggtgtacgcctgcaatcccagtgacttgggaggctaaggcagaattgcttaaactcgggaattggaggttgcagtaagctgagattgttatcactgcaccctagctgggactacagaacgagactccatctcaaaaataaataaatagatagatagataaaaaacatagagatggggtctcactatgttgcccagactggtcttgaacttctgggctcaagcaatccccctgcctcagcctcccaaagtgtaggattacaggcatgagccagcatgcctggccaagacaacatttttcaggaagttctggttggatggggcacccgttcaagaggtaacaatcataaccattactgtttttgaagctttaactccatgccaggtactgaagcaaccccttgatgttgaattaactccgaatcagtcctcctccaaatcaaaccctaggaggtttgggtttgatccaaagactgtgcttgtcatcatgaccctatccgccctttactgtgtttggggtccctggggcaagaaacgccttagcggaatgagatcttcaaaagcgttttaagtaaccttaggctctctggagttgggagtcagaaaactagtaaccatcctcgttctgccatttggcagtgctgttagctcaagcaagtcactaaaactgacctgttccgaaaaaaagccagtctaggctttgttattaacattcgttattatcacagtgaccttcaacaatttaaagctttaaccaattttttggttttgtttttgtttttttgagacagggcttctgttgcctaggctagagagcagtggcccaatctcagttcactgcagcctcaacctcctgggctcaaatgatcctcccacctcagcctcctgagtagctgggactacaggtgtgttccaccatgccctggcattttaaccaattttatcttagtgcatgccccaatcatcttaccaaacctttcttcaatttccagctctatttgtgagacagatctgaggcacaggaaatgaaattaaaaagcctggtgcagaataacttatcaatttatgtgaaaaacaagaatatgattatgcacctctgaaaataaaactctactgtagttacacaaaaaactgtacaatggctggtcgcggtggctcacgcatataatcctagcactttgggaggccgaggcgggtggatcacgaggtcaggagatcgagaccatcctgactcacccggtgaaacccagtctctactaaaaatacaaaacattagccgggcgtggtggtgggcgcctgtagtctcagctactcgggaggctgaggcaggagaatggcgtgaacccaggaggcggagcttgcagtgagccaagatcgtgccactgcactccagcctgggagacagagcaagactccgtttcaaaaacaaaaaacaaaaaacaaaactgtacaatggcttctaagagggagggaactggatgtctgaggaagactttgtgctctcatgtctttggcacttttttttttttttgagatggagtctcactctgtcgcccagactggagtgcaatggcacgatctcagctcactgcaacctctgcctcccgagttcatgccatcctcctgcctcagcctcccgagtcgctgagactacagatgcccaccaccacgcccggctaatttttttttgtatttttagtagagacggggtttcactgtgttagccaggatggtcttgatctcctgacctcgtgatccgcccacttcagcctcccaaagtgctggaattacaggcgtgagccaccgcgcccggcgtctttggcacatttgacgtatcatgtgactatgctacctattaaaaatccacagtaaaatgtaaataaaatagaaaagcagagggtacagcatgcactcatttcttttttgagacggtctagctgtgccatccaggctgaaaagtgcagtgactccatcacggctcactgcagcctggacctccacagctcaagtgatcctcccacctactcctcccaagtagatggaactatggacacaggccatcacgctcagctaatttttgtagagactgggttttgccatgttgctcaagctggcctcaaactcctgggcttaagggatcctccagcctcggcctcccaaagtgtggggattacaggcgtgagccaccatgcccggctaggcactcatttctgtaattgttgcaggaaacaaaggaccagagagactgacacgggaaacaggaggatttatttagatgtacaccggctcagtggatttgtatctgaaaagctgaccattgaacaaagactgagtgtggtttttataggcaaacttacagaagcaaaacaaaagcagttaatgatacagtcacaggtcatgtaatctatagcataactgctgacttagcataacttgtggctttgcacagctgttggccttgcagctgtgtcaaaagaaaaacagagtctacaaatcttactaaatacaaccattggcaaacagtcatatttaatggttcagaaaaggagagacagtaaaggaatttttcttttcaactttgctccggaggaggctgtctggagcccattcctttggcctcgacttttcagtgttataactgtccttgaagtaagctggctaagcagaggaaaacttgttcttgttttctttttaacccttaccccctgccacataatcacatctttacacttcttttttttttttttttttttttttaagatgggaagtcggagtctcgctctgtcgcccaggctggagtgcagtggtgccatctcggctcattgtaacctctgcctcccaggttcaagtgattcaagccattcttgtgcctctgcctcctgagtagctgggattataggcgcacaccaccacacctggcgaatttttttttttttttttttttgaggctgagtctcactctatcgcccaggctggagtgcaatggagcaatctcggctcactgcaacctccgcctcctgggttcaagcgatcctcctgtctcagcttcctgattagctgggattacaggcgccctccaccacacccagttaatttttctatttttagtggagacggtgtttcaccatgttggccaggctggtctcaaactcctgacctcaagtgatccgcccacctcagcttcccaaagtgctgggattacaagcgtgagccaccacgcccagccaggaaacccattttcaacacctccttgctcttttttttttctgagacagagtctcgctctgtcgcccagactggagtgcagtggcgcaatctcggctcactgcaacctccgcctgccaggtcaaacaattctcctgcctcagcctcccaagtaggtgggactacaggcatgtgccaccacacccggctaattttcttttgtatttttagtagagacggggtttcaccatgctggccaggctggtctcgaactcctgacctcgtgatccgcccgcctcggcctcccaaagtgctgggattacaaacgtgagccaccgcgcctggccttccttgctcttcttgctccaaatcctgggaacgtctgaatcaacaggcggacatctgtcaaaccttcctagcaactacgcctgcggatggccaacctgaccctggaagacagtggggtttagttaagcacagattgtacatcgggggcctcataaggcgcctggaagcattcaagaacaccacgcttgtaaggacaaagcactcggtcacgggcgcctttacttcggagctccgcgctgctgctggacgagcgtccgttgagtcccagccccaatttttccaggaaatggcggtgagccctctagtgagatattttttggcctgggcctcagtttctccatctgtcaatgggggaaggggaaggcgggctagaggaccccgaccaggtcggctgcagccttcggaagctacggcccagggacgccacaccaaggcaggtctgcgggacgaaagaacccaagaacccgggcgcgcattggcgccggtcccgggctcaaggggcagcaacgaggagacgctggacctggccgttcctcgcacacatctctaaccttctgtgcctctcaagggagatggggtgagcatagccacctccactggagcccgaaaatccccggccgagataccgccactaaaaaggtacacatgcgtcaaagcctctcggagccatttccgctaacgtactcagggcgacgggcgtaagatggcggccgcgcaggcgcaaaatgtcgcagccgtagggaggctccgcctctgacgcttgccttgcatcacgtggtaatggccgctcaaaaaacgccttagcgaaaaccagagcgtgccctcgtcacgtgatggaggactcccagtacggcaaagggaaggcgccaaaagttgtcagatggcgaaggaaaccgcgaaattcgccattgtcacatgatggagcaacctatcgaaagcggagggaaaggtgccgaagtcacgtgactacgcacgcaaacactcccgcttgcaccacgtgcaactcacgcccaccccctcagccccccccttatctcttttcgcccctccctcccatttgggttgggcctgcgtcgaggcgcaacgcggcgtcaaagggggcggggcttcagccggtcacgtgttcccgcacctccccggcgcgcgcctgcccgcccgcccgctcgcccccggtccggactcctcctcctcctcttctcgccattgcagttggacccagcagcccggcgcgcaccgcgtggcttttgggggcagaccccggcgggctgtggcaggagggcggcggcggcggctgcggtcgaagaaggggacgccgacaaggtaagcgtcaatgtggcggcggccgggcccgctcccgcctctgcccctccccccgcccgccctcagtga

SEQ ID NO: 83 - DNA, 3432 bp, Homo sapiens
accggtttgggccgccccgcctggcgctgtgctgggaggagccgccgccagtcgcgcggtcagtgcctccctccagactcgggagggtcgagggggcgcgggagagagcgcgggcggccgccggggctggtcgcctgcagggatgggggacgagcggccccactactacgggaaacacggaacgccacagaagtatgatcccactttcaaaggacccatttacaataggggctgcacggatatcatatgctgtgtgttcctgctcctggccattgtgggctacgtggctgtaggcatcatagcctggactcatggagaccctcgaaaggtgatctaccccactgatagccggggcgagttctgcgggcagaagggcacaaaaaacgagaacaaaccctatctgttttatttcaacattgtgaaatgtgccagccccctggttctgctggaattccaatgtcccactccccagatctgcgtggaaaaatgccccgaccgctacctcacgtacctgaatgctcgcagctcccgggactttgagtactataagcagttctgtgttcctggcttcaagaacaataaaggagtggctgaggtgcttcgagatggtgactgccctgctgtcctcatccccagcaaacccttggcccggagatgcttccccgctatccacgcctacaagggtgtcctgatggtgggcaatgagacgacctatgaggatgggcatggctcccggaaaaacatcacagacctggtggagggcgccaagaaagccaatggagtcctagaggcgcggcaactcgccatgcgcatatttgaagattacaccgtctcttggtactggattatcataggcctggtcattgccatggcgatgagcctcctgttcatcatcctgcttcgcttcctggctggtattatggtctgggtgatgatcatcatggtgattctggtgctgggctacggaatatttcactgctacatggagtactcccgactgcgtggtgaggccggctctgatgtctctttggtggacctcggctttcagacggatttccgggtgtacctgcacttacggcagacctggttggcctttatgatcattctgagtatccttgaagtcattatcatcttgctgctcatctttctccggaagagaattctcatcgcgattgcactcatcaaagaagccagcagggctgtgggatacgtcatgtgctccttgctctacccactggtcaccttcttcttgctgtgcctctgcatcgcctactgggccagcactgctgtcttcctgtccacttccaacgaagcggtctataagatctttgatgacagcccctgcccatttactgcgaaaacctgcaacccagagaccttcccctcctccaatgagtcccgccaatgccccaatgcccgttgccagttcgccttctacggtggtgagtcgggctaccaccgggccctgctgggcctgcagatcttcaatgccttcatgttcttctggttggccaacttcgtgctggcgctgggccaggtcacgctggccggggcctttgcctcctactactgggccctgcgcaagccggacgacctgccggccttcccgctcttctctgcctttggccgggcgctcaggtaccacacaggctccctggcctttggcgcgctcatcctggccattgtgcagatcatccgtgtgatactcgagtacctggatcagcggctgaaagctgcagagaacaagtttgccaagtgcctcatgacctgtctcaaatgctgcttctggtgcctggagaagttcatcaaattccttaataggaatgcctacatcatgattgccatctacggcaccaatttctgcacctcggccaggaatgccttcttcctgctcatgagaaacatcatcagagtggctgtcctggataaagttactgacttcctcttcctgttgggcaaacttctgatcgttggtagtgtggggatcctggctttcttcttcttcacccaccgtatcaggatcgtgcaggatacagcaccacccctcaattattactgggttcctatactgacggtgatcgttggctcctacttgattgcacacggtttcttcagcgtctatggcatgtgtgtggacacgctgttcctctgcttcttggaggacctggagaggaatgacggctcggccgagaggccttacttcatgtcttccaccctcaagaaactcttgaacaagaccaacaagaaggcagcggagtcctgaaggccccgtgctccccacctctcaaggagtctcatgccgcagggtgctcagtagctgggtctgttcccccagccccttgggctcacctgaagtcctatcactgccgctctgcccctccccatgagccagatcccaccagtttctggacgtggagagtctggggcatctccttcttatgccaaggggcgcttggagttttcatggctgcccctccagactgcgagaaacaagtaaaaacccattggggcctcttgatgtctgggatggcacgtggcccgacctccacaagctccctcatgcttcctgtcccccgcttacacgacaacgggccagaccacgggaaggacggtgtttgtgtctgagggagctgctggccacagtgaacacccacgtttattcctgcctgctccggccaggactgaaccccttctccacacctgaacagttggctcaagggccaccagaagcatttctttattattattattttttaacctggacatgcattaaagggtctattagctttctttccgtctgtctcaacagctgagatggggccgccaaggagtgccttccttttgctccctcctagctgggagtgacgggtgggagtgtgtgtgcccaggtgggggtgtctcctggctgggaaggagggaaagggagggagagttttgcgggggttggcagtggagagcaggctggagaggagatggctaatagctgtttaatggaaacctgctgggctggagggagttaggctgaatttcccgacttcctctgccagttattgacacagctctctttgtaagagaggaaagaaactaaacccacccaagggatgatttcagggggagaggtggagggcagatgtcctgggcaaaccgggcccctctgcccacacacctcacttgatccttttgccaaacttgtcaaactcaggggaactggcttcccagttgcccctttgccatattccaagtccccctcagacttcatgtctctgctcatcagcactgtcccaggatcctggagagggagaacccctggccccaggggaaagaggggggggtctcccgtttcctgtgcctgcaccagccctgcccccattgcgtctgcacacccctgcgtgtaactgcattccaaccactaataaagtgcctattgtacag

SEQ ID NO: 84 - protein, 698 aa, Homo sapiens
MGDERPHYYGKHGTPQKYDPTFKGPIYNRGCTDIICCVFLLLAIVGYVAVGIIAWTHGDPRKVIYPTDSRGEFCGQKGTKNENKPYLFYFNIVKCDLVLLEFQCPTPQICVEKCPDRYLTYLNARSSRDFEYYKQFCVPGFKNNKGVAEVLRDGDCPAVLIPSKPLARRCFPAIHAYKGVLMVGNETTYEDGHGSRKNITDLVEGAKKANGVLEARQLAMRIFEDYTVSWYWIIIGLVIAMAMSLLFIILLRFLAGIMVWVMIIMVILVLGYGIFHCYMEYSRLRGEAGSDVSLVDLGFQTDFRVYLHLRQTWLAFMIILSIVIIILLLIFLRKRILIAIALIKEASRAVGYVMCSLLYPLVTFFLLCLCIAYWASTAVFLSTSNEAVYKIFDDSPCPFTAKTCNPETFPSSNESRQCPNARCQFAFYGGESGYHRALLGLQIFNAFMFFWLANFVLALGQVTLAGAFASYYWALRKPDDLPAFPLFSAFGRALRYHTGSLAFGALILAIVQIIRVIYLDQRLKAAENKFAKCLMTCLKCCFWCLEKFIKFLNRNAYIMIAIYGTNFCTSARNAFFLLMRNIIRVAVLDKVTDFLFLLGKLLIVGSVGILAFFFFTIRIVQDTAPPLNYYWVPILTVIVGSYLIAHGFFSVYGMCVDTLFLCFLEDLERNDGSAERPYFMSSTLKKLLNKTNKKAAES

SEQ ID NO: 85 - DNA, 3378 bp, Homo sapiens
ggcccggggcggggcgctgcagcccgcggagcctcccgcccgcccgggctggggtcgcgctggctcggactccgctccccgccccgccgcggccatggaggacgagcggaaaaacggagcctacggaacgccacagaagtatgatcccactttcaaaggacccatttacaataggggctgcacggatatcatatgctgtgtgttcctgctcctggccattgtgggctacgtggctgtaggcatcatagcctggactcatggagaccctcgaaaggtgatctaccccactgatagccggggcgagttctgcgggcagaagggcacaaaaaacgagaacaaaccctatctgttttatttcaacattgtgaaatgtgccagccccctggttctgctggaattccaatgtcccactccccagatctgcgtggaaaaatgccccgaccgctacctcacgtacctgaatgctcgcagctcccgggactttgagtactataagcagttctgtgttcctggcttcaagaacaataaaggagtggctgaggtgcttcgagatggtgactgccctgctgtcctcatccccagcaaacccttggcccggagatgcttccccgctatccacgcctacaagggtgtcctgatggtgggcaatgagacgacctatgaggatgggcatggctcccggaaaaacatcacagacctggtggagggcgccaagaaagccaatggagtcctagaggcgcggcaactcgccatgcgcatatttgaagattacaccgtctcttggtactggattatcataggcctggtcattgccatggcgatgagcctcctgttcatcatcctgcttcgcttcctggctggtattatggtctgggtgatgatcatcatggtgattctggtgctgggctacggaatatttcactgctacatggagtactcccgactgcgtggtgaggccggctctgatgtctctttggtggacctcggctttcagacggatttccgggtgtacctgcacttacggcagacctggttggcctttatgatcattctgagtatccttgaagtcattatcatcttgctgctcatctttctccggaagagaattctcatcgcgattgcactcatcaaagaagccagcagggctgtgggatacgtcatgtgctccttgctctacccactggtcaccttcttcttgctgtgcctctgcatcgcctactgggccagcactgctgtcttcctgtccacttccaacgaagcggtctataagatctttgatgacagcccctgcccatttactgcgaaaacctgcaacccagagaccttcccctcctccaatgagtcccgccaatgccccaatgcccgttgccagttcgccttctacggtggtgagtcgggctaccaccgggccctgctgggcctgcagatcttcaatgccttcatgttcttctggttggccaacttcgtgctggcgctgggccaggtcacgctggccggggcctttgcctcctactactgggccctgcgcaagccggacgacctgccggccttcccgctcttctctgcctttggccgggcgctcaggtaccacacaggctccctggcctttggcgcgctcatcctggccattgtgcagatcatccgtgtgatactcgagtacctggatcagcggctgaaagctgcagagaacaagtttgccaagtgcctcatgacctgtctcaaatgctgcttctggtgcctggagaagttcatcaaattccttaataggaatgcctacatcatgattgccatctacggcaccaatttctgcacctcggccaggaatgccttcttcctgctcatgagaaacatcatcagagtggctgtcctggataaagttactgacttcctcttcctgttgggcaaacttctgatcgttggtagtgtggggatcctggctttcttcttcttcacccaccgtatcaggatcgtgcaggatacagcaccacccctcaattattactgggttcctatactgacggtgatcgttggctcctacttgattgcacacggtttcttcagcgtctatggcatgtgtgtggacacgctgttcctctgcttcttggaggacctggagaggaatgacggctcggccgagaggccttacttcatgtcttccaccctcaagaaactcttgaacaagaccaacaagaaggcagcggagtcctgaaggccccgtgctccccacctctcaaggagtctcatgccgcagggtgctcagtagctgggtctgttcccccagccccttgggctcacctgaagtcctatcactgccgctctgcccctccccatgagccagatcccaccagtttctggacgtggagagtctggggcatctccttcttatgccaaggggcgcttggagttttcatggctgcccctccagactgcgagaaacaagtaaaaacccattggggcctcttgatgtctgggatggcacgtggcccgacctccacaagctccctcatgcttcctgtcccccgcttacacgacaacgggccagaccacgggaaggacggtgtttgtgtctgagggagctgctggccacagtgaacacccacgtttattcctgcctgctccggccaggactgaaccccttctccacacctgaacagttggctcaagggccaccagaagcatttctttattattattattttttaacctggacatgcattaaagggtctattagctttctttccgtctgtctcaacagctgagatggggccgccaaggagtgccttccttttgctccctcctagctgggagtgacgggtgggagtgtgtgtgcccaggtgggggtgtctcctggctgggaaggagggaaagggagggagagttttgcgggggttggcagtggagagcaggctggagaggagatggctaatagctgtttaatggaaacctgctgggctggagggagttaggctgaatttcccgacttcctctgccagttattgacacagctctctttgtaagagaggaaagaaactaaacccacccaagggatgatttcagggggagaggtggagggcagatgtcctgggcaaaccgggcccctctgcccacacacctcacttgatccttttgccaaacttgtcaaactcaggggaactggcttcccagttgcccctttgccatattccaagtccccctcagacttcatgtctctgctcatcagcactgtcccaggatcctggagagggagaacccctggccccaggggaaagaggggggggtctcccgtttcctgtgcctgcaccagccctgcccccattgcgtctgcacacccctgcgtgtaactgcattccaaccactaataaagtgcctattgtacag

SEQ ID NO: 86 - protein, 696 aa, Homo sapiens
MEDERKNGAYGTPQKYDPTFKGPIYNRGCTDIICCVFLLLAIVGYVAVGIIAWTHGDPRKVIYPTDSRGEFCGQKGTKNENKPYLFYFNIVKCDLVLLEFQCPTPQICVEKCPDRYLTYLNARSSRDFEYYKQFCVPGFKNNKGVAEVLRDGDCPAVLIPSKPLARRCFPAIHAYKGVLMVGNETTYEDGHGSRKNITDLVEGAKKANGVLEARQLAMRIFEDYTVSWYWIIIGLVIAMAMSLLFIILLRFLAGIMVWVMIIMVILVLGYGIFHCYMEYSRLRGEAGSDVSLVDLGFQTDFRVYLHLRQTWLAFMIILSIVIIILLLIFLRKRILIAIALIKEASRAVGYVMCSLLYPLVTFFLLCLCIAYWASTAVFLSTSNEAVYKIFDDSPCPFTAKTCNPETFPSSNESRQCPNARCQFAFYGGESGYHRALLGLQIFNAFMFFWLANFVLALGQVTLAGAFASYYWALRKPDDLPAFPLFSAFGRALRYHTGSLAFGALILAIVQIIRVIYLDQRLKAAENKFAKCLMTCLKCCFWCLEKFIKFLNRNAYIMIAIYGTNFCTSARNAFFLLMRNIIRVAVLDKVTDFLFLLGKLLIVGSVGILAFFFFTIRIVQDTAPPLNYYWVPILTVIVGSYLIAHGFFSVYGMCVDTLFLCFLEDLERNDGSAERPYFMSSTLKKLLNKTNKKAAES

SEQ ID NO: 87 - DNA, 3348 bp, Homo sapiens
accggtttgggccgccccgcctggcgctgtgctgggaggagccgccgccagtcgcgcggtcagtgcctccctccagactcgggagggtcgagggggcgcgggagagagcgcgggcggccgccggggctggtcgcctgcagggatgggggacgagcggccccactactacgggaaacacggaacgccacagaagtatgatcccactttcaaaggacccatttacaataggggctgcacggatatcatatgctgtgtgttcctgctcctggccattgtgggctacgtggctgtaggcatcatagcctggactcatggagaccctcgaaaggtgatctaccccactgatagccggggcgagttctgcgggcagaagggcacaaaaaacgagaacaaaccctatctgttttatttcaacattgtgaaatgtgccagccccctggttctgctggaattccaatgtcccactccccagatctgcgtggaaaaatgccccgaccgctacctcacgtacctgaatgctcgcagctcccgggactttgagtactataagcagttctgtgttcctggcttcaagaacaataaaggagtggctgaggtgcttcgagatggtgactgccctgctgtcctcatccccagcaaacccttggcccggagatgcttccccgctatccacgcctacaagggtgtcctgatggtgggcaatgagacgacctatgaggatgggcatggctcccggaaaaacatcacagacctggtggagggcgccaagaaagccaatggagtcctagaggcgcggcaactcgccatgcgcatatttgaagattacaccgtctcttggtactggattatcataggcctggtcattgccatggcgatgagcctcctgttcatcatcctgcttcgcttcctggctggtattatggtctgggtgatgatcatcatggtgattctggtgctgggctacggaatatttcactgctacatggagtactcccgactgcgtggtgaggccggctctgatgtctctttggtggacctcggctttcagacggatttccgggtgtacctgcacttacggcagacctggttggcctttatgatcattctgagtatccttgaagtcattatcatcttgctgctcatctttctccggaagagaattctcatcgcgattgcactcatcaaagaagccagcagggctgtgggatacgtcatgtgctccttgctctacccactggtcaccttcttcttgctgtgcctctgcatcgcctactgggccagcactgctgtcttcctgtccacttccaacgaagcggtctataagatctttgatgacagcccctgcccatttactgcgaaaacctgcaacccagagaccttcccctcctccaatgagtcccgccaatgccccaatgcccgttgccagttcgccttctacggtggtgagtcgggctaccaccgggccctgctgggcctgcagatcttcaatgccttcatgttcttctggttggccaacttcgtgctggcgctgggccaggtcacgctggccggggcctttgcctcctactactgggccctgcgcaagccggacgacctgccggccttcccgctcttctctgcctttggccgggcgctcaggtaccacacaggctccctggcctttggcgcgctcatcctggccattgtgcagatcatccgtgtgatactcgagtacctggatcagcggctgaaagctgcagagaacaagtttgccaagtgcctcatgacctgtctcaaatgctgcttctggtgcctggagaagttcatcaaattccttaataggaatgcctacatcatgattgccatctacggcaccaatttctgcacctcggccaggaatgccttcttcctgctcatgagaaacatcatcagagtggctgtcctggataaagttactgacttcctcttcctgttgggcaaacttctgatcgttggtagtgtggggatcctggctttcttcttcttcacccaccgtatcaggatcgtgcaggatacagcaccacccctcaattattactgggttcctatactgacggtgatcgttggctcctacttgattgcacacggtttcttcagcgtctatggcatgtgtgtggacacgctgttcctctgcttcttggaggacctggagaggaatgacggctcggccgagaggccttacttcatgtcttccaccctcaagaaactcttgaacaagaccaacaagaaggcagcggagtcctgaaggccccgtgctccccacctctcaaggagtctcatgccgcagggtgctcagtagctgggtctgttcccccagccccttgggctcacctgaagtcctatcactgccgctctgcccctccccatgagccagatcccaccagtttctggacgtggagagtctggggcatctccttcttatgccaaggggcgcttggagttttcatggctgcccctccagactgcgagaaacaagtaaaaacccattggggcctcttgatgtctgggatggcacgtggcccgacctccacaagctccctcatgcttcctgtcccccgcttacacgacaacgggccagaccacgggaaggacggtgtttgtgtctgagggagctgctggccacagtgaacacccacgtttattcctgcctgctccggccaggactgaaccccttctccacacctgaacagttggctcaagggccaccagaagcatttctttattattattattttttaacctggacatgcattaaagggtctattagctttctttccgtctgtctcaacagctgagatggggccgccaaggaggaaagggagggagagttttgcgggggttggcagtggagagcaggctggagaggagatggctaatagctgtttaatggaaacctgctgggctggagggagttaggctgaatttcccgacttcctctgccagttattgacacagctctctttgtaagagaggaaagaaactaaacccacccaagggatgatttcagggggagaggtggagggcagatgtcctgggcaaaccgggcccctctgcccacacacctcacttgatccttttgccaaacttgtcaaactcaggggaactggcttcccagttgcccctttgccatattccaagtccccctcagacttcatgtctctgctcatcagcactgtcccaggatcctggagagggagaacccctggccccaggggaaagaggggggggtctcccgtttcctgtgcctgcaccagccctgcccccattgcgtctgcacacccctgcgtgtaactgcattccaaccactaataaagtgcctattgtacaggt

SEQ ID NO: 88 - protein, 698 aa, Homo sapiens; identical to SEQ ID NO: 84

SEQ ID NO: 89 - DNA, 3294 bp, Homo sapiens
ggcccggggcggggcgctgcagcccgcggagcctcccgcccgcccgggctggggtcgcgctggctcggactccgctccccgccccgccgcggccatggaggacgagcggaaaaacggagcctacggaacgccacagaagtatgatcccactttcaaaggacccatttacaataggggctgcacggatatcatatgctgtgtgttcctgctcctggccattgtgggctacgtggctgtaggcatcatagcctggactcatggagaccctcgaaaggtgatctaccccactgatagccggggcgagttctgcgggcagaagggcacaaaaaacgagaacaaaccctatctgttttatttcaacattgtgaaatgtgccagccccctggttctgctggaattccaatgtcccactccccagatctgcgtggaaaaatgccccgaccgctacctcacgtacctgaatgctcgcagctcccgggactttgagtactataagcagttctgtgttcctggcttcaagaacaataaaggagtggctgaggtgcttcgagatggtgactgccctgctgtcctcatccccagcaaacccttggcccggagatgcttccccgctatccacgcctacaagggtgtcctgatggtgggcaatgagacgacctatgaggatgggcatggctcccggaaaaacatcacagacctggtggagggcgccaagaaagccaatggagtcctagaggcgcggcaactcgccatgcgcatatttgaagattacaccgtctcttggtactggattatcataggcctggtcattgccatggcgatgagcctcctgttcatcatcctgcttcgcttcctggctggtattatggtctgggtgatgatcatcatggtgattctggtgctgggctacggaatatttcactgctacatggagtactcccgactgcgtggtgaggccggctctgatgtctctttggtggacctcggctttcagacggatttccgggtgtacctgcacttacggcagacctggttggcctttatgatcattctgagtatccttgaagtcattatcatcttgctgctcatctttctccggaagagaattctcatcgcgattgcactcatcaaagaagccagcagggctgtgggatacgtcatgtgctccttgctctacccactggtcaccttcttcttgctgtgcctctgcatcgcctactgggccagcactgctgtcttcctgtccacttccaacgaagcggtctataagatctttgatgacagcccctgcccatttactgcgaaaacctgcaacccagagaccttcccctcctccaatgagtcccgccaatgccccaatgcccgttgccagttcgccttctacggtggtgagtcgggctaccaccgggccctgctgggcctgcagatcttcaatgccttcatgttcttctggttggccaacttcgtgctggcgctgggccaggtcacgctggccggggcctttgcctcctactactgggccctgcgcaagccggacgacctgccggccttcccgctcttctctgcctttggccgggcgctcaggtaccacacaggctccctggcctttggcgcgctcatcctggccattgtgcagatcatccgtgtgatactcgagtacctggatcagcggctgaaagctgcagagaacaagtttgccaagtgcctcatgacctgtctcaaatgctgcttctggtgcctggagaagttcatcaaattccttaataggaatgcctacatcatgattgccatctacggcaccaatttctgcacctcggccaggaatgccttcttcctgctcatgagaaacatcatcagagtggctgtcctggataaagttactgacttcctcttcctgttgggcaaacttctgatcgttggtagtgtggggatcctggctttcttcttcttcacccaccgtatcaggatcgtgcaggatacagcaccacccctcaattattactgggttcctatactgacggtgatcgttggctcctacttgattgcacacggtttcttcagcgtctatggcatgtgtgtggacacgctgttcctctgcttcttggaggacctggagaggaatgacggctcggccgagaggccttacttcatgtcttccaccctcaagaaactcttgaacaagaccaacaagaaggcagcggagtcctgaaggccccgtgctccccacctctcaaggagtctcatgccgcagggtgctcagtagctgggtctgttcccccagccccttgggctcacctgaagtcctatcactgccgctctgcccctccccatgagccagatcccaccagtttctggacgtggagagtctggggcatctccttcttatgccaaggggcgcttggagttttcatggctgcccctccagactgcgagaaacaagtaaaaacccattggggcctcttgatgtctgggatggcacgtggcccgacctccacaagctccctcatgcttcctgtcccccgcttacacgacaacgggccagaccacgggaaggacggtgtttgtgtctgagggagctgctggccacagtgaacacccacgtttattcctgcctgctccggccaggactgaaccccttctccacacctgaacagttggctcaagggccaccagaagcatttctttattattattattttttaacctggacatgcattaaagggtctattagctttctttccgtctgtctcaacagctgagatggggccgccaaggaggaaagggagggagagttttgcgggggttggcagtggagagcaggctggagaggagatggctaatagctgtttaatggaaacctgctgggctggagggagttaggctgaatttcccgacttcctctgccagttattgacacagctctctttgtaagagaggaaagaaactaaacccacccaagggatgatttcagggggagaggtggagggcagatgtcctgggcaaaccgggcccctctgcccacacacctcacttgatccttttgccaaacttgtcaaactcaggggaactggcttcccagttgcccctttgccatattccaagtccccctcagacttcatgtctctgctcatcagcactgtcccaggatcctggagagggagaacccctggccccaggggaaagaggggggggtctcccgtttcctgtgcctgcaccagccctgcccccattgcgtctgcacacccctgcgtgtaactgcattccaaccactaataaagtgcctattgtacaggt

SEQ ID NO: 90 - protein, 696 aa, Homo sapiens; identical to SEQ ID NO: 86

SEQ ID NO: 91 - DNA, 54810 bp, Mus musculus
  misc_feature (1)...(54810): n = A,T,C or G
ttttttttttttctttttagacagacagggtttctctgtgtagccctagctgtcctggaactcactctgtagaccaggctggcctcaaactcagaaatccgcctgcctctgcctcccaggtgctggaattaaaagactgccccaccactgcccgggcaaaaataaatctttaaaaaaaaaaaaaaagcaaaactgcacacataaatacataaatcgattttgtttattctggtgcaggagaaccagtgctgcagcagaacaggtcagcaccagaggataactttgtggagttggttctctcctccctttatgtgggtcccaggaacccaacccagcttgccaggcttatacaatgtctttactgaactaactcacgggcctgtggaatctaaaaaatacacgttggtaaacaaatcaaaaccaattttttaaaaaattgattttgcggccaaggccagtagagaaacgacttctgaaagttatcctatgaccataaacataccatatgtacaaacaagcgtgtgcacatgtgtttttgttttgttttgttttttctggctattctggaccagactggtctcaaactcagagattcacttgcccctacctcttaggtgctgggattaagctcttctctttctgtaaatctcaacataactttcagtttttgtgaagtgccgctgcattcagttgctaattactagtttgtctcaaactgccactcagaacttggcaaaaacagagcctactatccctttgaatcatttcctaattataactcagtgccaatgccctagtgaagaaggttcccactattttctggggtgggcatgtgggtgcatacctaaaactccaaatatcaggatgaagcagaaaggctgccataagttcaagtccagcaaggtctacacagtaagatcccatcttaaaaacacaagagcagtcgaaaagcaaacaaatttaatgtatatgaatacactgtagctgacttcagacacaccagaagagggcatcagatcccattatagatggttgtgagccatgatgtggttgctggaattgaatgcgggacctctgatgtgctcttaaccactgagccatctctccagccggggagagagagagagagagagagagagagagagagagagagagagtgtgtgtgtgtgtgtgtgtgtgtgtgtgtgtgtgagtatatgtcacaaatgtctgggtgactgcagagcccagaaaagggagttacagtcaattgtgaaccactcttcatggctgctgtgaaatgaacttgggtcctctggaagaacccttacctggtaaatatccagtccatagtacagttgttttaatttttctccagatgtctgttagaggaactttttcatggtcctagggattgaacataggacattttaatgctaggccagggctctataattagccatatgcaaagcctactgtagcaacttttgaagagttatagaaagtaggtgctttagatgcccctggtcctattattttgcataacagattgagctttgcacacgttagctgtctccagttccacaagtaatgcaggtaagacagactactgttatttctgttaactgctctgcccttagtagagagtaacataggggctaaaaggaattgtgacaacctggaataaattcagaaatggaaagtgagcatgataactcttatgtataatcccaacatttggaagagtgagacctgtgtcaaaaccagaagtggcagctacatgctagcagtttgtaagccaccttagaatgatggtgtctatggagggaacaaatgggaagctatggcaatctgatcactctttagtcatttctttttctttttttttttttttttttcctcttttggtttttcgagacagggtttctttgtatagccctggctgtcctgtaactcactttgtagaccaggctggcctcaaactcagaaatctgcctgcctctgcctcccgagcgctgggactaaaggcgtgcgccaccatgcccggcctgtttagtcatttctgccagctaagcttacacattactttctggttatttccccattatcagttcctctataggatgaaagtctgctcattcctcattaatataatctgtgatcaacagaaaacaaatgaagttgatctgaggttagtgtcagaactttgtaactttgagaatgatacatcagtgaaatatgctggtctagcccttaggttaatatacagataagtaacaattaggtgggaggaagatggcattactatgtaacgagtaattgggcactttctgtcagatatttgtaaagtattggtaagccaagtaagattactgccctcctgggccagatactccattaagtgagacttgaaaatgaacagcagaacacatggccatggagagaaaagtgattatagaaacaaaagttctaaactgggtatggagatccatgcctatccagaactcaggagggagaagtgggtaggagattactacagattcaaggccaacctggtctatgtaacaagttccaggctacctagggctacatttcaggaccctgtccttgggtgtgggaggagaaaggtaaattctagtgttttcacagaaatataagaagttactatacccacaaagtataaatagtttaaaatgaaaaagaaataggagcgtaagaaattaaagctgttgtggcatggtggtgcatgcagttaatctcaaaatttagaaagcagaggcgggtgtatgtctgaattctagatctacacagttgagttccagaccagccagaacaacaaagtgagacgctatcccaaacaacagaagtggtactgagggagagaggcttagaacataatgttctggtaggaagccctggtttggattctagcattcatgttaggcagttaaaaaccatctaacttctgctctaggggatctgacacactcttctagactccacaggcacctacactcaagtgcacacacaagaacacagtgttaataatgataataaagatgtttttttttttaaaaaatggtattgaggttaaatcagtgtcatgataaaagtggggacgttttcaaatattaaaaaaaaaaaaagggctgggtagtggtagtgcacacctatatttccagcactcaggaggcaaaggaaggtgaatctgagttcaaggacagcctgatcagtgcaagttccagatctatcagaattacacagagaaactgtcttgaaccccacccctcaaaaaagcaaaaacaagtaagcaaccaaacaaaccctcaaaacaaaacccaaccaaccaaacatgggaaaagttaaaattggggtatccaagaaacaagagatccaactttattttttttaaatttaaaaaatgacagcagctgggcatggtggcgcacacctttaaccccagcactcgggaggcagaggcagccggatttctgagttcgaggccagcctgatttacaaagtgagttccaggacagccagggctacacagagaaaccctgtctcaaaacaaacaaacaaaacaaacaaaaattccaaacaaacttacttcacccccatagaattaaaaataaaaagggacatctcagtacctttgaaatatgcttagagaagtgggctctgtgactaatcttccagaagagactagatatatacacaaggcacagaagcttgagggtgtgtctgtgtacacacacctgtcacggtcagcatatggaagacaggacaatctgcaggagttagtttgttccttctatcttgtttggggctgggacagtcttgcttctgctgctttgatatgtactgtggggtgagctggattttgatttttggacctttctcctgccttattttccacctcccattttacagaggaactctgggataacagacaggggcccctgaaaccaggatttgtgtgcaactgagcctctaagaatatgaactcaggccatcgagcaagtgcttttccagatacatcaggggccctgggcctcttttagtcaatgccaatgctacagtccctttctttctttctctccagttcaaatataggaagggccacatacaacctaaggcctttgaagtttgaatgcaaaatattccccaaagatatacataaatattttcaacataatagcttagttctcagcctatgacactgttaggcattggtaggtagggcctggtggaagttagttgggtcactgggagtttgcccttgaaggggatatcagagccccagtctctcttctttctcagttgtcatgaagtgttagactcctttcatgatatgctatcccagcatggaccaaaataacagtgctaagtgatgatttcatttcttttctcctttttaaaaagtaatttatttttattttatgtgcactggtatttcacatgcatgtatgtctgtgagaaggtgtccagtcccatggaactggagttacagacagttgtgagtcattatgtggatgctgggaattgaacctgggtcctctggcagagcagtcagtgctcttcatcaatgagccatctctctagctctacctttttccctttaactaccagttatttattttgtcataggaacaaaaattaaaatggacagaaagatgagggccaacaagatggctcagcagataagagcaagtcttttttttcttaaatcttattaaagatttttatttttttacacattttttaaattaggtattttcctcatgggctggtgagatggctcagtgggtaagagcacccaactgctcttccgaaggtccggagttcaaatcccagcaaccacatggtggctcacaaccatctgtaacaagatctgccctctactgaagtgtctgaagacagctacagtgaacttacatataataaataaataaatctttaaaaaaaaaaaaagagcaagtcttaaaacttgagtttgatccttgcatggtggaaggagagaacttattcctcctcaagttgtcctttgacctctacatgcattccatggcatgtgtcactggaaatactattttgtttgtttgtttgttttgtttgttttttttttttttgagacaaagtttctttgtgtagccctgggtgtcctggaactcactttgtagaccaggctggcctcaaactcagaaatccccctgcctctacctcctgagtgctgggactaaaggcatgcaccaccatgcctggctaccagagatacttatacatagtgaattattttttaaaattagaaatgtaaatatacacttcaggaaaggttaacagctctatttcaaagtctcaactcctacaaaacgtgaattttcaatttatattatattttaattcttattatacatattagttatatgaattcataggattcactatgatatcccccatacatttatactgtccacagagtatattctttcatcctttcaaaacaaaaaagtactaattatttatgcaagtgtttgtgttggggtaggtgcctttgagtgaaggtgccctcagtagctatcggatcgcatgtagctgaagttacaagtagctgaaagccacattgactactgggaatcaaacttgtgtcctctgcaagattagtatacaccttaactgacaagccatctctccagtaccactgcccccgcttttatcacataggaaagtacatgcaaagctcactgttctgtgactggtttactatgtgaggggctggggagcagggctggagagatgctcagaggttaagcacactaagtgctcttccagagatcctgagttcaattcccagcaaccacatagtggcttataactatctataatgaggtctgggtgcccttttctggcctgcaggtatgcatgcttctgtgtatcactgttctatgatggcttaatgtgatggcatccagttgtattaatcttcctgcaaatgacaggacttcattttttccttttttattagatattttcttcatttacattttaaatgctatcccgaaggttccctatatccttccccgccccaggacttcatttttataatgctccattatgtatctcctctgtagggttactgttgctgtgatgaaacaccatgaccaaagcaacttgcagaggcaggagtttattagacttattcttcttcatcactgaaagaaatcaggacatgaactcaaacaaggcaggaacctggaggcaggagctgatacagaggcaatggtggaatgttgcttactgcattctctgtattgctttgctcagtctgctttcttatagaatacaggaccaccagcccagggttggcaccatccccactgggctagggcctctcactagtcaagaaaatgtactacaggcttgcctactgcctgatcttatggaggcactttctaattgcggttccctcctttcagacgactttggctcatgtcaagctgacataaaactagccaacacagtgtacatgtgtgtgctttctttgcccattcatctattggtagacagtgagtccaattcccaatctaggctactgccatagtgctggcaaacattttagtaactgataaaatagtaaaaccattgctttctaaaaccaccaactcaaaactgaattcatatgtaatctgttggctgacttattgtaattttcccattctgagttgatttgtaatacaattttgtgcacatcttttgtgcacatcttttgtgcatatcttttgtaaatatcttcactgacaattacagattagctataattataactagctagtctgctatcaaaaattcatcctgctctcttttgttttgtatttgagaagagacaaggtctcactatggttctcactgacctagaactctccgtgtagaccacatagcctacaactcatagaaatcttcctgtctctgctcctcaccatgccaccatgtccgctctccttattaattaattaattgaatttaagatttatttatggtctggagagatggctcagaggttaacagtactgacttctcttccagaggtcctaagttcaattcccagcaaccacatggtggctcacaaccatctgtaatgagattgaatgccctcctctggtgtgtctgaagatagctacagtgtactcatatacataaaataaataaatattttttttaaatttaattatttattttgtttgcttttatttcgagacagggtttctctgtatagccctggctgtcctggaactcctttgtagaccaggctggccttgaactcagagatccgcctgcctctgcctcccaagtgctgggattaaaggcgtaaaatatttatttattatgtataaattgttctgcctgcaggccagaagagggcatctgaccttattataggtggttgtgagccaccatgtgggaattgaactcaggacatctggacgagcagacagattagccatctctccaggatctctctctcccccaccccgtctccttttgttaaaaggaatattactcctaaaaacgacgactttactttaatcacttagaatcctaaaggtagtgtcttttagaaacaggttctattaaaaaaacagagctttcaataatcttcatattttcccccctcaacggtcttttttattcccttttagggtgcatgcagattaaggaaaagggaaaattcctgagtgggaggggcttcaagggaggaacaccttttaaatagttttatatatatatatatatatatatatatatatatatatatatatatgtgtgtgtgtgtgtgtgtgtgtgtgtatttatcaatatatatgttcatgtgtgtatatacatatatacgtatatatatatatatatacacacacatatatttaaatttcttttagctcttttacctcttttgctatgtgaaacttaatctaggacctcatgcatgcagggaagcatgcagttactgaattacatcaccaggcctctgtttactctttgagatagggtctcattaaacacccaggatgtccttgaactagctacacgaaagccctccaccaggcctaggctagcatcccttaaaacttttttttaatttcttttaggatttatttatttatttatttatttatttattaggctagcatcccttaaaactttttttaaaaatttcttttaggatttatttatttatttatttatttactatacgtgtgtacactgtagctgtcttcagacactccagaagagggcatcagatttttgttacagatggttgtgagccaccatgtggttgctgggatctgaactcaggacctttggaagagcagacggtactcttaacttctgagccatctcaccagcccccttaaaacttttattattactgtgtgtatgtgtacaagtgtgcacatacatgccacagtggaggtgtggacaactttgtggggtcagttctcttctacaacctttaggtggatcctgggtaatcaaatgcaagattgtagattgtaagggggcaactgtctttacccaccaagccctagcattgtccctagtcctgaccttagcatttttttttttttttttaaaataaaacgtctgaggtgacctcccaccatataatgccgtggtaaaagtcttcgtcagtttcgggcactgtaatcttttgtttcccagactctagaactgtgagaaataatttatctatgtaagaaattaagctaggttttgaagccacaggagtttgaatgtatgtaaagtcctcatgcttatctccttcagattaagatgcctggaattagctcctcctgcctcagactctgggagcactggcatcacaagtgtgtgctttgccgttattcttgctaaaataaaactacatggaacatttactataaaaacaaaagagaagaggtattgagttaggtcctggtgtaaaaactggtcatgagcattttgaggaaatgcattattgtaataagtactgatttcaatagttggtgcttcccttcatgggagaggaaaagagaagccagcgtcactggcaccaaatatgaatggtatctggatggtctaatcttaccgtagcctttggtttgaggcttgtaaggcatggaagtgttcgaattagtacatctgtttatatgtatatatcggaaaagactggagtttggcagctgaaaccccttcctgtgcccgttctcagtaccatcctcggagggtccgggaggaaaggtcaccctcgcaggggcccggcgatgctaagctgctcctgattgcacagataatttctgcaggctattgccggctcagcccgactcgggcggttgacaccctaaaaaggcctcccgggcccttccataaagtcagacctgagtgaaacgtttcggtgaaatttgtcaaaggtccctttatcgaggttactgcaaacacagaaacaattcttgggcttattagttgacacatcttacacaaggtgggttcgtgtgaaccatggaggctgagagttttcacaacatatcttctctcctttaaccgtttaataggtaacgggccatttctaccttaaaaaacaaacggatctgcagcccaacttttccggacgtggtacgactgccgctttctttacgtatttccgcttctgctcatgtgaccagggtacagcgtccactccttcctatcgccgctccttcctggtccgcagaccgacacgtcactgctcggctctcaaccaaactgttcagagcacgctctttccgcgcgtttcgctttcccgcgccggcctatcacagttcggtgggacttcatagtcacgcctctcaacagggtgaatgacagtcacattgtccattcaaaaggaggaatccagactcgatccacgccctcgaaatgacagacagaaccgttatcctgtcggtcccctgaaatatacatcgacggaggctagccaatgcggagcgggcagggaggcgggccttggctgctgtcagggttgagtgcgccgctgaacggatggcagggggagcagagtgggttcctgaggagcatccgtgaggtgagaaactctggggtagcgctagaggattagcggcaggtgccgcgcgggctgttggccggcccgaacgaggtgctggacacaagcctgtagaggtggggagcagagcctgcctgcggcctgggcggaggagggggcgtggagtgtgagatggggacgtccaggcattggggcaccagacgatctgaggaagggtcttggcagagcaatgcactctggccatgagggcgtggggcacaggatcctgggactagcttggaagggccacgcggagtgtgctgagatagtgggttcgaagtcagtgagggtgcacaagatgacgtggaaacgtatgtgggaaaaccaccgaggctgcagccctagaatttagagctcgggtgggtcagggcttgcagacacagctgagaagcagagagatgatgagcagataagaaaagcgtcctttccctttctgtaccctatcggtgtgtggagattgccaagaacgggatgaaaactcgcagtgtttagctttaaagtccaggttttagcactctcgctgcctttgcttactcttcaggtgtgtggatcatatcagctcagtggtgtttagtttccatgtcacttatctcctgagaacaactacaaacccaagagatgggactgagttgttcacttcccagaattagtgcgtgataagccttccctttggaattataattaatcacaccagcccaaactgctcttttagtatagttaattaaaggaaagatgttagacttcgcagtgtgagtcttcgtgttttccattttgtccagtgttttccttttgcaaccccctggtccctggaaagaagggaacaagataatgcagtttcccctttcccagcatagttttgaacagtgctacgttttctcagttgctacagtctttgtttcttagtccttaacacaccaattgtctataattgatcaccattctgaactgtctgcagattgcttcccttaccaccattccaaaatttattctggtccagaagaaacaaaattattattattattgtatttttgctctagattttcatctggtgctccaagttgtctctgggtcatagaatgagttacagggaaatagacctgagcagtagttacagtttgaactttgaaaatgaatatgtagtgggtggcctgagtatatttctctcttgagtgcatggattgaacttgcattagtgaccacctgctctttagttggccagggagcatgcacgctgggatttggaacagaaaaaaagcttgtagccaatcaattgaggcttagatttatagctggaaattatgtctagtcagtcatgatttctagatttctcctttcacttcagtaagtaatgttcatttccaccttccctcccttcccacttaccttcctgcccaaattacctccccctctttccccaccgtcagccccacttaactttttctgtggcagggtctcacattaacccaaactgactcagaacttaactgggtccatgctgaactcaacagtacagtgatcctcttcctcggtgtcaccaagtgttgggaatctagacatgggctagtgtacctggcttgtacgctctcctctcatgcccactcatgtttccgtgattattttctttttcccctttaacaagtacctttgtttggttttccctctttctattttcacgtccttttctactttcctttctcctccacttctgtttctttctgatccttgtgtcttacttttgctagttgtacttggttgctgtgcaactaggaaacagaattgtgggtggaatatatatttctttttgtagtactgaaagatggaaaccagggcttttttgccttctaggcaaatactctgttgttgaacatgggcagcccttttaaataattttatcttgggacaggctctctctaaactggagcctttgattcttctgtcccagtctcttaaatacctgggattatagacgtgtggagtgtgtgttttgaatactcttttttgttcttttatttttggcagagaaggcaatataactaggttactggtaactctgattggcctagaatgtgctttgtagatcaggttggcctgcctctaccttctaagtattgggattaaaggcatgtgccactaagcatggctctccctttttcattttgacatataaatctaataatgtttgcttcttccctgtacatcagtctgtagtcccaggttgggttacctctgtggtgttttttgtagctcacgtatattctatggttcttaaccatcataaaagattaaagctaatttaagtaaatttagtatattcagtatcttacagtcttgactttttccattttaggtatttgaatatcatcagttgccacccattgatgtcaagatgactaagcttggatttttgcgattgtcctatgagaagcaggacacacttctaaagcttctcatcctgtcgatggctgctgtgttatgtgagtctgcgtacgcttctccccttggagctgggatgatgagaacattaaaaacagctttttaaaacatggcttattcttttagcagatggctcctcctttttttttttaattatttatttattctatgtatatgagtatactgttgctatcttcagacacaccagaagagggcatcgatcctattacagatgattttgagccaccatgtggttgctgggaattgtactaaggacctcaggaagaatagtcagtgctcttaatggctgagctatcgcttcagcccaagattgctgttctttttgccatttctcagtggtataattttttaaaaatttcaaatatttttttttttactttacgtccagttcactgtttcctttctgtgtcactggcataattttatgaagacaaaataactcaagaaatgtaacccttaggctgttgataggaaaaacaggaagtattctgtgttggttctgttttctcattgggtgaaagaaagtagaagctatcagatgttgaatttaaaaaaaaagtattctttttaaattttatgtgcaatggtgtttttgcttctatctatctatctatctatctatctatctatctatctatctgtgtgagggtgtttgaatcccctggaactggagttatagacaggtatgagctgccatttgagtgctgggaattgaacccaggttctctggaagagcagtcagagctcttaactgttgagccatctctctagcttccaggtgtgttgtaaaagatttatcttcaactctgttgtctctaatagttgctagtactatcttgacatgatctaggatcacctaggagacaagcccagggcactgcagtgaggaattacctggatgaggtttattgaggtcggaaagaccatctaaatgggatgatgcttttctgggccctgaattgaattgaaaagaggaagagagcagaacaattaatgcttcttcctgattggtctcagtgtggtctgttgctctaagctctgccatccctcttctctgcatattgctccctcatcctagaactgtgagcccaaatgaacctattctcccttacattctcccttacatcagggtatttatcacatcactaggaaaagtaatttgtttgaggcagagttgctacttacccagtttggcttcaactcctctcttggtcggtcttccaagtgctggcattgtaagcaaacacaactgcaccttagtatttctcaaattcttttgaaaatttactgcttttaaagctttctcagctcttcatgagtcaaatatatatccttgcttgataatattccaagattaaaataagagggagatgagtaaaagatgtaaaaatgggcaaaatcacatgaaagatggccaaattcagtattaggtaaatatgatctgataggctttgtgtaatacaacagttaaaagtatcccatttaagtgaaaacatgtagacacttttgtcagacttgtagtgtctcttctaggtggtgagaagtggatgaagatttcattcaagaactattttgcgtcttctgactccagtgctaaagaattgtagcttccccataatgctgctgtttaccttctcttgttctgtagtagcatgccactaattacaatattcattctctggattttgtagctttttctactcgtctttttgctgtgctgagatttgaaagtgtcatccatgagtttgatccgtgagtacctttgctctgacattatttccttctagagatgttgaagtttgtgcgttttttatgtgtttatgttccaaatagttcttcagtggtggagatttttttcagcacatttaaaggaaaactttgtcaaggtttccaagtgagtcttaagatctcaaaaatgtaatagactttgttgttaagccttgaggtctggctaggctaagagaaatctggctttttattttgaccaagtgcagtagtgcaccttaagggaaagagtcctggagtacatttaaatctagaaaggatattacaagtcatgaacttgagatcataacttcttttccatttatttatatagtagaaattgggcttattattaaattctatggcattaaaaatattaaagctatgagagcatggtattgtgacaaatgcctatcatcctggactgtatagtgagagtctctctcaaaaaattaaaaaaaagccaatacaaattaaaatttaaaaaatttgggcttagtggcacatgtttttaatcctagcacttgggaggagaggcaggcagatctctgagatcaagaccaggttggtttacatagtgagttccaggccagctaagccttcaaggcagtaccgtgaaatcctgtctcaaaagaatgaaatgaaacaaaaaccagtgtgggctggagatggttaagagtacacactgcttttgcagagggtccacatttagtttccagcacccgggtaagatggctcactaccacgaggcctctgacatcttgagacaccttcataaacacatagttaaaaaaatatgctgggcgtggtggcgaacgcctttgatcccagtacttgggaggcagaggcaggcggatttttgagttctaggccagcctggtctacaaagtgagttccaggacagccaaggtacacagagaaaccttgtctcggaaaaaaaaaaaaccaaaaaataaaaaaataaaaataaaaatatatatttatgttgaaaaaaaaacccttccaagacctaaataaaaaaatctaagattttgtttattagattaaaaaagatatggtaaagccttcagttattaataactaacattagctgcatgtggtggtggtgatgcctgtaaccttaggaccctaggggccaagaggcgagaggattttgtcaagttggaagtcaactctggatacataggtcctaggtcatctggagctacatagaaagcccctaactccaacaaacaaacaaaccaacccaaatgggctcagtgggtgaaggcacttgctgctaggattcagttagatccccagaactcatggtggaaggaaagagttaatactcaaaggttgaactttactctccacatacagcatgacaccacctcccccaccccctttacataattctttttaacctaacattttctaagcatcttttattcttctgagaactattttacagattttctttaaattccccaaacaatgaaatgcggcacagtttttccttctgctgaggaggagactgggactgtgtccacagttccacatttactagatgggagccatggtttgaacgtagctttgtctgattgcagactggggtcattgttaatagtgcctaaaattgaggcttatgaaacacttggaaatgagaggtacagttttttgacttactgaaagcttaaaaataacacgttcctatttaataacattgcttcaaaagtttaaggcctgtactttgtttgcaaaaaaaacttgtcattttgttttgtgtacgtatttttttttttttttttttggttttttgagacagggtttccctgtatagccctgctggctgtcctggaactcactttgtagaccagactggcctcgaactcagaaatccgcctgcctctgcctcccaagtgctgggattaaaggcgtgtgccaccactgcccggcttgtgtacatattttaaagaatttggaggccttggatgtattttctttgaggagttctgaataattttactttttctttttttctcatgaggacactgtgttggttagttttgactgttaacttgacacactaaaatcacctgggaagagtctttgttgtttgtttttttgagacagggtcttactttgtcaccctatctgtcccggagccctatgtggaccaggctggccttgaagtcacagagatctgtctgccttcctccgcctcctactcactggaactaaaagtgtgtgccaccacagtagccttggcagagagtctggatgaattatctacgtcaggttggcttgtaggcatattagcgggggactgtctttattgctaattagtaaggaagacccagtaaatgacatcattccctagatcttgaatagtttaagagaaaaataacttaaaagcaggcaagcaggcagacaaacagacaagcctgtatgtgttcgcttatttctctgctgttgcccggggatgtgactaggtgtttaacttctttgctagcatggactgttacctggaattgtaagccaaatatttgctttgtcacctttgttgtttttgttttaatctaaatacattactttttttgttttgcagttttaaaaaataaatgatagttagtgtctttactctctgtccactctaatgcctactgtttttttgttgtcagagtattttatcacaggaacagaaatgaatatacaactcataccgttttctttgctttccttttttttttttttttttttgagatagagttttatgtagttcagggtagttctaacccgctctatagcaccctccttgtaggtaatgtacatgattacagtaacacagtgactgccttctagaaccctcatcctttctctctctctgatagttaccagaataatatatctgtgaggaacaggaggactgagctctatgtcatccgctgcttctccttacctcagctgtcaaaacttgatagatcaaggagaaaaagagggttagggaggtaggctgggaagtgatgatccctagttagagaccccattcattcacttgattttgttctacctttcccttccttttcacttagggaaaggctctaaaaaactgtgctcatgtttagtccttaacatttcttgttaaacactttttatgttatgctaggctggtgttcatatatatttgaaataacatgaatggactttgttagaagtttaaacactcattaggaagttcttgttattatgtggttaactttttcttcgttgttcatttggtgttataccaatatctttataggtatttattacttagaggtttctatgtgtccttgtgtgctagaggaagaaaacgtatgctagtcagatctactagttcatgcctcagaagtcttgtgttttgggtgattgaattcttttgctggctttgttatctaccacaggctagcctcttgaagtgtcctgtctgagtgctttgttgtggacattagatttccagttcatttccttcagagaaaagcagtgctgtaattgatacaagtgtgagatagaagtagagacttaagttaatataaatgattttgatggcttaatttttggtagtaaacttttttcaagtaatgcagtatccctcagtgtcataatctgaaaaacaaactcattgcaaagtaagacatttgagagcagagatcccggggacatggttcttttctttcttgctctaggtactttaattatcggactacccggtttctggctgaggaggggttttataaattccataactggtttgatgaccgggcttggtaccctttgggccgaatcattggaggaacaatttacccaggtgagggggacaggatttgttgtgtttgtaaggatggtgtggtgtttgtatgctgtgaaacagctctttctgtttgcttcaggaaacttgtaatttcattctgattatagatttccaaaagttgatcttatgaaggaaatgtgtgagatagtagagatggggggaggggaggatttcttacgcattctggatctctgaatccttaatagagaagtgtagacacttagtaaagttgctatgatagtatttctaatggttggtcaagacttggattgatgctttcttgttattttcttaccaggacaacctaatgggattactttttcctgtttcaggtttaatgatcacttctgctgcaatctaccatgtactccatttcttccatatcactattgacattcggaatgtctgtgttttcctggccccacttttctcctctttcaccaccatcgttacgtaccaccttaccaaagagctcaaggtaaagggtatgagtgacaggaagcttgggactgaatgttgttgaatctctagtagatgctggacgggtgggggaatccagaaccttaggaggacagggagttttgaggggacatgtgtacaaacatctacttacaccacagatagggaactcaatgacaaaccaaagtaaggatacctccaaagttcaacttggcgaactgattatttttattgggattaaagaaatatgggtgatgggttacttaaataaaagcaggaatgatttaaaaaatgccagacacatcaccaaaagtctaccccagtatgggtggcagctcacaaaagctggaatcccagagcttactgcatgactggcaagcagcttgacagattggagagtgtttcttccaagcagctcagtttgtctgggcctcttctaggcagcttggcaggtctgagcctcttctaggccactctgcttttctgagaatgtctctgagcagttcttactgtttatatacacttggggagccaggggcctagtgattctcatttgtttcctaaagcttttgagttgtttacttttggaatttaaggtagttaaattccaaaatgcctctctttaaaacagtggtttttaatctgtgggtcatgacccctttgcaaatctctgtctccaaaaatacttacattacaatttataacatagcaaaattacaggtatgaaatagcaacaagaaataattttatggtttggggtccgacaacatgaactctattaaagggctacagtattagggaaggttgagaaccactgttgtagaactttttctgtcttaaggagcttcccttcagtgtggctggttagatcttgaaggaagttggaaatttttacacactggggagccagaggctaaagacaaagtttgttgagttgaattagtggagaatatgtgctgtcttataatttgcaactgtttgaccttttaagatatttgaaactcagacataaattgttaagtaaagaaataaaaacagcagttaatatgtaaaattgtcatgtttagatttttaatccctcaccaatataaggaagaaggaaaaaaaacaacctatgtgttttccacagtggttatttctactggaaataggcgtttagcagttatttgttgatacattttaaaaagcattttgaaattctaaagcattttgtcttggtaatgctgattctcccttttcaggttccttgctaaccttgactctttggactctgttcttagtctgtggccttagttttagggaggtacctgagaagtgaccagctagcaggagggcttggggagccagggtcagtgtgcaagccttcatccttcagtgtgataatcagcaaacaagtagttttgcttatttacttacttatttctgagtatggttttattctgaccttacaggttgcctggttaccctccaactttatggtctaagctcctgacatctttagtctaggtagattctcactttttattgagttgtttggagataaggttttcatatggtgcccaggctagccacagaattgccatctttatgtctctgctttccaagagctggaattacatgtatttgctatcatgcctagttctttttttaacttaaataataactttatttctttgttttagnnnnnnnnnnnnnnnnnnnnnnnnnnnnnnnnnnnnnnnnnnnnnnnnnnnnnnnnnnnnnnnnnnnnnnnnnnnnnnnnnnnnnnnnnnnnnnnnnnnnnnnnnnnnnnnnnnnnnnnnnnnnnnnnnnnnnnnnnnnnnnnnnnnnnnnnnnnnnnnnnnnnnnnnnnnnnnnnnnnnnnnnnnnnnnnnnnnnnnnnnnnnnnnnnnnnnnnnnnnnnnnnnnnnnnnnnnnnnnnnnnnnnnnnnnnnnnnnnnnnnnnnnnnnnnnnnnnnnnnnnnnnnnnnnnnnnnnnnnnnnnnnnnnnnnnnnnnnnnnnnnnnnnnnnnnnnnnnnnnnnnnnnnnnnnnnnnnnnnnnnnnnnnnnnnnnnnnnnnnnnnnnnnnnnnnnnnnnnnnnnnnnnnnnnnnnnnnnnnnnnnnnnnnnnnnnnnncctgacatctttagtctaggtagattctcacttttttttttttttaaagatttatttatttattatatgtaagtacactgtagctgtcttcagatacaccagaagagggagtcagatctcgttacggatggttgtgagccaccatgtggttgctgggatttgaactctggaccttcggaagagcagtcgggtgctctaacccactgagccatctcaccagcccagattctcactttttattgagttgtttggagataaggttttcatatggtgcccaggctagccacagaattgccatctttatgtctctgctttccaagagctgggattacatgtatttgctatcatgcctagttctttttttaacttaaataataactttatttctttgttttagatttggcttttttttttttgtttgttttttttttttgtgatctatagtcactgttaggggattaataagcctgtagcaaagtaagccattctgctgcaaattctgtttttgtttttgttcttcttttagacagagtcttactgtgtacttctggctgacctcaaactcacctgcctctgcctctctgcctctctgcctctctgcctctctgcctctctgcctctctgcctctctgcctctctgcctctctctgcctctctctgcctctctctgcctctctctgcctctctctgcctctctctgcctctctgcccctctgcccctctctgcctctctctgcctctctgcctctctctgcctctctctgcctctctctgcctctctctgcctctctctgcctctctgcctctctctgcctctctctgcctctctctgcctctctctgcctctctctgtctctctctgcctctctgcctctctctgcctctctgcctcggttaaaggtgtctgtcatcagatccagtaggctctggttttgacagcttatgtaattgttggttttattttgaggcagggatgtagtccaagctaatcttttgtagccaaggatgactttgaatgtctagtctttacataatcttaccaactctcaaattctgggattataggcatatgccaccttgcttggtttatgtggttccagggatcaaagcagggcttcatatatgctaggcacatagacacactactagctgagctacatccctaattaccttccttttgtattttctgttttttgttagttttagaaagaatcatgctcttacttaggtttatcttttctttgcctatttctgctgagattacaggcctgttcgactataacagcagctcatatgatgtattagtctcagtgtgtttgtactcagtgttaggtttgatgtttttattcagaattgactttgaaggttttggctttgttgtgtgtgtgcatttctagcatctcttaacaaccttgggaataattgaatgctctcaatgtgctcctgattagacagagtagacttgtaggtcctcagttatcttagaggcatgtcagtattgacttctactcttccaggatgcaggagctgggcttcttgctgctgccatgattgctgtagttcctgggtatatttctcgatctgtagctggctcctatgataatgaaggtaagatttagaatgctgaaggagatgtgtttactttattatctactgaagtttcacaaggtgctgaatttaggtacatttctattgcttagcaataataaaactggaattggcgagcagattagaattgggcgggaagggatcttaggtaggtactctcctatcatctggtctagagaggtagctgggaactttaaaaacttaatatttattgcttatgtacctgcatgcaagtatatccatgcttttatgtacaggtcagaggatatttcgcagctttcagttcttttctatcatgcagttttcaaggattgactttaagtcattagatttggtatcaagtgcctttacagactgagcaatcctgtcagctctatctgggaacctcttttatttatttatttatttatttatttatttatttttaaagattttaaaattttatttatatgagtacactatagcagtccttagacacaccagaagagggcatcagatcgtgttacagatggttgtgagccaccatgtggttgctgggaattgaacttatgacctctggaagagtagtcagtgctcttaactactaagccatctctccaaccctagctaggaacttcttaacaagcctttgtttcctctctgaactcacatttaattgttttaacattaagatcattgttcttattttcttagtgtatcttaaaattaacagtaacttttattggcttatattcaatgcaacatatatttgtttaaacacattcggaaacatgttagttattataaagaaaggtaatgaattagattattttgttctataattatgaaactaagagatagataatagctgttgtctcatagtctgttaaggaatataataatgggtttataaaaataactctagctgagtatggttgcatttacctataattctggcacttaagcaggaagatggggagttcaaggccatccttgactatatagtgagctcgaggcctgcctgggctgcataagacattgtttcagaaaataagaacaaattaaaaaaccccaaagctgaacctgatactacattcctgtaatcttggtattgaaagtgaaaagggaagatactgagttcaagtccagtctgggcttcatagtgagttttagtctagctttttctacatagtgaattttagaccatccggggctgcctagcacaaaacccttattttattttatttttttttaaagctctctaacactctactttgatgatgtctagagaagagaaattaatttgatttttggtgtcaaaggaaagctttttgaaaatggttaaaattgatctgggccaaatgtgggaatccatgagacaatttttttccaggggcagggagtgtgagtggtggtagagctgtggactgaatctagggctttaggaatgctagataagtaagtgttctgctttggagccaggtcacccaccagtcaactgtgaagtttgcagcatcagaacaaaaggtttatctttattaacatatattagtggtgctgtaacctcccatatacttatgactagctagatttactgcccacaaataaaacagtgttatggccaatatataccagttgctttctatattttaagtattattctaggtgctttgtgtgctgcgttttctttacaatgacttcaataaataggtatttactgaaaactccttgggctgcaggtgcagcttggtgggtgagcatttgcctagcatgcatgaggccctgtgtttaatccccagcacttgggggataaaattatactcaagaccccttcttacaggaagcagaggcaaagggaagtaaaatagtttgcccaaaatcatacgtgtgctgaatagtagtttagaaacttgaatctaaatagtgtgctccagaattgtcttctttttttgaaggtttattacctttttgattatatgtatgtaagtgcaagtgcctgaagaggacagaggaggggcttaaatcacctggaactgcagttacagatggttgtgagccagcagatgtgggtgctgggaaccaaatttgggttttctgaaacagcagtatttgttcttaaccattgagccattcctaggtgtgttttcttagctattcctaagtagtttttttttttttcctcccccacggttgtgggtatgttgagatagggtttctctatgtaattctggctgtcctgaatcttactctgtagaccaggcaaaccggaaattcagagatctacccgcctctgccttctatgtattaggattaaaggcccagtttctaaacaagtattgttaacattgtgttagtatgggttttgaatctctgttgtcttctgcaggaattgctatcttttgcatgctgcttacttactacatgtggatcaaggcagtgaagactggttccatctattgggctgccaagtgtgccctcgcttatttctacatggtaactttgtgtgtgtgtgtgtgtgtgtgtgtgtgtatgtacgtatgtatgcatatacatgtctctttgtccttttcttttttctggtgcaaggatttgatttatcactgttacatctccagcttgtctacnnnnnnnnnnnnnnnnnnnnnnnnnnnnnnnnnnnnnnnnnnnnnnnnnnnnnnnnnnnnnnnnnnnnnnncaaactcagaaatccacctgcctctgcctcccaagtgctgggattaaaggcatggcccactactgtccggctaagtttttcttttttttttaaagatttatttatttgatacatatgatgagtacctttgtagctgtcttcatacataccagaagagggtgtcagatcacattgcagatggttgtgacccaccatgtggttgctgggaattgaactcagtacctttggaagagcagtcagtactcttaatcactgagccatctctccagccccatattttcaattttaaaattttcttttttcacctagttctctttgatatggggtcttatgtatccttggttgttctctcctctgctgaggatgacctgatcctcctgcctctacttcttgagagctgggattgcagatgtgtaccataatctatgcttggcaagctctctactaacctagctacatcttagccctctgttttttttttttttagtctgctaataaaaattttcaaattctgtattactgtacttcctatgggtatatgttggttttctcatatttttgttatattttccttaaaatttctctttcctaatacatattttgtataattttacatctgtctcttgactttctttatatctctgcttctccttagattttgtgtgtgacataattagtttcgtctatatttacactgtagcttggtatatacagttgaacatgttgtgagtggtgctcaaagggactgttctatcctcacaggtctcttcatggggaggctatgtgttcctgatcaacttgattcctctacatgtcctggtgctaatgctgacaggccgtttttctcaccggatctacgtagcctactgtactgtttactgcctgggcaccattctttctatgcagatttcctttgttggtttccaggtaaacctgagactttgtagaattttctgcagccaaatgtttctgagtagcttcttagaatggcttctcttaaaaacatgaattacagtttgtatttgaggctgtttttaactgaaacagcagaatcattggttattagaatctgcttctaatagcatgtcagtatttgctgtatgctctttgaatttagtggctctttggcttgagattgtgtgaggaggaggaggaggaggaggagagcctgtttagttaaacaaggttgactttaataatcaaagtttaaatttcaaaaaaaggttaaaattccagcccttttagtggaaaagatcccatttagtagcagtgagctctgatcatcttaatggggccagtgtgagctcttgaaacagtaaagcttcgaggctagcctgatctacagactgagttccaggacagccagggctatgcagagaaaccctgtctcggataaaagaaaaagaagaagtaaagcacaaaccttttacccaagttccaacatacagttaacaggacactgtgtgtgtttggtttcttgtgtatagttctcatctttaaagataagtacttttagtcaattaatttataaagtttgctatttggtggaatgtgtaagagatgtaatatgctaatccttgaggaagctggagaaatacatacagctgtttgtggtctacacagttcacagttcagtagttacagaaggctgtttccagagcatcagcgctattagtgtctgggacttgttagaaatgcgaagtctgtagaggtaggaggattaggaattcagggccatcctggaatacctgaaaccttgtctcaacaaacaatagaacgaacacatcaagatcccaggccaaaccaaactaagtgaaacataaaagagacctgttgaatgagaaactctagggtggggcttagcagcctgctttaacattggttaaaacagtgcttagcccattggttatgatgcccactagatttagagaaccattgtgtatggaaaagagtaatttatatactaaagagatctagtgctgtgaaacataggagtcattgatttgtcaggtttggaaatgataattatgttgaattttaaatggtcagttttagtgaaagggaatttggggaaaatgccagtctacactaaggaaagagcctaagcagacggcataggtgtgattgtgatggtgtatatgcttcgttggcctccaaacattccttggaaaatatactcgataaattaaacccctttaatattggtcctcattcactttggaactttagaactcaattgactccttgagctaaatggatcaggaaaatgccaatcttggatgaactcattctgggttttttgttttgctttattttgttgttttgctcctaatattgccatctatgatcacctacctttcccccagcccgtcctttcatcagaacacatggcagcctttggagtgtttggtctctgtcagatccatgctttcgtagattacctgcgcagcaagttgaatccacagcaattcgaagttcttttccggagtgttatctccctggttggctttgtcctcctcactgtgggagctctcctcatgctaacaggtagaggattcttttattttactttttatttcaagctataaagttctacttaaaattaactaatttagttttatgtgtatgagtgttttgccttcatgaatgcctgtgtaccacatgtgtgcctggtccctgaggaggccagaagagggcttcagatttcctggaactggatttgggtcagtagtgagccaccatgtcttctgcaagaccaggaagtgctcagtccggtttttttggattctggagagctgctaaaagggctgtgtagccttgccagtcttttctcagtttctgtcctattggttaacttagagaaatttgtacaccctttctcatattttaaatcatggcactggtctcattctatggaaactaaatcctgatggtctcagtcagggtttctattcctgcacaaacatcatgaccaagaagcaagttggggaggaaagggtttattcggcttacacttccatactgctgttcatcaccaaaggaagtcaggactggaactcaagcaggttaggaagcaggagctgatgcagaggccatggaggaatgttccttactggcttgcttcccctggctttctcagcttgctttcttatagaacccaggactaccagcccagagatggtaccacccataatgccccccatcccccttaactaattgagaaaatgccttacagctggatctcatggaggcatttcctcaagggaggctcctttctctgtgataactccagcttgtgtcaagttgagacacaaatccagccagtacacatggctatatagtttagatgatattctcttttttttatttacttatatttttcagaagctaatttggtatttctaattcatagcaggatgaaggacttagttcacttagattcaggagttggccttgattggttgatttgagcaaatcaaatctaagatcttcctttccagtaggcttctttgacgccccccactcccaaccctgtgaatttatatatagcctaattattgcactgacaaaaatactccgaatttaaaaagaaaaggagtgaaattctgtaaattctgaaattactgtagtaaagcagaacagccctttcccgcctcagaattttactgaaatgtaatgctgtgggctggtgacatggctcagtggatagaagtgctttttgtacaaccctgcactcctgggatgaaatgggtagctaaaatagttcagccacccagaagcttggaggtaaactagtctggaatataaagcatggcagaaacaatcagggaactcctgcttcagacatggcggatggcaagaactggttcccacaagtgtcttcttactgcaacacttctgcacacactcagacacattacacaggcacactaataataaacatgagatggaatgttagtaattagcattttagcttagtgttttagggatatatgttaaatattgtctttttttttctttcaggaaaaatttctccctggacagggcgtttctactctctgctggatccctcttatgctaagaataacattcccattattgcatctgtttctgagcaccagcccacaacctggtcttcctactattttgatctacagctccttgtcttcatgtttccaggtctgtcttgcattttgaagtgaccataagaattagtctttgaatccaaatatattaactattctcttcattttttatatatttttacataattttattacaatactacaatatattttgtatttgtattataaaaatattacaatattataaaatactacaataattttattatatatttacaaatgtttttatttacatgtatggatatgtgcacatgtgtacagttctctgcagaaatcagaagagggtattggatgccctgcaggttaggggcagctgtgagccatcccatgtgggtacttattatacctaatactcagtaacatatttttcacccaactcagttttcttcttggcttgttgaagttctatgttgagtttttgtagttaaagcaatttgttattataaaaacagtgagataagttaaaaaacacaaacaagcaaatttacactagatctgactacttgttctaccactgttaacattttaaattagatatagtgctgaatgtttttcattttagcactgggactcctgaggcaggaggattgtgagtttgagtttgccctgggctacatagtgaaacattctcaaaaagccataccaaaaaaatctcattgtcaatattagttaattttgagacaggctcttactgtttattccttgctaacctggaacttgctacatatggcaggcttgcttcaaacttacagagatctgcctgcctctatcttccttgcaagtgctgggattaaaggctttggatcagatttttttcatgtattcacatgtgtaaagatgtggaaaaggacaaaggtcttataacttcttgtagcagcatttttttaaaagatttatttattatttatttttatatgtaagtacactgtaactatcttcagacacaccaggagagggcgtcagatgtcattaagccaccatgtggttgctgggatttgaactcaggacatttaggacagctgtcagtgctcttaaccctgagccatctctccagcccgtagcagcatcataatatatttcatacttaatatatggtataattaaccatctcttctgctaggcataagattatttgtgttcatttggtttgtaaaaatattatagtaaacatctttgcatattttttctgacagattcctagaattacttactgaggtaaatgtgtgaagtcatcctgccataatgaagatattttcccttgtagatgtctgtttacagggctcagctacttacttttctttccctcttttgtagttggcctctattactgctttagcaacctgtctgatgctcggatttttatcatcatgtatggtgtgaccagcatgtacttttcagctgtaatggtgaggaattcactcagttttagcaaaactttatccctgacttgggggtcttttcttttccttttgtctggctgaactagaaaaaaaaatattgaagattatgcaaagctccttacagttgttaacccttttttggaatgcaaagagactcatattctgtttgtggcgactaattttcttgggctcataatcttgtgttaggtacttcattgaatttggagcagattaaagaaagacatttgcatggaactgctgttacaggcagtagtgagccacctgatgtggatgctgcacaccagactcaggctgttccccagaagagtgggaagagtaagcactaagcctctggggtggactttagtatcttaaagccttgagtatattttctcctgctttgttgttaaggcagagaagattttatgtaacgttatgatatatcttatctacttcagaatagttttttatttttatgtgtattagtgttttgtcttagtgtgtgtctgtgtactgtgtgcatatttggcaccttttgaggtcagaagaggttgttggatcccctggatgatctgagttattgacagatatgagctgccatgtgggttctaggaattgaacccaggtcctctagaagggtagtgcttctaagcactgggccatctctccagccttttctttttgtttataaatatatatttaaaggttataaacaacagtaaaaatgtattttagctgaggttggtggtatagacttgtggtcccaacacgtgggaagttgaatcatatgttcaaggatggtctaggaaatgtagaaactctctatcttgaaaaacaaaatgcacaaagataagttgtttttttttgttttttgtttttttttttgtttttttttgtttttttcgagacaggatttctctgtgtagccctggctgtcctggaactcactttgtagaccaggctggcctcgaactcagaaatccgcctgcctctgcctcccgagtgctgggattaaaggcgtgcgccaccacgcccggagcagtcagtcttcttaaccactgacccttctctccagcccccagaaataagtttataaaaaaagtaaaattttaattatatattatataatatatgcatatatattatatataaaaatatataagtaagtttgtaaaaagttatattatttaaaacataagtatatatacatttagatctgcagtagagattgctatttatatttatggttttgaggcaaagtatttttacccgagttttttttctttttaagatttatttattttcatttatatgagtacactgtagctgttttcaaatacacaccagaagagggcatcggatccccattacagatggctgtgaaccaccatgtagttgctgggagttgaactcaggacctctggaagagcagtcagtgctcttaaccgctgagctctctccagccctttccaccaagttctaattatcgttgtatatgtgtgtgtctgtgtgtgagtatgtgcattttagtaaaggagccctgggagccacaagcaggctctggtgagctgccgcttgtgtgctgggaactaaattcagtagatgatcctaaaccattgagtcatcttttcagctccaaaggttatcatttattatgtttatttatatgcatgtttatgtgcttgtgtgtatgctacatgctagcaggtgcttccagagttcagaagagagcatggctattgggaactggactccagtcctctggaaaagcaacacatgctcttactgctgagtcatcctccaacccttgcttagacttttttttttaactataatgatgtacatgtgtccagaagaggatgatagatcctcaagctggagtcctaggcatttatgagctgcctaactttgaagaatttagatctggaaaagcagtatgtgctcagagtcactgagctaattctctagccttggcattgaattttctttctctttttttctggttttgcttgtttgtttgcgacagggtttctctgtagccctgtctgtccttgaactcattctgtagaccaggctgcccctgaattcagagatgcacctgtctctgactcctgagtgctgggattaaaggcatgtaccaccaatgcctagcctttcttaacatcttgattgctggaattacaggcttgcactgcaacagagtttaaaaagtacatacttctctcatgctatagctatatcatatagtttctattccactttttctggaatagagtgttggaaattgctaagttgacatcatagtctactaaaagattgaagtttgtcatttgtgaaacactgattatactgatattattcttgttctttttaggtgcgtctaatgctggtattggcacctgttatgtgcattctttctggcattggtgtttcccaggtgctgtccacatatatgaaaaatctggacataagtcgcccagacaagaagagcaagaagcaacaggattctacttaccctattaagaatgaggtgaggggctggagtgattgctcagtgcttaaaggcagtgactgctcttctagaggtcctgagttcgattcctggcaaccacctgtggctcacaaccatctataatgggatctgatgccttcttctggtgtgtctgaggacagctacagtgtactcatataaaaaaaaaatcttataaaacaaaagaatgaagtgaggtttaagtaacatgttgccttggaaaaaatgtgtgtgcatgcatgcatgtgtgcgtgtgtgtgaatgtgtgttatttgcttatgttcaagatcaatgtcttgagtggttagaattaatttatgcagcctaacatattttgttctcacataagaagccgtgtgtgttggcttactgtacagttcttctttctataggtggcgagtgggatgatactggtcatggctttttttctcatcacctacacgtttcattcgacttgggtgaccagtgaagcctattcttctccctccattgtactgtctgctcgtggtggggatggcagtaggatcatttttgatgacttccgagaagcgtattattggctccgtcacaatactccagaggtaaaaatttgggaggagttgggtacttggatagtggtgaagacacttgaaattgtagtaaatctcacaacttttacatggatgggaagcttagaaaaactaaatattcagaaacttcggttttttttttttttttttgagacagggtttctctgtgtagccctggctgtcctggaactcactctgtagaccaggctggcctcgaactcagaaatcctcctgcctctgcctcccaggtgctgggattaaaggcatgtaccaccactgcctggctagaaacttagtttttaataagttttaaagaccaagtgtcttctagagtagtggttcatgggtcatagcctctttggtaaacctgcgtttctgaaaatatttacattacgtttcataacagcaaagttacagctatgaagtagccatgaaaataattttatggttgggggtcacaacaacataaggagctgtattaaacggttatagcattaggaaggttgagaacactgggttagagtaacttaaattctatattctgcttggacacatgtgttgatatgatagtggttttaatataaggcagattaacccagttacaacagaagaaaatgttttatgtctgctatagaaaaagcagacgctagaatagacagttaccacttaataataatggcatataacagtttagtttatgtctctagaggatctgatttcttttgtagtagcttttgagaatagcatttcagagtcagatttgcttaacatctaaaccaagaatgtttttttaaagtagtgttggggtttgaacctagagccttagcatatgctaggcacacagtctaccactgaactgttcacctttagtccttgccatcatagttgtgatttgtgttttcctttctaccactgcattgtagtaactgattttataatgtaattaagagtcatttaaattacctaatgacaaactaggattgttggcacatgtattttatcccagcattgaggatgcagaggcaagtgaacctcttagtttgaggccagtctgagaccaggtttgagaccttgtcttgaaagatagacatttaaagtacctaatgactctaaccttatttatttagttatacttcatagtcttccctacatctcttgatgcactgttctttttcaatgatctggaattaagatatttgggagtgttggattatgtataatttaaattatttcctgactatatataaatggaggagtagatgccccaagtttcttttctttttctttctttcttttttttttgtttttgttttttttttttttgtttttttcaagacaaggtttctctgtgtagccctggctgtcctggaactcactctgtagaccaggctggcctcagaaatctccctgcctctgcctcccaagtattaggatcaaaggtgtgcgccaccactgcctggctcaattctattttcttgttaggcatacattactttgtaaaggaattgattaattgggcaagtcttacttgctattgatgatgcctttccactcttccttagcatttggatttaagagcagtgagataaacatctattttcatcttgttttaggatgcaaaagtcatgtcatggtgggattatggctaccaaattactgcaatggcaaatcggacaattttagtggacaataacacatggaataatacccatatttctcgagtagggcaggtaaggtaaaggggtcctttaagtgtctgtctgacatgtgaagtctctgggaagtgtgtcgctacgagaggaggttgacttgagatttttttttttttgagaattatacatttacttttctaggcaatggcatccacagaagaaaaagcctatgaaatcatgagggagcttgatgtcagctatgtgcttgtcatttttggaggccttactgggtattcttcggatggtaatgtacttgatactgtatctagctgcagggcatagattctttgaaaatttagtgaatcagttattgttttacttatttatatttgattttgacagagtctcatgtgactcaggcaggtcttgaatttgctgtattcataaggataaccttgaactatgagtctttctgcttctacctctggtgctggagctacaggcatacaccatttgtctgtattttctctctttttaaagaaaaagttaggtgtgtgtatgtgtgtatatatgtatacaaaggaaaagtaactttcacaaaactgaagttaataatatctgtttttggttttgcttttaaagttaaacaattctggaggtttaaagtaagtggttgtctcatggccctcaacttaaataagcacccttaacatcagtctccagaagcagtaattcctgtcttcagtttcttaggtttttactttttgtgctaggcattgattcctggagcttacatgtgctaggcaagcacttcaccactaagctatactttcaaatctttatattttaaattcctgctattctggggttgattagttttaattgtactatatcaatgtctctttaaaaggttgttttacttcatttattttgtgtgtgtttggggatgcatgtatgccgtggatgtcagaagacaacttgtggaggttggtcctttacttccactgtgtgggtcatgaagcttggaagcaagcacatttacctgtaggccatctcactggccctctgtcatctccttacagttggtgaagtgttttacccctcacctcacatttctcctcttttctgtgtttttatgtagttaatctacaacttttaattaaatctaggtactttgaaattatgactgtaaatacttattgctcagtcaatcaatctgtggttactttccttcctatatcaaatattttcttttcctacagctagtgagtatgttgtatttctatgttaattttctttgaatgtgtggcttcttctacacaattacacaatttgccgctgcaaatccagttctatgcctgcttctgaaagatgcttctattttattttaaataagactatttcaaatgtatcttgtataaacaaaatgaaattgataatagcaggaatagcagacaattgccccagtactgtttggtagtaattactatatatatatatatatgtatgtgtgtgtgtgtgtgtgtgtgtgtgtgtgtgtgtgtgtgtgtgtgtatatgtgtatatatgtatatatatatgtatgtatatataattaagtactatataaatatatatttgtatgtctacatatctgcttatttgtgtgtgtgtatgatttgtgtgtgtgtgtgtgtgtatgtgtttagtaggatggttctataggatgtgatagtacacatctgtagtttccactcttagtgggcaggaaggtcactagtttgaatctactttgggctgtatagcaagatcttatctgttgaaaagaaccacaacatgtagtttcttggagtcttcttactaaccaatagtagtaaccactgtcaactgagtagaatatgttggatgttggaataaatgtgccattatttgtaacatattagaaaaattttatgaaatttaggaagtgagcattagtaatttagcatgaaaagaaatactgcttagagtcttagttagggtttctgttgctgnnnnnnnnnnnnnnnnnnnntgcgccgcccccccccccccccctaatcatcaggcaagaacaatgtaccacctgcttgcccatgggttaatctgatggggacattttctcagccaaggctgtttttattcaagtgattctagtttatgtcaagtttacaaaacaaaaacaaagcaagtgaccccagaacaaaactaaccaacacacttgtcaggaggtcttcattagagatttttttgtttgtttgtttgtttaattttattttgtatttgtctgcatgtgtgcaattgcaaaggttgacgtctttccagttaaacagtactggctggtatgtgagtctttagggatccaccagtctatccctagtattggaattataagtatgtgctaccatgcccagcttttataagggtactgaatttataagggtattgaattcaggtgctcatgtttttgtggcaagcactttactgactgatgccttaagattatcttttttaaaaagttctagacagggacttgctgtatagtgagtagtgaggatgggatggctgagtgtggtgatgcttgcctttaatcctagtgagagtcaggatagccaagattatatagagagactctgtctcaaaaacaaacatacaaacaacttacagagggagagacttgatctcactgtgtaaactgtctggtttcaaatgcactgtgttgaccagctgttctcaaattcgtagtgtttgaggcctttgcctcccaaatgctggtcttaagccatgcaccaccacacgcagttgttgcttaatattgtctagtctcttacatgtgagactgcatccatcaggtttagatccttttgaagttactccacccatttacttgatttttacggtttccgcactgcttgtgaaggtgctctgtagattatattgcttacagtaaaatgatttaacttaacttgcctttgagtgtttggtaacagcagtggtttttgtgtttaccacagtaaatagttatggcaaaacccaaggttgggaattaacaacttttgtttgcatttcaaataccctatctgtggttgatgaattttaaaacagtgttttgaaaaataaaccttaagatatactttgtttactgctttatcatgtccagagcttaactgaaactatctttctgtttactctgaattaatacaaacaagctaggcactgttgtgcttacctgggatcccagcatttgggaatagaagcaagaagatcaggagttcaaggtctgccttgaacaagacacagagtttaagatcagcctgggctatataataagactgtctttaaaaaaaggcaaacaaattattacatgtataacaaaaagtattctccattaagcatactgatacattgttatatttatttatgtgttaatttgtgtgatttgtgtggggatgcatgtgccataccatacatatggccatctaaggacaactttgtagcatccattttgcttttttaaaaaaaatttggttattttgtttatttacatttcaaatgttgtcctccttcccagtttcctctcatcaaatcccctatcccatcccccctcccctttgcctctatgagggtgcccccccacccacccacctattccttcctcaccactctagcattcccctttacattggggtatcaagcctccacaggaccaagggcctcctctcccactgatgccagataaggccatcctctactatataaggagctggagccattggtccctccatgtgtactctttgcttggtggtttagtccctgagagctctgtggaggggtggtggtggtggtttgtccagttagttggtattgttgtctttctgtggggttgcaatccccttcagctccttcagtccttcccctaactcatttgagtcctcgagctcagtccgatatttggctgtatctgcatgtgcattggtcaggtgctggcagagtctctcagaggacatctctaccaggctcttgtcagcaagcgcttcttggccgagtttggtgtctgcatgtgggatggatccctaggtggggcagactctggatggcctttccttcatactctgctacatctttttgtttctgcatttcctttagttaggaacaattctgtattaaaagttttgagataggtgggtgatgccatccctcaactgggggccatgcctatctattggagatggtctctatagattctatccctgctttgttgggaattttgtctaatgttatctctgtcgggtcctggtaacctcttgcttccctggcatctgggactttctagtgcccccccccccgttccccatccaccactgctacatatttctgttcaattttctgaccctctgtactcatctcctatctcttgccacatctgatgctgcccctccctttttttccctccccctcctctctccctcccagctccttcctccttctacctcctatgattattttgttcctccctctatgctggactgaagcatctacattttggtcttctttcttattaagcttcatatggtctgtgggttgtatcattgatattctgagcttttgggctaatatctacttatcagtgagaatatatcatatgtgttttttgtgtgtgagttacctcactcaggatgatacttttctagttccaaccatttgcctaagaatttcatgaagtcattgtttttaatagctgagaactactccattgtgtaaatgtaccacattttctgtatccattcttctgttgagggacgtctggctgttataaatatgactgctatgaaaagagtggagcatgtatccttgctatgtgttgggacatgttttgggtgtatgtagcatccactttctctttccacctttacataggttatagagcttgaactcaagtttccggctttcacagcgagctccttacctccccactaagccccttcccccaggccgtctcactagcttacattactgttctttagaaatcatttggggggttgaggagatggcttaggagataagaatatttgcttcaagtgtgaagacctgagttcaaatcctcagaaaccaacgaaaaagcctgggtcgctcattactcactcatgactttcgctggcatatctccaagttcagtgacaccctctctcaaggtagtacggcagaagggatagagtaggacatcagtattgttttacacacacttgtattttatttatttatgaaatgaaaagttttatttcttcttggctacatcttattgtgtttttagtgttcttaatcgcgtacccaccccacaacaacaacaacaaaggatctcactatgtatggatacatacatagtggcctggaacttactatgtagactagactagccttaaacttaacagagattcttctgcctctgtttcccaagtgctaggtttaaaggtgtgcaccactgtacttggcttccagtttaactttttattgaatgcttatgaaggcttagaataaaatattatagtacagatgcatttatataaaagcttgaagctatgtagcctaggcttgtcttgaatgcagaaaactcttctcttagctttccagtgctgggattatagacagtcaccactgtgcctagtttccaccttgtattatattcttacagcacttctaaattggtaagaatcatacttcaagtgcttatttaagtaaatgtggctactggctacttcttgcagtaccttagccctatgtaatttgtaggaatactttcagtgtggcttaagactggaccagtaatagcatacaatttcatcgattaacaatttctaataaaagttttatatttttaggaagtgttttgctagcacactatcctgtctttacagttgaatgatagcattccttattaggaaaatacgatggaaatttctttagaaatagtgatattttcagtgagttcctgagaaccggcagcctttctcatgcagcagtgcattcatttttttctctagatatcaacaagtttctttggatggtccggattggaggaagcacagagacaggaagacacattaaggagaatgactactatactcctactggggaattccgtgttgatcgtgagggttctccggtgctgctcaactgccttatgtacaaaatgtgttactaccgctttgggcaggtctacacagaagccagtgagtgtgattcataatgctaacagcaatagtaatagctgacacattctgtgttttccatgctctgtgcttagtattttaactcatttagtcctcacagcaacccagaagataatttaaactaatgttaatgtcatttttatatttgaagaagttgagcccacaggttactgaactcttgctaataattatgtgataattaggattcaaactcagtctgcctttaagttctgtgctttaaaacattatcttttattttgtgtatatcaacaaagaatatctcagtgtgagaaagaataaaagaaaagagtgctttttcactatttagataagtacattgagaaggatttggtcaggttaaatcctgtctttcagatttttttcttttttctttttttttttttctttttggtttttttcgagacagggtttctctgtatagccctggctggatgtcctgggactcactttgtagaccaggcctcgaactcagaaatccacctgcctctgcctcccaagggctgggattaaaggcatgcaccaccaccgcccagctagttttgtttcttcatcagggaaaacttttgcagtatatacaagtcgtggacttgtggtccatggaagggttactagtgctagatactttggataacagtcctcaggagtagagtgccttaaaagtcatcttgtagatttagaagacagacgctacatggaccctgccaagcatcacattggacaggactcaagtagggtagctcttgatttgccctttctatctgatgctcttccttacagactctagtcaaagtgcaggctgggaaatagtgcagtcaaagtgcagtcagtgcagtagatgatatgcagctccatctctttaggaatcaacttgtataatagatgttttctctcgttgcttttagagcgtccaccaggctttgaccgtgttcgaaatgctgagattggtaataaagactttgagcttgatgtcctggaggaagcgtataccacagaacactggctagtcaggatatacaaggtgaggagatgctgcaggtctcagaagttgctcttgtacttatagatttgtttgttctagtaatcagtttcccaaatagggacatttttaataaatggcacctggtttcaaagtagcttgtaagtcacttgaagtgttagttatttatttgagtgtgtgtgtgttttcaactttgtggagttgattctctttagttttgtatcggttcatcagacctgtatggcactttatctgctaaaccatctgaccagaccaaaatactactaattatattttttgattattcttagagaggagacatcccagttggtgattgttatggcaacatttctttttctttaaaaaaacattttttactacatttttatatgggcgggggagaggcatctttatatggggaggtgggtacgccatgtattgaggtcagagtacagcttgtaccgatcaattctttcattgtgatggatcctggagatcaaaatcaactgcccttactcactgaactgtcttgccagactagctagtccttttctttttagttttagggataaagtctcaggctgacatccagtttggcattaaaattactgtgtagcccaggttgactttctttatagccttaggtatggtagcattacagatgtggccactgtacttgttgtagcaatactgttccaggtagggattggaatagcttggggattaggggaaatgcatgtgtttctgtttttaaattacttttttaaaaaaacagcattaaaaaaaatttatttattttatgtatatgagtacactgtagctatcttcagacacaccagaagaaggcatcagatcccattacagatggttgtgagccaccatgtggttgctaggaattggaactcaggacctctggaagggcagtcagtgctcttaagccccaaactatgagtcatctcttcagccccaaactatgttttctttttgctgaatttatgatacataattatatgatgtcatgtaagagtgtgttacatctcttatatgagaaatgattgaaccacatatctagagaagcagaggcaggggaattgagtatgaggtcagcctaggctacatagtaaagccctatctcaaataataggaaaaaaaaaaaaccgaatgattgaagtcttttggtcaatgtcaaagttagtctatactggttcttagaggtactctaaaaggctagattgacagtaggtaggctttatctcatgctaatttattcacatgccaaacatgtgtaatcctttctgcttacagtggaacttgtagatctttccaagttgacctttcggtaaatactgaagttatgtctttatgttgcaggtaaaggacctggataatcgaggcttgtcaaggacataaacgtcacattgtgccctgagcattatgcttcgcactgagcgcgtcatgttgaggacgctgaagatgttttttatatgcagtttataagaacagccggatggggttagaattgtctgcaagttttgccctggacaatatgggctgggccaagtgaaatgatttttataattctgagcaggttaccaaatgaaatgttatggctttactttggtcaattaaaaggggggggggattttttttaaatgtgccttatttgttttgacttaaattggctgatacgaggatcacagaagtgagcggatggaagaccatatccatgctctaggtccccaaatgaaccagataggagcatttttttctcctatcagcaatctcaaggactagctctggttcaacaaatgtaaacaacaactttgtcacacttttttgttttttagcacccaggtacaatgctttccttataatgggtgcttaataaatttttatcaaatgaataaatgtttctgggaccagaggagtgctgtttctgggcaagaaagacagctttcttgctgttatgtctatgttctcgatgtctatttctttagaagctctttggctttataaggacagaaagttgctgagtattcctgatctcaccagtatcctttcaaactaatggcagttattctttttctaagtagaaatgtgaagcaaaagtgactaatccagtagttcttaagatcagtgaaacatcaatcctagaggaagacactcctccaacatcaggttgatgatcagtagatgtttctggaatcagatgtcattatgtggacctacatgaagtttaggcattcaatacttcactaaacctaaaacatagtaaatggctctttgctcattttctctagactgcactaaatctcttagggttatccaccgtgagcttctgtttttcttaatgtcagtctgctgtgttcatataccactttgaggcttgattacttggttttgaatcccttgctaaatatatacataggaagtgggaagtattgctactagcaggtactttgatatcattgccagtctgactgcaagaaaagagacttcaaaaactacaaagcacagagatcccatagatattttgtgtcaggataaatagctttctgttctgtataataggatatttcatgtaatttacaacatagggcataatcactgatgtatataaaccatcttaaattaattatagtgtttctatttaagaaaacaggaggaattatatgacttttagatagtcacagtggtactcaatgcatatgtgcttaggtgtacttgtatacctaagggcttttccttcaaaccggtgtatgtactgtgtattttaactgtgggtgaaattttagatttaacagatgatttgatatcctatatgtaaatacattatttgatttatatacagaactactgcctagtgggaaaggttaacctgagacttatcaatatgattaacattacaggttattagtaagctttctctatagtataaatgggatacccccttttcatatcattttgactcctgggatcttgatattttctagtctacaaagatttttaagttgatttcattttcagttgtagtcttcttagtgtaaaaaaaaaataaatccacctcaaaagcaacaataaaatttcacacacatgcccacccacacacccagccagcactcgccagagactcttgcttccaggtctggtgaacctcgcactgtgcctcctgcctgatcattagtaacttgctttgttatgttttggtgttttagtttgaggtaacattgatttcttttttctttctttcttttttttttttttttttttaaccagtggctttcaacattgtgcgtcatgttctctttggcaaaccattatctcccaaagtatttacattgcaattcataacagcaaaatcttagctatgaggtcacagtgaaaatacttttatggctgggatgtcaccacaagatgatgagctgtattaaagagtagcagccttaggaaggttgagaaccactgccctatgttttgtgacaccatttttactatcatctgttactgttctaattacttttttttttttttaaagactgttccatgtagctcaggccagctttgaactcaagatacagatgatgctagctttgaactcttgatcttcctgcctctacctcccagttgtgggctactacagctagttaggtactatttttcctatatattttaaaggaaatactttaattttttggtacttgttatctttcctgcttccttaccaccccagctagttctccctcatttgtgcccattttctcatactgtgatcaaacctattcgttaaacaactttgggtgttttgagacagtatcttttatagctagggctggctttgaattcctgattctcctctctctatttgccaaatgctggtattaagatgtatgccaccatacttagttacattgggtttttcagaatgtctttgatttttcagcttgaaataactcttcaggtttgttgaattatattattttactgttgtatttgttgatctttgccattttcattgatttgccatgtcttagtatcttcttatatgtaggggaaatacatttctggagctcttctctatcatactcaatgcatagctgggtatagcattccagactggcgctctttacattataaaggcactggcccactgttctaatgttgagaaatggcagttattttgatgagtatttgtctattctttgccccagatcttttttgcatcttttttgtgggtgttcactgtcctgggtactctggattttcatgtgtgcatagtcaaatttttctgtttttttttttttttttttcaaacagttatatatggattcctccaattctctgataaggctaattaaaacgttcatattttaggcaacatggtatgacacttgaaatatttaaatttttgtgtttgggtgttttaccacatatatgtgtatcatgtgcattcctagtacccatagaatccagaggaagacatcagattcctggcactggagttatcgacagttgtgagttgccatgcaagtgctcggaattgaaccctttgtaagaacagccattggttttaactgttgaattaactccccagtccatgatgaagttatttgagtgtggggctttctgagtcagttttctaatagtttcttagttgctcttctttattctacctttttggagatttcctcagctgtatttgtggtcttgctcttgttttcccctccctccctccctccctccctccttccttccttctttcttcctnnnnnnnnnnnnnnnnnnnnnnnnnnnnnnnnnnnnnnnnnnnnnnnnnnnnnnnnnnnnnnnnnnnnnnnnnnnnnnnnccctccctccctccctccctctctttttcctcccttcctcttccctccctctccccttttgtatgttgtgcgtaggtttaagcccagggccctgtgcatgctaggtaagcactcttaacagtgagcaacatctcttaatttcaaccatatttaaaaaaaataacttttttcttttctgctttcatatttctaaagtcttaagcactcttgtttagagatctcttttgtcccattgttttgctgcctttccaattaaagacttttccaaattcttggctgactgcttttttcagactgggtggtctaaagtgttatggagaatgtgtgcatatgctttttaatgtactatgatcaggctgggctggcacactgagaagttgttgatattggtgttagatttcctttttcttccataatatgtgttaactttccttctttcttttgtacataagattcaggatttctgtccttttattcaaggatattggccaggctgttgcctttctaggttaaagtagaaaaggaaagcatattggttcaactctcagtacatacacttaaatttaaatgctattttcaggatagccacaccttttactatgtctactttatagtttagcaatcatttactatctcaaaccttactagtagctttggggaagagctcttccttggttatagagctcttccttggttatacaacaggaagtgtttagagatctctgcttcataggtagtcgtgtgactgccccattttgaccttcatattcagagttgcctggtgtcctcatttcaattctgggcttcccacgatgcatgtcaagtcactttcctgtactgtcattggtgtctttgggattaatcattattttgtgtttgttaccttttattttcagtaggctttcagttttcccaaaatttctcatactcagaaaggaatagagggtattgtttatgtggcccctccctcctttaaagtcagtctcatgtagcctaggttagattcaaatttagggtggctttgaattcctgatctttctccatctccctccaaagtgctgtgattacaggcaagtgttatgcctcgtttcactactattccttcctaactaattttagggagttttatcatgagtcctcctactccccacctctcttcactttcagttactcctctgtgtctgaacagttttcttttaatcgattcagacacattaggtgttttgagacagtatttaatttattccaggttatctttgagctttctatataaccaatgtgaacctgaactggtcttcctacattcacctccctgttgttggtataggtgtacacacaaacacataaacacacacacacacacacacacacacacacacacacacacatatacacactcttctccaagtcagaactctgatactgtgtcttttccaggaaataagacattgattccatttaagactagaggaacctagattccatttaagagcacttgggaggcagaggcaggtgaatttctgagttcgaggccagcctggtctacagagtgagttccaggacagccagggctacacagagaaaccctgtctcaaaaacccaaaaaaaaaaaaaaaaaaaaaaaaaaaaaaagactaaatcaacctcttgtagatttcagaatatacacaggaaatcacaaagaaatggaaataatctaatagcttgtttttaattacacgaaccctaaactgataacatggtttaagtttaaacatttccaggttagatttcatggagttggagatgtagctcagaggcaatgcacttgactagccagcacatggtttcattgtttccttattttttgtatccaagtcccttttcttagaattgacatttctctattatgagacttttgtatgcttggcaggcattctaccattatgccataagtctagcctagttaaggaatattgattgtgctccccaacccacctcctttttttttttagataagatcacacacactcacacacccttggctcaggctgaccaacctgaatcactttccctggctcaacctccctagactgaggttatagatgagtcaccattaagtctactttgctgtttgttttttcttgaaagcgagcatcttggttgggtatctcctgctttatctctatagtgtggtgggccaccgtgcttgtttaagaaagctagtacaggcaaatagtcgtgtgtccccccccccccccaaaaaaaaaaaaaagatttaactggttctggagcctcctgttcaggcaatattggtgactctcactgcactttcccctcacacatccgcggcgatgtggttttttttccccttcgttttttttttttttttttttggtaagactaaccctgtataactcggattgccttgaactcaagatcttcttgcttacgcttcccaagttctaggtctacaagcatgcaccaccacacttgctttccttcgttttttttttttttttttttcagaattccagcagcagttgctagcttctcaattcgaatactaaggggggcacaattgagtttacagagcactctgtgtcgcttagtttgagccttcctccctggggctccgaggtcaagagcaggtcggtttacgtacttaacggtgcagcctttgcaggctctgagtggcagggaacctgggttcttggcccaactggtggcgcagtctggatggaggcttcggtgcctctgtggagcaacgtaaggcgtggcacacgccccgtgccatttccatttcattcggactcagagatcagttctcaccaaagcagtcgtcaataccaaatctggtcagcttgtgtcttaactacggccacatcagaatttcagccagtattagaaggaagggtccttgcgcggtcggtctactgaagtcgctcctctgcagagcctgggataggacaacgcgcgccggcccgctttacggcagaggtgtgcgcttttgcgacagcatgacgcaagcaggttttggcgggaaaagctgtgcatttggattcctgtggcagctggcaaaggactgcttggtgagaagggcgtcctgaacagtgggaaagaactccagcaaaggacccagagggcttgtttagtgtggacgggcgcggggagggagtggtccagactagcagagaggtgggagggccgcccggagcccgggctggagcgggtggcccgtggctctccagcataaagggaccagagcgattgtaaggctccggggttcgcatgctttcccggctctaggggtccctgcctcccgcttctctccgcggcttggccccgccctgttccctcccggtgctggggacacgtgccgttggggtgggaattggaagtgagcgggtgggaggaggggctgctctggcagtaattaccgtagttacacccagctgctccccacccccgcaccctgacctgcccgcaactccctttcgggatcattcacccgaaagctcttgtcttgcaaccctggagccaagcaagtgctcagttttgcataaaggcggacggaggacaaacgtggaaacaggatttgtgataaacaggacaaaatgttcaagttcagtattatgacgtgggtaaatatggttcagatgtaagatgaaaagaaagtcgtgcagaatcatagcaggagacatggctcagtggcattacaggtgatgagagtttacactcatccccagtattttctgggatcctgcattttacagtcgctgtgcttggagtcatggcagtgccttttgtggaagactgggatttggtgcaaactttgggagaaggtgcctatggagagtaagtttgagtcctcattttaattttttattgcagtgtgtgtctgtctgtctgtctgtctgtctgtctgtcgtgtctgtcctgctatggtgcgtgcacctgtggaggtcagaagacaacttgcaggagctggttctgttgaaggtttggagggatcattaggcctgacagcaagaggcttaacctgcctggccattaccatggtcttcctaatttaaatattacctgtttgtttgctttagttttccacctgttgtctgagtacacactttaaaaaaagtcctttatttcaagtggcaaagagcatggatattcgcatttgtacatcaaggctctgagtgagtgaagcacatccacacctgttcctcctcttttgtgatggtagacattgaacctagtgcatcactcatgctgggcttatgctctgccatgagctacatttctaggcctgtaaaacaccaaatttcttcttacatttgtttttgttcagatcaaaatcttgttaaattgcctaggttggccttgaacttgtacactgtagcctcccaggtaggtatgacaagcctgtgcttgacggtccaatttcttttctttcttttttttttttaattttacttttataaaattttcttttataaaagaattgttttcctaacaaatcatgtgtcttagaattttaaatgagataatgaaaagaccctggcggcatcctgcctaatttcagatctccacactcagctgatcctggttgtatttgtgttctttttttttttttttggttttttgagacagggtttctctgtatagccctggctgtcctggagctcactttgtagaccaggctggcctcgaactcagaaatccgcctgcctctgtctcccgagtgctgggattaaaggcatgtgccaccacgcctggctgtatttgtgttcttgagcaagctttatgtgcctttgtttcttcatctgatgatagaattaatggttcttaccttaaagatgtgttcagtagttggctcaggcatatatgcatgagattaataagtgtaaagtaatgctgttgtattactagatcatgtgtatatgtgatgtattgtagacttgctattgtctttcaaagcatggtcagttattagataacttgcaagcacaaggtttccaagtttccaagactttcttggagcattaatggcaatgcttcacatttgtctcaatgcgtctgagaacatagcagaggccatttcattttccttgatgaagaaaggaagaatagtttggggtgtgttacatctaactttttgaagctttttttcttaagatttatgcatttttaaaatatggatgagtgtttgcccacagagggccagaagtgtgggattcccccagaactggaaattacaaatgattgtgagctaccatgtgggtgctggaaacggctgaggtctgaagcaagtgctcttacatgctgagccttctctccaggccccccctcaggtatccccacccctcagttttgtttgtagagagaataaatatctcattggcaccaaactccaagagctctgcttgcctctgcttctcagagacacctccacccgctgctagggttttgctttttttgttttttttctttgaaagtttctttgtagtctaggctgtgtttgaacttggacccttttgtctctagaatgctggaattacaggtgtgtatcagtaatcttttgaagagttaggagaaagggaattctgaggtgaaaatgttgtaactttttctctctttctttttaagagttcaacttgctgtgaatagaataactgaagaagctgttgcagtgaaaattgtagacatgaagcgggccatagactgtccagaaaatattaagaaagagatctgcatcaataaaatgttaagccacgagaatgtagtgaaattctatggccacaggagggaaggccatatccagtatctgtttctggagtactgtagtggaggagaactttttgatagaattggtatggaaaagatttaagataaatattttactgaacaccttcatacgttgtgtgtgctgctggacattaaacccaccatctttccacaggcccttcaactggtctactactcaaccatgttctcagctgtttctttggtttttagagaaaaggttcctctctgtaaccctggctgtcctggtactcactctgtagaccaggctgaccttgaactcagaaatccacctgcctttgcttcctgagtgctgggattaaagtgtgcaccaccaccacccaactctcttagctgcatttttaaatgttagctagatcaattttatttcagaattggttatgtaacaggaaaattggaggaagagtcaggcattcttgactttgtgatgtaaaagttttatgatttaagtctgtgatgtagtgaaattgtacatgacttccctgttggcagtcattgggaactatttaaaattatttatttattttatggctgttttgtattctgtgtaccatgtgcacacctggtgcctgtggaggcatgtctgatgctataagaggcttgaagagggtactggatcccctggagctgacaaattgttgtgactcatgtgcgtgctgagagccaaatcttggtcttatagaagtgcagccagtgctcttaacttttgagccatctttccagccctgaactttgtgttagaagaagtagggagacatttgaaggaaatgaagtccactggggttagtataagattaaaatacttttaaattactttcctatgatgttagcttatttttattatttagcatctagggagatgtgagttatttagtgatgtatttgttaatggacttaagtcttttgatagtatgcatttccgtttgcttaagtataaacatagtgagatatgaattaagagcctgtatggttgatgcctgattataatctttcaatagactataattgtttcttccagagccagacatagggatgcctgaacaagatgctcagaggttcttccaccaactcatggcaggggtggtaggtactacagcctctttccccttgcttaaaattagcatcaataatgtgagttgctaaattctactgttttgacctcccacttaggtttatcttcatggaattggaataactcacagggatattaaaccagaaaacctcctcttggatgaaaggggtaagattaatattttgttaattctatctgtctgtctatctattgcatgagtactgtgtctgtatgtacacctgcctctcagaagagcacatcagatctcagtttagagggttgtgaatcactatgtgattgctgggaactgaacttaaagatctctggaaaagctcttaactgctgagccatttcttcagcccttgttaatgttatattttaggttaatcatatagacctgtgtcttagttagggttttactgctgggaacagacatcatgaccaaggcaactcttataagggcaacatttaactgggggtggcttacaggttcagaggttcagtccattatcatcaaggaaggaacatggcagcatcctggtagccatgattcagg

SEQ ID NO: 92 - DNA, 3093 bp, Mus musculus
ctgtcagggttgagtgcgccgctgaacggatggcagggggagcagagtgggttcctgaggagcatccgtgaggtatttgaatatcatcagttgccacccattgatgtcaagatgactaagcttggatttttgcgattgtcctatgagaagcaggacacacttctaaagcttctcatcctgtcgatggctgctgtgttatctttttctactcgtctttttgctgtgctgagatttgaaagtgtcatccatgagtttgatccgtactttaattatcggactacccggtttctggctgaggaggggttttataaattccataactggtttgatgaccgggcttggtaccctttgggccgaatcattggaggaacaatttacccaggtttaatgatcacttctgctgcaatctaccatgtactccatttcttccatatcactattgacattcggaatgtctgtgttttcctggccccacttttctcctctttcaccaccatcgttacgtaccaccttaccaaagagctcaaggatgcaggagctgggcttcttgctgctgccatgattgctgtagttcctgggtatatttctcgatctgtagctggctcctatgataatgaaggaattgctatcttttgcatgctgcttacttactacatgtggatcaaggcagtgaagactggttccatctattgggctgccaagtgtgccctcgcttatttctacatggtctcttcatggggaggctatgtgttcctgatcaacttgattcctctacatgtcctggtgctaatgctgacaggccgtttttctcaccggatctacgtagcctactgtactgtttactgcctgggcaccattctttctatgcagatttcctttgttggtttccagcccgtcctttcatcagaacacatggcagcctttggagtgtttggtctctgtcagatccatgctttcgtagattacctgcgcagcaagttgaatccacagcaattcgaagttcttttccggagtgttatctccctggttggctttgtcctcctcactgtgggagctctcctcatgctaacaggaaaaatttctccctggacagggcgtttctactctctgctggatccctcttatgctaagaataacattcccattattgcatctgtttctgagcaccagcccacaacctggtcttcctactattttgatctacagctccttgtcttcatgtttccagttggcctctattactgctttagcaacctgtctgatgctcggatttttatcatcatgtatggtgtgaccagcatgtacttttcagctgtaatggtgcgtctaatgctggtattggcacctgttatgtgcattctttctggcattggtgtttcccaggtgctgtccacatatatgaaaaatctggacataagtcgcccagacaagaagagcaagaagcaacaggattctacttaccctattaagaatgaggtggcgagtgggatgatactggtcatggctttttttctcatcacctacacgtttcattcgacttgggtgaccagtgaagcctattcttctccctccattgtactgtctgctcgtggtggggatggcagtaggatcatttttgatgacttccgagaagcgtattattggctccgtcacaatactccagaggatgcaaaagtcatgtcatggtgggattatggctaccaaattactgcaatggcaaatcggacaattttagtggacaataacacatggaataatacccatatttctcgagtagggcaggcaatggcatccacagaagaaaaagcctatgaaatcatgagggagcttgatgtcagctatgtgcttgtcatttttggaggccttactgggtattcttcggatgatatcaacaagtttctttggatggtccggattggaggaagcacagagacaggaagacacattaaggagaatgactactatactcctactggggaattccgtgttgatcgtgagggttctccggtgctgctcaactgccttatgtacaaaatgtgttactaccgctttgggcaggtctacacagaagccaagcgtccaccaggctttgaccgtgttcgaaatgctgagattggtaataaagactttgagcttgatgtcctggaggaagcgtataccacagaacactggctagtcaggatatacaaggtaaaggacctggataatcgaggcttgtcaaggacataaacgtcacattgtgccctgagcattatgcttcgcactgagcgcgtcatgttgaggacgctgaagatgttttttatatgcagtttataagaacagccggatggggttagaattgtctgcaagttttgccctggacaatatgggctgggccaagtgaaatgatttttataattctgagcaggttaccaaatgaaatgttatggctttactttggtcaattaaaaggggggggggattttttttaaatgtgccttatttgttttgacttaaattggctgatacgaggatcacagaagtgagcggatggaagaccatatccatgctctaggtccccaaatgaaccagataggagcatttttttctcctatcagcaatctcaaggactagctctggttcaacaaatgtaaacaacaactttgtcacacttttttgttttttagcacccaggtacaatgctttccttataatgggtgcttaataaatttttatcaaatgaataaatgtttctgggaccagaggagtgctgtttctgggcaagaaagacagctttcttgctgttatgtctatgttctcgatgtctatttctttagaagctctttggctttataaggacagaaagttgctgagtattcctgatctcaccagtatcctttcaaactaatggcagttattctttttctaagtagaaatgtgaagcaaaagtgactaatccagtagttcttaagatcagtgaaacatcaatcctagaggaagacactcctccaacatcaggttgatgatcagtagatgtttctggaatcagatgtcattatgtggacctacatgaagtttaggcattcaatacttcactaaacctaaaacatagta

SEQ ID NO: 93 - protein, 734 aa, Mus musculus
LSGLSAPLNGWQGEQSGFLRSIREVFEYHQLPPIDVKMTKLGFLRLSYEKQDTLLKLLILSMAAVLSFSTRLFAVLRFESVIHEFDPYFNYRTTRFLAEEGFYKFHNWFDDRAWYPLGRIIGGTIYPGLMITSAAIYHVLHFFHITIDIRNVCVFLAPLFSSFTTIVTYHLTKELKDAGAGLLAAAMIAVVPGYISRSVAGSYDNEGIAIFCMLLTYYMWIKAVKTGSIYWAAKCAYFYMVSSWGGYVFLINLIPLHVLVLMLTGRFSHRIYVAYCTVYCLGTILSMQISFVGFQPVLSSEHMAAFGVFGLCQIHAFVDYLRSKLNPQQFEVLFRSVISLVGFVLLTVGALLMLTGKISPWTGRFYSLLDPSYAKNNIPIIASVSEHQPTTWSSYYFDLQLLVFMFPVGYCFSNLSDARIFIIMYGVTSMYFSAVMVRLMLVLAPVMCILSGIGVSQVLSTYMKNLDISRPDKKSKKQQDSTYPIKNEVASGMILVMAFFLITYTFHSTWVTSEAYSSPSIVLSRGDGSRIIFDDFREAYYWLRHNTPEDAKVMSWWDYGYQITAMANRTILVDNNTWNNTHRVGQAMASTEEKAYEIMRELDVSYVLVIFGGLTGYSSDDINKFLWMVRIGGSTETGRHIKENDYYTPTGEFRVDREGSPVLLNCLMYKMCYYRFGQVYTEAKRPPGFDRVRNAEIGNKDFELDVLEEAYTTEHWLVRIYKVKDLDNRGLSRT

SEQ ID NO: 94 - DNA, 103375 bp, Homo sapiens
attagagacttaggtctgctttgggtttttgtatgctcttgctatacagcacagctcactgtttatcttaagaggaatatttgactttcttttgaaactcttcttcctgcaaccacagatagcatatgataccttcagacatagcttgaagtctgtaccccgaagtcagccatagaaaagtacttctcaaatcaaagttaatctaaaatataactatttcctgtaagagccacaatacttcaacgctggtgactgcattacattcatggcagcagcagggcccaatgcattctttttttttttgagacggagtctcgctctgtcacccaagctggagtgcagtggcgtgatctcggctcactgcaacctccgcctaccaggttcaagcgattctcctgcctcagcctcctgggtagctgggattgcaggcgcatgctaccatgccctgctaatttttttctcaagtgatccacctgcttcagcctcccaaagtgctgggattacaggtatgaggcaccacgcccggctccaatgtattctttagttgcctgttccatccatgtatctaatatctgtatttccttgatcaagtttcatttgtcttgtctttccctgtgtagttttaaatttaatgtcaagttgtcaaacaacggaaataattttgagtaactggggagctaacaagttgggtttcttgccttttagtctcttccagttgcgcctcttctccttggtggtcttcttaagcaacagactcttccacaagacagtctacctgcagtcggccctgagcagctctacttctgcagagaagttcccttcaccgcatccgtcgcctgccaaactgaaggctactgcaggtcactgagttgcctgccatccaaaggggatgggcgggattggaagaagctgtggcagctcttttccctgttcacctcccgcctgccagggaaggcaggacccgctctgccaagggccctctgcgtattcccttctctctgaggaattgaaatttttgtctctggtgcacgtaaggcagaatgttccctgacaccagtgtgtggatttttaacatcaccgtgagtctgaaaggaccacaggtttttctgcagctattttctagcatttgccagtccctgtgcctggactgattggaacactttgtttttctccctgtgccatttacccttccacctttccatcctgccttctaccacccttggatgaatggattttgtaattctagctgttgtattttgtgaatttgttaattttgttgtttttctgtgaaacacatacattggatatgggaggtaaaggagtgtcccagttgctcctggtcactccctttatagccattactgtcttgtttcttgtaactcaggttaggttttggtctctcttgctccactgcaaaaaaaaaaaaaaaaaaaaaaaaaaaaagcctgaagagatgagataggaggaaagacctcacagccagatctgctgggttttgaggagtgattttctttcttccccttgaaggggaaaaagctattttcattggtacatttaaagtcccccaactatggggaggtaccaattctggacaagtgccactacaacaacactaaacctgaacttttcaactccgttggtggtgggaggcagcgggcagaaatttactgttggccactgccaggtctatttcatatttcaaaggaatattgggtgctgcatataggaactgaaggggtcaatgtattaaacctgtgattggttgttttcctgtcattttgagagactaaatgtggggggcagatgtcaaaatacctgtacaattttaaaatgtcacaattaaacatgagctggtttcccacaaagtgtctaatggttgaatttgcaaatcttgatttcgagaaatgtattcatggaatataagactttgtcttggataatttagttacagttttgagaaattagccctgaaaaatgttccctgagaaagcctggattatatgattataatcacatttatatttggtagaagagtcagattattactttttctaaagtctatatgtatatcgctactgtatattcatgaagggagaaagaccctcctagatattggtgtattgagtattaatcgagggaagccgttaaacatctggttaacagagacctttactatgtgcaagataaaatatggaattaaaaattgttgctggggccaggcatggtaactgatggctgggattccagcactttggcaggggccaaggcaggaggatcacttgagtccaggagtgcgagaccagtctgggcaacatagtaaaaccccgtctctattaactataaaataggttaggccgggcatggtggctcatgcctgtaatcccagcactttgggaggctggggcaggtggatcacctgaggttgggagttcaagaccagcctggccagcatggtgaaatctcgtctctactaaaaatacaaaaaattagccgggcgtggtggcacacacctgtaatcccagctgctcagaaggctgaggcaggagaattgcttgaacccaggaggcagaggttgcagtgagccgagatcgtgccattgcactcaagcctgggcaagaagagcaaaactccatctcaaaaaaaaaaaaaggttaaaaaaaaattgttgctgagagttgtaaaccaagtttgaaggtttatgcggttgatggaaggagggtttttaaatggtaggcatcttggaagtgaacactttccagcttgggcagaaaaaattgtaaaagacatggtttaaagtaaggtttacttccaacattctcctatgacatctctggtcatttaacaatagtattgcagactacttccagattgctatgggtgtggtttgcagaagacttcagtatttcatcagcttgtaagtgataagtgattgccttatttaagcttagtttcttaaaactaagttttaaaagtaggcttagttatttaagcagtcacatctttgcttcctgaaatttatatttgtaccatttagaagcatctcataaactattgaaaaaaaaaatagaaacatctcagtttggtttaaaagggtgaaggagactgggcgtggtggctcaggcctgtaatcccagcactttgggaggctcgaggcaggtggatgatgaggtcaggaatccaagaccagcctggccaacatggtgaaaccctgtctctactaaaaatacaaaaattagctgggcatggtggtgtacacctctattcccagctactcgggaggctgaggcaggagaatcgcttgaacctgggaggtggaggttgcagtaagccacgatcgcaccactgcacaccagcctgggtgacagagtgagactctgttttgcgggggaaaaaaagggtgagggaagttgagtggatgaaggtatatgatttttatccccagcactgtgcctggctatagaaaatgtgtaaaggtttaaatgactggaagtgaggaatctccagagttttattagcacagttgagcagccaagccttttgtataaaggctagattaggcatatctgtgataagagaaatgtgaccatctcaaatgagttatatacacaaagcagtgtaaatttttcctgcctttcacgagggtattgtcactgagagcagtgattaggaaatgggtcaaaaagagactatatttttgccaagtgcagaatacctgtttgaggcagactaataattagtaaccaaaaacaagggagctcacaaaactaaaaatgaaaatttgtttgttttaatcacaaaaccagtaggatctgaggaattgttcccagaagcacttttcaagggatagacatcacagcttggacaggtatatgtaatagaaaacacaagcctttttattctatctatagagctgagttgtctgctatagcaactctcaaaattagaaagtagatgctttagatctgagtacgttaagtctgctagaaacgtaaatgacacattcatgtactgatgtgttaactgctctgcacttaataaaaggatagcatctatgagagaaaaggcaactacagttgtccattcactgtctcctcattttccacccacaaatagtactttattttctgattacagcagtagtacgttcattctgctcctttatgtgtgtttacctccatcattgagattgctctggtgaaggttactgttcatcagtagtggggtggaatagatagtttagcagtcatctcaccttttattcacatattctgggctgggtgcagtggctcacgcctgtaattctagcactttgggaggccgaggcgggcggattatggggtcaggagatcgaggccatcctggctaacatggtgaaaccccgtctctactaaaaatacaaaaaattagctgggcgaggtggcacgcgcctgtggtcccagctactcaggagtctgaggcaggagaatcacttgaacctgcgaggcagaggttgcagtgagccaagatcgcaccactgcactccagcctgggcgacagagtgagactccatctcaaaataaaaaaaacaaaacgatattctgccaaagttgtataacctacagcagttaaaaggaagctgacttcaggtcagtgcaatttacacctttgtaacaacgagagccatacaccagtacaaattttggatggacctaaaatgagtctgcagaaccactgaaggatcaagtgagggaattatgacttaatcacgtaacaagcatttgagcaccttctctgtcaggtactgagcaagggactggggactcaagggtgaaccaaaaagatatgattactgccttctaggacctgacagtccagtgagagagactgacaagcaaatgactatgcaaaaatttcaagaattacatgatcagctatttttccataggtctcaaagctggataaaacactggaattcagggaatctttgagtaagatgagcaattagcccatatgttcagcctctccttgtactcattctgatttcaaatttaaatattctgtagtgctttgagacctagagaaagaaaacaatgaccaattaatcatttaggtaagttcctctaatcattcctcttcacgaggaatcaacatcggaatcagctcagcagcttttccaaaacacaaataacaacacctggctctggaggaaatttaagtaattatggaaacaaaaggtaatttaaaaaattctagtaactattttcacagagatttcagaagctactgcatccataaagtaagaacagatttggccgggcgccgtggctcacgcctgtaatcccagcactttgggaggccgaggtgggtggattgcttgaacgcaggagtttgagaccagcctgggcaacgtggtgaaaccccgtctctacaaaaaaatacaaaaattagccgtggtggctcgcacctgtgttttccactacttgagggctgaggcaggaggatcctttgagcccacgaggttgaggctgcagtgagctgagatggtgccactgcactccagcctgggtgacagatgagaccttgtctcaagggaaaaaaaaaaaaaagtgacactgaagaggctaaattagtgaactgcaagataatattgaggaaatcttccagaacatacagcaaaaagatcaagaaaaagttaagaatggtagaggtatccaagaaccaggagataaaacatttgtccaacagcaacttcagaaaatgagaatagaaaaatggagatgaataaaatcaaagaacatttcctgaactgatgatacaaattgtagttttcagactgaaagggcctgccaaatgtaaagcagaaaaaaatgaaagaaggtgaaacacatagatgaaatctctaaggaaagacaatttatcagagagggaaatagattaccgataaaggaaagtgactcagattggtgtcaggtttcttaaggcacagtggatcacgaacaatatagtcacagaggcttgaaagtgtgcttttatgtgtctgtgtgcatacggggtggggtgggtgggtcccaattttgttcctaaaattctaaacccagccatgctattaaggacaaaatacagatattttctaacacgcaaaggcaatgtttgcttccattcagcctttctaaaacacttacttgaaaaaaaattcatcaaaagtgaaaaataaatctaagaaatagcaagatgtcttatcagatgataatctatgaaaaaaaagaaaaagaactatgtcttattaagacaaaacacccaaccaaataacacgaaacagtggaatccagaagtgcattcaggggaaatcccagtaatacaactttgcacacacgtagaaacgtggtttctggagagaacagcttggagaacacagatactattactctggtgtgctacagatgagatgaaggcatgagtttcgtttgattaatgatatacaagaaaggtaaactgacgctttaagaaaaatgaaaagctctacgaaaaagttctaacttctacatcaaaacattccttttaagcaactgatgaaatagtaaaagcattgttttctgaaacaaccagttcaaaacttttggacttataaatcaggagggaggaggattaactgatacactataattcacgtataaactgtaggtttattttcttttattttgagacgaagtttcactcttgttgcctaggccagagtgcaatggcgcaatctcggctcacggcaacctgcgcctcccaggttcaagagattctcctgcctcagcctcccgagttgctgggatcacagacatgtgccaccacacccagctaattttgtattttgagtagagacggggtttctccatgttgatcaggctggtccttaactcctgacctcaggtgatctgccagccttggctccccaaagtgctgggattacaggcatgagccaccatgcccggcctatttattattttattttagagacagagtctttcttgctctgttgcccacgctggagtgaagtggcgtgatcatagctcattgccgcctaacttctgggctcaagcaatcctcctgcctcagcctcctcagtagttgggattacaggccagcacgaccatgtccagctaattcttaaaaattatttttgtagacactgcatctcatcatgttgcccaggctggtctccaacccctggcctcaagccatcctctcgcctcaacctcccaaagtgctcggattacaatcttgagccacgacacctggacctccaggtttgtttataataattataaagactttcctatgagtttgttttcctttgattttattcacaaataagcctttcctcatggactggtatcaaagactcatcctaaaaataggattagattttcaaactttgttctttttttttgagacagagtctccctctgttgcccaggctggagtgtgatggcgcgatctcagctcactgcaacctccgcctcccaggttcaagcaatttctcctgcctcagcctcccgagtagctgggattacaggcacttgccaccaggcccggctaatttttgtatatttagtagagacgggggtttcgccatgttggtcaggctggtctcgaactcctgacctcatgatccgcccgcctcggcctcccaaaatgctgggattacaggcgtgagccactgcacccggccccaaactttgttttttaatagtacattttgacttgtgaaaaggtttacttaatttgatcacttggaagcttaaatgtattctaagaaacatgtttaatactttttttttttttttttggtgggagagtcttgctccgttgtccaggctggagtgcaatggcgtgatctcagctcactgcaacctctgcctcctgggttgaagcaattctactgcctcagcctcctgagtagctgagattacaggagcccaccatcgcgcctggcctactttgaaaaaaattaataaaaactctaacatcttaatattctttttctttttttgagacggagtttcgctcttgctgcccagactgaagtgcaatggcgcgatcttggctcactgcaacctccaactcctgggtttaagcgattctcctgcctcagcctcccaagtagctgggattacaggatcctgacaccaagcccagctaatttttgtatttttagtagagatggggtttcaccatgttggtgaggctgttctcaaactcctgacctcaggtgattcacccgcctcggcctcccaaagtgctgggattacaggcgtgagccaccgcgaccggccttaatattcttaggttagtacttaaaaaaaaacaaaagaaacttgaacacaatctttctaattttaatgcccccctccccgcttttttatttttaaagagaaaaaacttctttttgagacggagtccagctctgtcgccaggctggagtgcagtggcacgatctcggctcactgcaacctccgactccctggttcaagtgattctgtgtcagcctcccgagtagctgggattacaggcacgcgccaccacgcccagctaatttttctatttttagtagagacgggtttcaccatgttggccaggatggtctctacctcctgacctcgtgatccgcccgccttggcctcccaaagtgctgggattacaggggtgagccaccgcgcccgaccaaaactcgtattttgaagaagcatttactccaagttctgtaattccttcaggctcagcttcagtttccttttgttaaagtaaaattacatcgaacacttactactaaaaacaaaaccaaaaaaaagcagatctattgaatcataacgtcctggggcgagcctggtcatgtggattttgaaaaaaatgcatgtgattctgaagcagtgatttaaataatgacctttcaataagtggtgggttccgttcatgggagaataggaaactgcgtgagtggtagaggcaacaagttcgaagagctgcgggacgttcccactctctctggtgtagccttggctcaccgaggcgcgcagggagtggaagtgcctgaggataaaggtgtgtacgtgcgagtctgagatgatggaattgctgctcaaacttcgtccccttctctgccctcagcaaacttattgggggtcggggagcgcgtggggtgcgagagaagagaggcaagttaggatagggagagcggctctctggccggtattttaacaaagggctgaactgactaagcatggccgggctgcctcccggtctcccgaggaagcccgcttgctgctggggagggctgtgcctccgcggcggtggctgtctcagctggcagtagaaatgcttccagcttagccccgacaacccctttaggcctaggcacgctctttcacaaaaccaggggctgtgaactctgtcaaggttcccaggtccatcgcagttaccagggcacagtaaaagctcgagtcaactatcaggcacatcctgcaaaagacgaactgtctggaccagtccgcgtttgagttttaattgagaataaataggtagaaaatgcttccctcctctcctttcaccttgtattaggtaacaatttctaccttaaaaaagacgggagacgagcggctccgcattccgagttactgggacttggagcaagggcctatttcagcgtagtttccgcttcttgtcacatgacgggagtcagtgggccgcgccttcccactgcgactccccgtgggtccgcaaaccgacacgtcactcctcggccctcaaccaaactgcttggggcacgttctttccgcgctcttgactcctacgcgccggcctatgacagctcggcgggagcatacagacctgcctctagactgctaagtgatagctgtaatgaccaattaaaaacttgaatcgcggcccggtttacgcctccggatttgacagacagttccgagaccctatcgctctccagaagcgtcctattggcctggagccagccaacgggggagcggtccgggaggcggacccggctcctgccagggttgggtgcgccgctgaacggatggctgagggagccccgcggatcgtttaggaaagccggccaggtgagaaggccgtagaacgtaacttgaaaatcagcggcaggtgcagtccatggcgttgatggggctgaacgaagtgcaggaggcaaaactctaaatgggggtggagagcagagcttagggccttgcagaggagggggcgtggggcgtggtgtgggggcttcctggatggaaggatgcgaaggtctagggagggagggtaaggtgggtcttgagaacagagcgtgggaaagactgggtcctgggactagttatggaggggaaggcgcgtaggatgctggggtgatgagtgtcccgcgctgaggggtatcagaggtggtcagttctttgagggtgggaagaagagggaggtgggacccgctggaacgaccggaagggagaagagagtaaaagatcgtgagagggtgtggaaacgtgtgtaggaaaacggggctggggaaattgcagtctgggaaactagaggcagggtggcaggagatgccacagcttgcagggcacagttgaggagagcaggttggtaagtgttttaagaaaggtgtctttgctcttatttgcttggcggtgtgcgaaagtgaccaaagagcacgagatgaaatctcccttacggccctgccctcaatgactagctcgtttactcaagttttcaagtagagatcctagcagtctcattttggtgtgtggctcgtatcaacgcagtggtgttaagtttgttcctatttcaggcattccagaaaacagctgcaaaccctgagagatatggctggattgttgacctcctggagtagttaggcctttatttttagttgcaaagtaagctttccctttgggactatacttaaacacatttctaaactgctcttctgggacagttaattatggagaacatgcttgacttctcagtgttggggctagcattctatatgccttccacctagtccagtgttgttgttttgtttttctcctttattccaataatagtgggaaaaaagattcatggaggaggatagacaaacgtttgttaagggatacacaagtacaactagataggaataaattctagtgttctataggataactattattaggagtataattaacaacaaaaatacacaatttgttgtatattttcagatagctagaagagtggattttgaatattcctaagacaaaaaaaataaggtgatgaatctactaattatttcccgacttgatcattacacattatatacatgtaccaaaatgtcacactgtactccataaatatgtacaattatgtgtcagtcaaaaagaataaaagcaaaacatcttgaatggtgttgcatatcctttgttatagtcgttataacttagctcttgatcaccttgtaatttaaaaaagtaggtctgggcgtggtagctcacgcctgtaatcccagcactttgggaggctgaggtgggcagatcatgaggtcaagagatccagaccaccctggccaacatggtgaaaccccgtctctactaaaaatacaaaaattagctgggcgtggtggcgcacacctgtagtcccagcttctcatgaggctgaggcagaagaatcgcttgaacccaggaggtggatggaggttgcagtgagccgagatggcaccactgcactctagcctggcgacagagcaagactccgtctcaaaaaaaaaaaaaaaaaaaagatagtagtactgtcttatacaagaataactaacctatggtagattagtgctatattgctatataaataattcatatctgtcatgtgatttccattttgaactgcctacagatagtgtccctcaacattttaatctactttttttaatcccccgactcttctgcttcagtaggaaaaattcgttttctttccctctagattatcatctgatgccatcaaactgtctgtgtaatttaatcagtctcttaaatcagcattgtcagttacagagaagccttgagacagatgattggaagcgggtatagatctgagcagtcgttacagtctgatatatgggatgagagcacagtggatctgtgtttgggtacctccacctctttttgagtgcatgattgtacctgcattagttatcaggtatgctgttagttgacccgacagccccattgggatttggaaaagaaaaaagtttatagccattcagttgaagtttaaatttagggctcgaaattgtgttgattcagtggtgacttctatttttcctcttaatgcctttcacttcttctttttttttttttttcctttttaaagagaggaggtctggctctattgtccaggctggagtgcagtggtgtgatcctagctcactgcagcctccaactcctgcctcatcctcctgagtagctgggactgcaggtgcagaccaccaagcctgcataattttaaacagttttttgtggagatggggttttgctgtattgctcagattggtcttgaactcctggcttcaagtgatcctccctccttagcctctgaaattgctggggcttgcacttctggtctcaatgtttatttcctgcttccccccctccgcccctgccaccccatatagtcctgccttttcttgagtgctctctttctccattttattatttttcagtatttccaatctttcctgtttattttttcatctcttccttgtgctatactattgctaattgtgcttatgtacttgttagctgtgaaggagtgggaaatagaattatggatggtttattctgaccactccattttagtcttgacacatagacctgacttgtgcctacttccttgcaagttgatcatactttaggccaggcttggatactagtattagccttgaccctgtctggtgtttttgctagctcctacgtcctttatgattccctctcatcataaaatatgaaaattaagtaaattgaaggtgttcaatatcttgtggtcttgactttttcattttagctgatcgtcgtgtgttgccacccattcatgtcaagatgactaagtttggatttttgcgattgtcctatgagaagcaggacacacttttgaagcttctcattctgtcaatggctgctgtattatgtgagtgtgcatgtgaacctctctttctttggggatagaaagaagaaagtctagaaaaaaattgaaaatcgctatcttaaaatgccttgttctttttagcagattgttacatttttccattcctcattagtataattttatgaaggcaaaataaaaggaatataaaagtcagggctatgggccacatgcagtggttcacgcctgtaatcccagcactttgggaggctggggtgggtggatcacttgaggctgggagtttgagaccagcctggccaacatgatgaaaccctgtctctactaaaaatacaaaaactagttgagtgtggtggtggatgcctgtattcccagctacttgggaggctgaggcacgagaatcgctcgaacctgggaggcagaggttgcagtaagccgagattgcaccactgcactctagcctgggcaacagagcaagactctgtctcaaaaaaaagagggctgtgatcatctttgaaagaatgggaagcatgctgtgccaattctgttttctcatagggttgaaagtgatattggggacccttggataactgatttttgtaaaagacaattatcttcaatttagatgtctcctatagtatttttgaaagtctcttgagagtttactctgtattttagattttctggctcttcatgagtcctaggtgtaattttgcttgccatacctattactttgctccaaggttaaggttagttatgtgtgtatggtgggggagtcagcgtatataaaagatgaccatgtaagttgagtttggtattagtaggtgaatgtaatgttataggcttttataattagttaactgtgacctatgaaagtggaaaatgtagatgccattgtcaggggaaagtaaacttctcttgtttcctttatgtggggaaagatggataaagactttattcagggattattttatattttctgtgacctctctactggataatactgtcttcattataatactatatctgctgttctttcatggcacattaccaataaaatattaactctctggtttttgcagccttctccactcgtctgtttgctgtcctgagatttgaaagtgttatccatgagtttgatccgtgagtacctttgcttgatctggtattatttcctttgggaggcattcaggttcatgggtttcagattcaaatttcagtcagctctcagtgatagagatgtgctttcagtacatttaagggaaaaaaaaaaccttaaattcttccaaaggagataattatctccttttaagacgtatgtgttggagtccagcacagtggctcacacctgtaatcccagcactttgggaggctgaggtggagggatcacttgagctcaggagttcaagaccagcctgggcaacatggtgaaaccccatctctacaaaaaaaaaaaaaaaaagtatgtgttggaattgaccaagtaagtctctgaaactcaaaaaatgtgagaggcattgctagtatgtctgcctatcacttaagatctggctaggctaagagaattctggctgcccagtttggtaaaagtttgtgatgcagattgaaggaaagggtcctggtgtgtattccaggctcagaagagaatcacaaacaatggacttgagattcatgacattttgctgtttgtttgtttgtttagcaatttatgtgatagaaattgggcttcttagttaaattctagggcaatgaaaaaactcaaagttatcagtttgataaggaattttgttcattagatgaaaaagatatagtggaattccttagtggtattaataactagtatttactaagcattcattttgttccaagcactaatttacagattatctctaaatcctttcagcaaccctttgagatgtaggtactattattcccttcttagaaatgaggagactccactgggcacggtggctcacgcctgtaatcccagcactgggggaggccaaggcgggcagatcacaaggtcaggagttcgagaccagcctggccaacatagtaaaaccccatctctactaaaaatacaaaaattagctgggcatggtggcatgtgcccgtaatcccagctactctagagactgaggcaggagaatcgcttgaacgcaggaggtggaggttgcagtgagccaagatcatgccactgcactcctgcctgggctacagagcaaggctccatctcaaaaaaaaaagaaaaagaaaaaagaaatgaggagactcaggctgggagtggttatctaaggttgattattcagtacgtggaggaaccgtgatttgaatgttggtttgtctgactccagagactgtagtcactgtgttatattgcctaaagttaaggcttataacaaatttggagggccaaaatcataggttcttgaaatattattggtatcttaaaaatagtatattcaatcttgtggagtattgattgaaaatgcctgcatctatttgcaaatttataattttgttttgtgtagatatttgaaagcattttggaggcattacaaataattctgtttggggcctcccaaattcagtttatattttttctcatgaatgaggagacatgtccttttgttttttctttttttgtttgagattgggtctgactgtcacccaagctgaagtgcagtggagtgatcacggcttactgcagccttgacttgtggggcctaagtgatccccccacctcagtttcccaagtagctgggaccacaggcatgtgccaccatacctagctaattttttaaaaattttttgtagagatggagtctcactatgttgcccaggctggtctcaaactcctgggctcaagcaatcctccctcctcagcctcccaaagtactggcattacaggtatgggcttccatgcccagcctacttttgtttcttgatcccaatctgttaggcttctttctcagaccctctgaatgagcaaatattgatgttagataatcaaggaatgcaagagcatctgctttgtcgtcaagagctgttagggaccataagggacttgacacttccttttgcagaggaggaaactgattcccagagtggtgaatgcagtccagacctattcctactaacttatacttcctctctcactctgcctctcctactggtagctaaaggacacaattctgacacatactgatgtctgcaaccctcatctcttctgtttctgacagtcaccaaaataacatcagtgacaaacagaaggatagagatttctgccatctgttgcttctgtttacttcagctttcaaaacttgactgaccaaggaggaaatagggttagagaggtgggcagagaggacggttagtcatgattatccatagtaattaaactgtctctagtttgagactctttgtttatttttgtctgtcttccttttttttggaaacagggtcttgctgtgtcacccaggctgaagttcagtggctcagttatggctcatgcagcctcaacttcctgggctcaagtgatcctcccacctcagcctcccgagtagctgggattacaggcacgcgccaccatgcctggctaatttttgtgttttttgtagattgggtcttgttatgttacacaggctggtctcaaacttctgtgctcaagcgatccatccacctctgcctcccaaagtgctgggataacaggcatgaactactacaccggcctcttctttatttttatttattattattattattattttttgagatggagtttcgctcttgttgcccaggctggagtgcaatggcacaatctcagctcaccacaacctctgcctcccgggttcaagcgattctcctgcctcagcctcctaagtagctgggattacaggcacgcgccaccacgcctggctaatttttgtattttttgtagattgggtcttgtcatgttacacaggctggtctcaaacttctgtgctcaagcgatccatccacctctgcttcccaaagtgctgggataacaggcattaactactacgccggcctcttatttatttttatttgttattattattaattttttttgagatggagttttgctcttgttgcccaggctggagtgcaatggcacaatctcagctcaccacaacctctgcctcccgggttcaagcgattctcctgcctcagcctcctaagtagctaggattacaggcatgcgccaccacgcctggctaattttgtatttttagtagagacagggtttctccatgttggtcaggctggtctcgaactcccgacctcaggtgatccacctgcgtcggcctcccaaagtgctgagattacaggagtgagccactgcgcctggccttattattattattatttattttattttttgagacagggtcttgctctgtcaccaggctggagtgcaatggcatgatcagggctcactgaagcttcaacctccctgggctcaggtgatcctcttatttcagcctcctgagtagctgggactacaggcgtgtgccactaagtcctgctgattgttgtatttttttttagaaacagggtctctctatgttgcccaggctgatcttgaactcctgagctcaagtgatccacctgccttggcctactaaagtactgggattacaggtgttatctacctcacccagccttatttctttttaaataagaaacttaaggacttacatattttgggcctaaagaactatctttccatttaaagctcttaagcattttatgtcaaatatttttcatgttgtctatgtatctgtgtatctttctatattttttttgagaaagggtcttgctctgttgcccagtctggagcacagtgttgtgatcatggctcactgtagccttgacctcctggactcaagcagtcatcccacttcaacctcctgagtggctgagactataggtgtgtgccaccatgcctggctaatttttaaaaaatgttttgtagagacagagtctcactgtgttgcccaggctggtcttgaactgggcttaagcgatcctcttgcctcagtcttccaaagtgccgggcttacaggcatgagctgccatgcctggctgtaatctatatttttatgcttctatataggtgacataagaagcattttagataaccacatgagtagaccttgttaaaagtttaaacactgattaagaaagttgtgttatgaagtaggttaaaattttttcatcctgcatatgatggtataccaacatctttaaagattctcatcactggaaattattcatgtgtctttgtgtgcagtatagatttttaaaaatatgttcctgtcacttaaaagccagaatctggccaggcatggtggctcacacctgtaatccaagcactttgtgaggctggggcaggtggatcacctgaggtcaggagtttgagaccagcctggccaatatggtgaaaccctgcctctactaaaaatacaaaaattagctgggcattgtggcgagcgcctgtaatcccagttactttcagaaggctgaggcaggagaatggcttgaactccgtaggcagaggttgcagtgagccgagatcgtgccattgtgctccagcctgggcaacaagagcgaaactctgtctcaaaaaaaaaaataaataagaaagccaaaatctattggtgcccacatctcagtggctttgtcttcatggtgcttgaattctctgactggtcctaatgcctaccacatgtcagcttgttgaagtatcccatttgattgctttgttacaatgttaggctccagtttcatttcctttttatttatttatttttttttctgagatggagtcttgctctgttgcccaggctggagtgcagtggcaatctcggctcactgtaacctctgcctccaaggttctagcgattctcctgcctcagcctcctgagtagctgggattacaggcacatgccaccgtgcccagctaatttttgtatttttagtagagatggggtttcaacatgttcgtcaggccagtctcgaactcctgaccttgtgatccacctgcctcggactcctaaagtgctgagattataggcatgagccactgcacccggctcatttccttatgagaaaagcagtgctttagttgagacaagcatggagatagaagtaaacagacttatggtagtgtaaaatgattttcatggcataatatctgatgttaaactgatttttcattgagtaatgctgaatttctcaatggtgtatcctgaggagcaaaattcaccacaaatttacaacaaagtttatttcttgctataggtactttaattatcggactaccaggttcctggctgaggaggggttttataaattccataactggtttgatgaccgagcctggtaccctttgggacgaatcattggaggaacaatttacccaggtgaggagaccagatgtgtttttttttttaaaaaaaaaacagaaatatttgtatgctagagaaccagtttcttttatttctaatagctttgtcttgtgacacttgtaatttcatcctgattacaggttcctaaaagtgcatcttacataaacaggagtacatttgtagtagagtggagatgggtggtttttatacattctagacttctgattgaatccttaggggagaaatttataggcttactgcagttgctatgttagtatttctggtgatttgtcaagacttacatagtcactttattgtatctgggattttccctttctttttcccttaagttctggtaagacaacctaatggagtttcttcttcctgttacaggtttaatgatcacctctgctgcaatctaccatgtactccattttttccacatcaccatcgacattcggaatgtctgtgtgttcctggcccctctcttctcctccttcaccaccatcgtcacgtaccaccttaccaaagagctcaaggtgaaggatttggggtgacaggaggcttgggaatgaatgttattgagcctctctaatcgatgctggagggtgggggacagagccttagaaaggcagggagccagaaggtgaagacagcttttactgggccaaattaattggcttcactccaacccctttctgcaatatgtgttttttatcattagcaactgtttgtccttatgagagtacagttgaaagtgaaatgtaaattgcaacataaagaaaaaaacatttaaaatgcaaaatgtgaggtttggattttgaagtcctcacaatgtaagggagaggaaaaaaaaactacatgaaacattccaaaacggttagtttttcctaccaggaatgtactcagcaattatttgttgatttaaaaaaaatttttttttattttaaaattcttaagccatttggcttccgtagtagactccataatgctgactctgtttttccaggtttcagcattgctgaccttggctccctgggtgctattcttagtttgtgctgcggtgttagagagatacctgagaggtgataaactagtagggggtttgggaagcctgaatttagtttggaaaactttttgatccttctccttgctgccctttcccaaatttgactctttcaacagacaagtctttacttttttggaatgtggcttatatctgttgctcctttctcctgagctcaaagggtgcctggtgatatttaagctttattgcctaagctcctggcatcttcagtttaggtagattatcacttagctttcttggctttttaactgaaataataattttcttcctttgattgtccttgcatggcttttagaggtgtgactggtgttccaatgatgtacagatattgttaggggtagagacttacgagcttggggagattggtagccaaacagcccattctgggacagtattgatgtttgacatctcacttgatttgtctgtcctcagcatatgtgttctcagtgtcaggtttggtgtcatcatggggaattggtcatgaagtttttagcttgcttgtgctgtgagcatttctagcatttctaacatctcacatctaccttcgaaattgttggactgttttctgggctcattataaacagaatggactagtggatcctctgttctttctcagcattgtattggtgttaatgtcttattaccctttttttcttacaggatgcaggggctgggcttcttgctgctgccatgattgctgtagttcctggatatatctcccgatctgtggctggctcctatgataatgaaggtaagacttttaaaatgctgaagaagatcatctcacctcattatccaacagagcttcacaaagtgcagtctatggtttagcaataataaaaatggtaactgggtgagaatattagaaatgggcaggaacggatcttggacaagctcatgttctcttcccatcatcctttccagaaaggtagttggtaacttttcttacaagtctttggttcatctctgcactcataaaatagttaactattgttttaacattataatcatttgctttattttcctacataaagggagtggatgtccttaaaattttaatgactgattgacttattctcaattcaacatacatttgttgaatgttattgggaaaacatagtattaagtgttaggtaatgactaagattactttgtgcataattataagaaattaaagagataggtaatgaataaggttatattggcccatcatctattaaggaagattaaaatggacatgtaaatataactccagtgacaggagatagtactatgtgccatgataaaaatttgaacagagtacttcaggaatgtagtggaaggagagatttggggctgagcttggtggctcacgccctgttatccagtactttcggaggctgaggtgtgtggatcatttgagctcaggagtttgagaccagcctgggcaaccctgtcactataagaaatacaaaaattagctgggcatggtagtgtgcgcctatagtcccagctactctggagactgaagtgggaggatcgcttgagcctgggaggttgaggctgcggtgagctgtgattgccactgcacttcagcctagtaatagagcaagaccctgtttttgttgttgttgttgttgtttttatttttatttttttaagaaaaaaaaaaagcagactggagaatcaaggaaggctttttagaagtggttgagggtcaactgggtcctgaagttgggacttcattaggcagatatcaaggaaaggggcaattggggcatgagtattatatgttaagacatagaggcaggatgatgaatgatagtataagatgtctttagaactatactagcaggatgtttagtgcttggaaagaatgataataatggccaatatttacttaatgtttattatatgctaggtactcttctaagtgctttacaggcattaattatatttgttttcagaacacttttatgaagtagatactattacttcttcttacatgaaactgaaacaaaaggaagtaaataatttgcctaaaattacactattacttggtagtagatccaggcagtctgttccagaacagtattcttaatgactatactagcctggcctcttgttgaatttttggtgtgtcctttctgcagggattgccatcttttgcatgctactcacctactacatgtggatcaaggcagtaaagactggttccatctgttgggcagctaagtgtgcccttgcttatttctacatggtaactttttctacatgttttcaatttttaaagttctctaaatactgtatttcctatgggtacttattgtttgaccaactttcttttctggtaggttcccctaaatttttttcttttccagtatattttttctgttcatacttacgtatacatgtagacttccttaattgcttccacttgctcacatatccctaaatcctctgtgtgaccttacagtagattgcatttagattaattctgaggcttgagtccctctcgttatgtgatcatgacatcagcaaccacaagggagcaggggattgagttacagtgatgggtttgaacttgattttatattttcttttttaaaatttattttattttgtgtgacctgtacatgtaaggacttgattttcctgtttaaaaaaaaaaatcagttatttgaactctttaagccatttggcataaataaagttatagttactataagtgttctttaaagagtcacaggtgatatcctacaatatagtggtggtggtctgaggaggcatactcagaggaactgtttttttctattccatcataggtctcgtcatggggaggttatgtgttcctgatcaacttaattcctctccacgtcctcgtgctgatgctcacaggccgtttctctcaccggatctatgtggcctactgtactgtttactgcctgggcactatactttctatgcagatctcctttgtgggtttccaggtgagcccttgactgagtagggttttcagcttctactttttctatgcagccccaactagactgatttatcttagattctgttaagaagagtacgacttattcacagcctttatattgaactacttgtgttagttgaagcaacagaattactggtcattaaagtttgcatccaggagtctgctaatatttgctccgtggagtttgaattccatggctcttactttggctttaagtttgtgggaaggggagggatatttagttgagttgagtttagatgagtgatcagagttaaaatttccagtcttcttaatgcagatgaccccatgtagtagcagagattcctgatcttaatggcatctaattgtaagtgcttcaggaagtaaagcacaaacctttaaccacattgctccacagggttaacagacaactgttaaatcaaagaataatgtggtatgtttgatttctcttgtgaaattatcatgaaaatgcaaaccttatctagaggtcaacaagtatttctttactgattacctactgcagattgtccccaacttatgaagcgtgacttaggattttttggctttagaatggtgtgaaagtgatctgcattgagtagaaaccgtacttccagtacccatacaagcattctgtttttcacttacagtacggtagtcaataaattacatgagattctcaacactttattgtaaaataggctttgtgctagatgattttgcccaactgtaggctaatgttaaatgttctgagcatgtttaaggtagtctacgctaagctgtgatgttccataggctaggcgtattaaatgcattttctacttaagatattttcaacttaaaatgggtttatggggatataacccaatcataagttgaaaagcatttgtatatgcagtttgctaatcacttgaaaatgtaaaaagaataaaaatgcggtcatagtccttaaggaagttttggtcttcttacagggaaagaaatacaggcagctgtctatatctgataggctacagttctggaagtgtggttcttgaatcatcatcactagcagcagcagctagaaacttgttagaaataaatgcaaattctagagccccaacacagacctactgaatcagaaactctggaggtggggctcagcgatctgtgcttcgacactcctacctccttggtgactacgatgcccactagcatttgagaaccaccgatctaaggcaaagaatgattaagtgctagaagagaactaatgtgatatggaacatagagaggagtgattgatttcagtttggcagattgggaagagatgatatttgagttggaccttgaatgatgagaattttagtggatgggaatttggggaaaattacagtctaggctaaggaaataacctgagcaaaagccagagatgtgataatgatagtgtatcttatgctttagggggctgcaaatattctgtagaaaatatggctggtgaattaaacccttccctagattggccctgattccttcggggcctcagaactcatttgaccatttggtttgaactagataagaataatgcaggcctgcactggacttactcattttttttccttagtattaacatacatatccttttacctacagcctgtcctttcatcagagcacatggcagcctttggggtctttggtctctgccagatccatgcctttgtggattacctgcgcagcaagttgaatccacaacaatttgaagttcttttccggagcgtcatctctctggtaggctttgtccttctcaccgtgggagctctcctcatgctgacaggtagggaaggctcacagcttttttccttttttctttttttttaagatggagtttcgctcttgttgcccaggccggagtgcagtggtgcgatctcggctcactgcaacctccacctcccaggttcaagcgattctcctgcctcagcctcctgagtagctgggattacaggcgcctgccaccgcgcccgccaccacgcccagccaattttgtatttttagtagagacggggtttctccatgtttgtcaggctggtctcaaactcccgacctcaggtgatccgcccgcctcggcctcccaaattgctgggattacaggcgtgagccactgcacccggtcaggcttagagcttttactattaaatgcagatgggtacagacatagaataaactccaaaagacagggtattttctgaacacaaaagattatttttttcttatttcttttttcatcggaagcatgtacaatcccacaattttacattcaatccacttttcagcccagtgtttggattcagcatagcagaaaatatcttgttggagctgctcttaatcacacctggtgaaaggactatatcttaccttgcgaatctttctcctttttctttctttttttttctttcctattgattgggtgggagaagtcattatattgcttaccataccctccaaagtggcactcatctaatcccatggaaactaaatcatagctgtttagttggttggaaagccaaattttccttctttttctctactttgctttctcagagatgaatttgattttgctcaagtctatctattgactaattcagagcaggacttgaggatatagttgatttaatctctacagttggccttggtttgaccaaatttggcctaaaaccctttcaggtagcatttctgcctctgttcttctctccaagtttatatacagcctggctttattctgctggcagtgctgacaaaagtactctcaggtttgaaagaaaggaaggagtgaaactctctaagtattggtggcaattaagcaaaaacctaatccttctctgtcactgagaatcttattaaaatgggaagttgtgattcatttggatcagatgtttgtttgaagagtgtgtgtggaatatttattgcctctttgctgctaggaaaaatatctccctggacggggcgtttctactcgctgctggatccctcttatgctaagaacaacatccccatcattgcttctgtgtctgagcatcagcccacaacctggtcctcatactattttgacctgcagctcctcgtcttcatgtttccaggtatgtggcctcgtgttctgaaatggccttgttcataagaatcacaatttgattccaaatttgcaagctaccctcattcgtgttttgtttttctttgcctgtttatgttgtgtaatacagaggacggctaagcaaattttctcatgtatgaagctgagcagaagtcagaagttcaacagttgtagatattggcaagttcagcctcacagttttctgttcatttgtcatttgtgttataagttaaaatttaacggtaatttttactccggttttgttttgttttgtttgagtacttctgtcgtactccttcccctttacccttgtttttcctcttggaagtattgaagtcccataatgagtactgctgattgtaaagcctcatcaatctcttatcttctggccaatccagatgtgttttagaatttaccggtgttagtggtctttttctcttaaaaaataacttttaccttttttttttttttttttttttgagatagagtcttgctctgttgcctaggcttcagggcagtggtacaatctcagcttactgcggcctctgcctcctgggctcaagccatccttccacctcaccctcctgagtagctgggactacaggtgcacaccaccatgcccagctaatttttgtattttttttgtagagatggggttttgccatgttgcccaggctggtcttgaactcatgggctcaagcagtctgctcaccttggcctcccatagtgctgggattacaggcgtgagccactgtgcctggccaacttttacttttttcttactgtgaaagtaatttgtgtattgtaaaaatatatgtaaataaatagaaaaagatgctgggcacaatggctcatgcctataatcctagccagttaggaggctgaggtgagaagatcacttaaggtcaggaatttgagatcaacctgggcaacacagtgggacccacgtcttaaaaaaaacaacaacaggcctggaattgtagttcacatcagtaatgccagcactttggaaggatgaggtgggaggattgcttgaggcgaggagttcaagaccaggctgggcaatatagtgagacccctgtctctacttaaaaaaaaataataataataatgcgcgcacacacccatacccacacacacccatacccacacacacacacatacacacatataaaataaataaaattagctgggcatggtagtgtgcacctttagtcccagctacttggaaggctgaggtggaaggattacttgagcccgggagtttgagaccagcctcggttatacagcaagacccccatctcaaaaaaggtacatattcaggagttctcactacccatctctagccactgttaacattttgatgtatatttatcaaataagaatgagatcatagttttttccctgatttttttcacttcataaagaatcaaatttctctgttacttagtattattttatagaaatacttaaaatgtatcatttattagttttttaaagtacagagatgtgtcaagatgtgtaagaaggcaagtagtacataatctcatgcagcaatattttaatatattccattttataaatatagtataattagctccttgtttttggacatttgggttgtttctgatttttttgctactttaaagtgtgctgtagtaaacatctttgcatgtttctatgattgtttttttaggataaattcctggaagtggaattgctgggttaaatgtgtggaatcatccagtcatataatgaagatactttaccttgtaggtttcaacctacaggactcagctgcttatttctccttccctcttttgtagttggcctctattactgctttagcaacctgtctgatgcccggatttttatcatcatgtatggtgtgaccagcatgtacttttcagctgtaatggtgaggatgccctcagtctggtagactttttcactctaactctgaggtgcttttttatctgtctggcagaattcagaaagtactgatgattgtgcacatgcttccctctgagcatttgagggaatgagttgtaagttgttgatcctttccaggaacgtatgggacactcatacattctggttgtggggtccaactttcttggattcgtaactttgtattatagaagcatttttgcactttgttggataatatgaccctgggtgtcttaaaacgggagatgatatttttttcttgaaggcttgggagtattacccagtgctagattgttagaggagggatttgaattttttttttttttttttttttttttttttttgagacagagtttcactcttgttgcccaggctggagagcagtggcgtggtcccggctcaccacaactgccgcctgctgggttcaagcgattctcctgcctcagcctcccaaatagctgggattactggcatgcaccaccatacccagctaattttgtatttttagtagagatggggttttccatgttcgtcaggctgatcttgaactcccgacctcaggtgatccacccgccttggcctcccaaagtgttgggattacaggcgtgagccactgagaatacacacattctcttatatactttaaatcatctctagattgtaatactaataactaatactaggtaaatggttgttaatactgtattgtttagggaacaatgacaagaaaaaagagaggagagattttatatattgtagtaaaatagtgtttctcatatttttttggtctcaaaccacagttatgaaatatactttatatcattattcaagacacacatgcatatgtacatgcatataattgaaacaaagtttaagaaatacatactaatactgcaactatttcaagtattttctctttcactttttgtggaggtcatgtttgatgaaaacccctaaattgatgtcttgatctactaataggctgaaatctgtaaattgtggaacactgattagactgatcatgcttcctgtctctgttaggtgcgtctaatgctagtgttggcacctgttatgtgcattctctctggcattggagtctcccaggtgctgtccacatacatgaagaatctggacataagtcgtccagacaagaagagcaagaagcaacaggattccacctaccctattaagaatgaagtgagaagcaatgttaagagtagacttgggaaactctgtgtgtgtgtgtgtatgtgtgtatgtgggcagcggggggtgggaggagtaaagtagagcactgtcctaggtggtcagaattaactcatatagcctctgacttattttgatcaatctcatctatatgaatgtgtctaagaagttgtcctgtgttgtgtgaatttagtttggttaactacacaattaattctttttccttgtttaggtggcaagtgggatgatactggtcatggctttctttctcatcacctacacctttcattcaacctgggtgaccagtgaggcctactcttctccgtccattgtactatctgcccgtggtggggatggcagtaggatcatatttgatgacttccgagaagcatattattggcttcgtcataatactccagaggtgaagatttgggaggggtgggaattgtgggttaggggcaaaggggaagacatttgatgttacagtgaatcatacagcttttagatgggtggaaagctgggtgaaactggaactttgcaactctagtcttgaatgagccttaaaggtgaacctccattcaattctgggatcttttgtagttactcttactagtaattatctagactttgcatgcacacttttattgatatgatgattttaacatgaggtagaacatcccagttataaaagaagaaaaaagttatagataaataatacatgttcactttagaaaaatcagaaaattgaatcaagaagaaagatataaatcttgtgtaaagtgatcaccttatgataactgcttttaacattttaatttatatcttttgagaatctgaagtgatttcctttacaataactattaggaatatcatttctgagacaatttgttaggaataaaaacttttaagagtctcttaattcttgtccatcgtatcatgtgatttgagtttccaccccatctttatagtaagtgatttttgcaattctgttaaaaggttatttaagaaaattgtctaatgacactaggctattgatgtggctacattgcacagtctcccacacctcccaccccattatgttagtataaagtgacctgggatgaagtgttgggaatgttggtttgttatttgtgctgagattttataattgtatataaatggaagaccaggtgccaggatttattttctggtttgacatgcattactttgtgaagaaattgattagttagccaggtgtcacttctgtcagaccaaagatgccttctctgttgcatttgatttttagagacagtgagaagcttgttatttccatttcccattctactttcaggatgcgaaggtcatgtcctggtgggattatggctatcagattacagctatggcaaaccgaacaattttagtggacaataacacatggaataatacccatatttctcgagtagggcaggtaagataaagggatgatctttgagtgtttggtgtacaaggtctaatgggaaatgtgtctgcatgaggggatcatatgacttgggattttgctctgagaattgtacatttgtttttccaggcaatggcgtccacagaggaaaaagcctatgagatcatgagggagctcgatgtcagctatgtgctggtcatttttggaggcctcactgggtattcctctgatggtaatatacttgattctgtttctagctgcaggacatagattctaagaaaactagatgaatatcctagttttctgtacttttactaatattttactaagatatttttctttcatgggaagttcctaagtatttgcaacttgaggtttgggtattttgatttttttctttttgtaacaagaggacataaatgtaaacaattcttgtgtaggtacagcatgctatatgattgtctaaggcatagaagtagttccacaaccagtaataaaaccaagctgaatataaggctcatgacaatgaacttaagaattagcatttttttagtggttttaagccatataatcattgaccagcttagaaatgttttatatggcctgacagcgtgtaaaaaaagagaacattttatatatatataaaatatatataaataaaagtgtgtgtaaaatggaggttaccatgtgccctatgattattggcacaaagatttttagaagaaacatccaaatatagttatctgccttaaaagttaatgtaatgcctgtttacactttaaaaagttaagcagttcacagccgggtgtggtggctcacacctgtaatcccagcactttgggaggccaaggcgggcggatcacttgaggtcaggagttcatgaccagcctgggcaacatagtgaaaccttgtctctacaaaaattagccaggcgtagtggcacatgcctgtagtcttagctactcaggaggctgaggcaggagaatcgcttgaactcgggagggagaggttgcagtgggctgacattgcgccattggactccagtctgggcagcagagtgaaactgtttcaaaaaaaaaagttaaacagttctgaaggtttataataaaaagtgatagttcactgcccaaaaatctaagcccccttaacatcagtccccagaagcaatgattcctgcagctatttcttctagtacttacatgcatatttctaaatactgtgtatacagtttcccctccatatccgtgggttctgcatctgtgggttcaaccaaccacaaatggaaaatatttgtgaaaaaaaatcataatacaacaataaaaatcatacaaataaaaaatacagtataacaactatttacatagcatctacactgtattaagtattataggtaatctagacatgatttaaagtatatagacagatgtgcataggttatatacaaatactataccattttatataagggacttgagcatttgtgaattttgatattctggtgggaggggatatataagttagactttttattttttaaagaagataatacgataaccattaaaaaacaatgcagaggccgggtgcgatggctcatgcctgtaatctgagcactttgggaagactcttgaggtcaggagtttgagaccagcctgcccaacatgatgaaaccccgtctctactaaaaaaatacaaaaattagccacatgtggtggcacatacttgtaatctcagctacttgggaggctgaggccagataatcacttgaacccaggcagcagaggttgcagtgagttgagattgcgccactgcaccccagcctgggtgacagagcgagactccatctcaaaaaaaaagaaaaaagaaaaatgcaaaacactgttactgtctagatccatgaaaacatgtatgtgaagatcataaaagaagatagtgtagttgtccctctgtatccatggaggattgtttccaggacacccccacccctatcctcacccctcaccaggataccagaatttgtggatgctcaggtcccttatataaaatggtttagtatttgtatataatatacacacattctcttatatactttaaatcatctctagatgataatactaatccctaatactaggtaaatggttgttaatactgtattgtttaggtaacaatgacaagaaaaaagtctatccatcttcattacagatgcagtcatctgtttttttgttttgtgaatatttttgattagaggtttgttgaatttatggatgtcaaacccacagatatggaaggccaactgttttggttaatttgttacactgaatttatttttcaaggtcaaattattcattgggctttactaataggagttctgtaacatttgagaggcataataaaaataaaaaaagttgggcctggcccagcttctttttttgtagacaaccatatcttttgaacaatgggctctccttgatgcagttcctatcatcatcatcattattgtttttgagacagagtttcactttgtcacccaggctggagttcagtggcacgatgtctgctcactgcagcctctgcttcccatgctcaagtgatcttcccacctcagcctcctgagtagctgggactacaggcacacaccaccatgcccggccaatttttatactttttgtagagattgggtttcgccacattgcccaggctgttcttgaactcctgtgctcaagtgatccgcccatctcagcctcccaaaatgctaggattacaggtgtgagccatcacacccagccattcctattattttcactcttccattcatagagcttatgaggtttttgcttcagacatacctgccaggcagctacaatactattgttctatcatagccgagctgatgttctgggggtttatttttgttcctgtttctggcgctatgatctaggcaagtctctgtgcctcagtttctccatttgtaatatgaagataagaatgcagacactgaacgaagatagtaatattattcattggatgtttaccatgtgacaaacaacttactaaatgctttacatgttgttactcataataacagccctattgttgtagatactcttatttttctaatttgacagatgagaaaactgaagcacagagaggttaaataacttgcccaaggtcacccagctagaattggcagtgctggaattcaaacttaggcagtttggatccagagtctgttcttaaccaccgtgatatcccctcgaactctttgcagtagtgcaataggaatcttatctttttttatgcattagaaatatttttaatactaaccatccagtgaaacatgtagcaactgatttccctaaagcctgtgcaagcaatacagtaaatgatgaaccctaaaagagatatcatgagttgatgatagtgtcaatatttattaagcatgggagtgtgtttgacacagaaatgttgacttctcatatacctgctttggaggtctataattttgcagctgttggtcaagaatgagaagactcatgtcttgtctacctttttggtaaagctactactctttagatcagtcgtgcccactgtctaatagaaataatgggaaccacattatcattttaagctttatattagtcacatcaaactaagtataaagaaacaggtgaaagtaattttaataattttaactgaatagtcatatcaaaacattattatttaatttaacatgtaaccagtatacccccttttggggtttgttttttttactaacttttcaaaatctaatgtgtatttcatacttacctagtgtgtattttatacttacagtacatcttaatttggactagccacatttcagctgctcagcagctatatgtagctaattgctgctatatttgatagcctagccctagctaatctataggaccaatctcagttgtggcttaagtctggactagtagcgtaggatttcaggagtataataatttctcagaaaagttgtatattttgacgaaaaatgctttgcccgtatgttgtcctcactatttttacaaattagagttaaatgataccaatccccattaaaaaaatgttgaggaattttcttagaaatactaacctgctttaactccagcaacttttgtgatgcagcagttctttttttttttttctcctagatatcaacaagtttctttggatggtccggattggagggagcacagatacaggcaaacatatcaaggagaatgactattatactccaactggggagttccgtgtggaccgtgaaggttctccagtgctgctcaactgcctcatgtacaagatgtgttactatcgctttggacaggtttacacagaagccagtgagtgactcataataatattaataacagtagtaataatagtgattactaatacacagtattttccatatgccaagcactagtaagtgctttgtgtctgttaactcatttaatcctcacagcaaccccaaaggcatatactgatattattgtcatattacctttatttttgttgtttgcatatttttttgagacagggtttttgctctgacacccaggctggagtgcagtggtacaatcatggctcactgcagccttgatttcctgggctgaaggagtcctcctgcttcagcctcttgagtagctgggactaaggtgcacaccacaatgcctggctgtttttaaaactttttgtagagatgaggtctcactatgttgtctgggctggtctggaactcctgagctcaagcaatcttcttgtcatggcctcctgaagtactgggattacagacctgagctactgcacctagctattgttatttttgttttgttttgttttgttttttgagatgaagtcttgttctgttacccaggctggagtgcagtggcacgatcttggctcactgcaacctccacctccccggttcaagcgattctcctgcctcagcctcccgagtagctagaattacaggtgtgctctaccatccccagctaatttttttttttttttgtatttttagtagagacattgtttcactatgttggccaggctggtctcgaactcctgacctcaagtaatccacccacctcggcctcccaaagtgctgggattacaggcatgagccaccgcacccagcctgttattttatatatgaggaaattgaggtacaaataggttatttaactgcctagtgtcacataactaatggcagagtcaggattcaaactgacaaagagtggctccaaattctgtgcttttgaccgttactttttattgtccttaagggtattacagtgaagacaggaacaaaagggaaagaaagtgacttttcgtatcttctgatgactacattgagagttatttgattaggttaagtctctccttctgacttcaatttcttgattctgtactagggagaatttctgacatgaatgcaggtctttgacttctggtaggcttttttctctgatccatgcaagggttgctagtgtattagaggctctgaatgacaatcctcaggaatagagggccttggaagtcggctccctatgtctgtcttatcagagataagacattgactggcaagcatcatcttgcatagaacttaagctagggtaacacttgatttgcccttactacctcatgcccttttttgcaggctctactctcaacaaattgcaggctgaggaataatcatcaattagtagatggtttcctgaatccatatactgtctctctaggaaattagcactgtagaaagaagtgtgttctttttcatccctctctagagcgtcctccaggctttgaccgtgtccgaaatgctgagattgggaataaagactttgagcttgatgtcctggaggaagcatataccacagaacattggctggtcaggatatacaaggtaagcagatgctatacgtctcagaaagcaacttttatttttggagattggtttcaatgcttataaaatgggacatatatttctcaaatagggaaatttctcatgacacctgtgcttgaaaagtagcttgcaaactcactgaaaattttacttattttagattgttcttagagagtagatgatcccagtctgccatcattttggcggttgttgcagtgatacttttccagctggggcttgactaaaccagtttctgtgattatcaggctcacgggtggggagagtgcaggaaatagagaaaaagttcacatgtttatatttagctacattttcttctctctctgaagaacttaaggtatatagagtcatatagaaccacataggagtatatctctcatataagaaaagattgagaacccttgatctatgtggagggtagatcagtaatattggtcctcacagaggtattccaaaaggctaagcagagagaatctagtctctagtcagtgcttgtgtattcacagccctaaaccaggctgcagaacccaacataatcctgcccactctgggtgaatccattttagtagaaaatttctccaaagttgatctgattgtaaatattaaactgacatctttatgttgcaggtaaaggacctggataatcgaggcttgtcaaggacataaatgtcacgtccagctctgatatgcttcgcactgagcacatcacatttaggacgttgaagatttttttttttttttttttttaatatgcagtttgtaagaacaaaactggatggcatcagaattgtctggaagttttgtcttgggcagtatgggctgggccaaatgaaatgatttttataattctaaacaggttaccaaatgaaatgtcatggctttactttggtcaattaaaggggggaatttttttaaaaaatgtgccttatttgttttgacttataactgatttgagggaggcaaaagctatgctaggctgccagaaggacataagcagaccttgtccattctcttagctccctaaattagccaaatagagacttctttctcaaatcaggaaaactatcaaagaccaattcagatcctacatttacagacagttttgtcataaccctttgcattgcagcacctagtacaattccttggaaacagcgtggctcaataaatttttattgaatgaataaatgtgggaccagaagagtgctagaagagtgcctttctgggctactatgtctctgttctcaatgtcttttatccttagacgctctttgactttataaatcagcagttttgaagactcaagacaaacagtgaaattattggtttatcaatggagaggaagaaactcttccagcattacatatagagcttgatggtcagtaggtgtttttgaatcagcttaaatataatcatacatatcaatttgaaatggagcttttcagtactctcacttattcatgacacaggaatgaccctttactcaaaactcttgtggttgttcaaaggtgagcttctttttcccttagtcttagcctatgtgttgctgttgtatattgttaccaagttcaactacctaattttgaagctctttccaaataagatacaaattaaaaggggaagcattgccagtaacaggtccctagagagcagtgccagcctgcctgcaagaaaagaggagaaacttcttaaaaagttttaagcctgggcaacataaggagattgtttctatgaaaaataaaaattagccaggtatggtggtgtacacctgtagtcccagctactcgggaagatgagattggaggatcacttgggcctgggaggttgaggctacagtgaactgtgattgtgccactgtactccagtctgggcgacagtgaaatcttgtctaaacaaaaacaatttaactgggaagcacagtggtccttgaggacatttaatatcaggacaaagagcctatgaatatatcactgatgtatataaaccctaaggcgttaataaaagctaactgtttagtgttatccatttaagggaacaggaggaattgcataacttttagattagtcatagtggtgctcctaagggatatgctgttgtatatttgtatagccagggcacttagccttccaaaccaatttatataccatgttcttcaactgtgggtgagatttagcctcaagatttgatttactatatgtaagtacattacttgatttctataaagaatctttagtggaagaggttattctgaattatttatcaatatgattaataccagttagaaattattaatgatcttcctttatactatacataggataacttttaacttgtcgctacagttgttgctctgaggatcttaattttgttactttctaggctacatgaagctatctttttaaaaagtgtactcttcattttcactgttattgtgtacttagcataaaaaactcaaatctaggccaggtgcagtggctcatgcctgtaatcccagcactttgggaggctgaagcatgcggatcacttgagcccaggagttcaagaccagcctgggcaacatggctaatgaacactaagcatagttttgatgtctttcatattaaagactttctcaaattcttgctagtctgctcctctttaagagtgggaccctaggcagggcgcagtggatcatgcctgtaatcccagcactttgggaggccgaggcaggcagatcacttgaggccaggagtttgagaccggcctggcaacgtgggaaaactctgtctctactaaaaatacaaaaattagctgggtgtggggtacacaccctgtaatctcagctactggggaggctgaggcatgagaattgcccaggaggtggaggttgcagtgagcagacatcatgccactgcactccaacctgggagacagagcaagactgtctcaaaaaaaaaaaaaaaaaaaaaaaagagtgggacccaaaaaagctgattgaaaggtctgtttgtagggggtgtagatggggattaataatgtgggtttcaatctactgtgatctggctgggctgttacattgggaaatccatgatactgatttttagatttttatcttttgcataggtaagattcccttgagaaggcttgcatattctcttactcaaggatgtaagccaggcagtcagctttctgggagtagagtagggaaagaagttgtaacaggctcaaccttcagtggataaaacttaaacttaatccctccgttttcagtaaggtgcccaagcttttaactgtgcctaatggtctccagttcacatactgtgcatttaccctcttaaatctcgtaccagctttggggagggacagttccttggttacatagaaagggaagggatacggggatctatttgttttttatgtagcctttaaacctaccccttttagccccatttttacctccaccttcagttacctggtgtcaccagttcaacttgagctttttcagagttctgtgatgttaattctgctttccattgctagctttgggattcatcttcattacctttcatctaaaggctttctgctttccaaaatgtgtctcatactctgttcttatgggttcttttaaatattggtatcctttactattaaaatattttagtgggctttcagaagagaatagaggctatttctatgtattctgtctttaactggtattctgctggagtctgtatatctttttttttttttttttcaggctaaaaagactccatcagacacacaggaaatttgcaggtcttcctcttcgtattctttgttttcagcacacagtgaggaaacaagagaaaatgggataaatgatataaaaacttgcttttatttttataccaggccctgtggctcgcttctgtaatcccagtgacttgggatgctgaggtaggaggatcacttgagctcaggagttccaggctgcagtgagctaagactgcccaattgcactccagcctgggtgacagagcaacacaccctgtctccaaaaacaacaaactgtaaaaagattacatgaagcctaatctgtgatgtcatgattcaaaactatacacataagcattttaagagttttttccttgatttttgttcctgactttgcttctttaaaagaaatgtgtgtttttgttgttggttgtttgtttttgagacggagtcttgctctgttgcccaggctggagtgcagtggcacaatctctgctcactgcagcctctgcctcctgggtagctgggattacaggcactcgccatcgtgcccggctaatttttgtatttttagtagagacgggggtttcaccatgttggccaggctggtcttgaactgctgacctcaggtgatccatacgcctcagcttcccaaagtgttgggattacacgtgtgagccaccaggccccggccttgagtaacattttatacttgtttcactttactattatcataatagccagttatgcttagtgtttgtatgtggcccagtcttaaggactaagaaaatatatatgtatatatataaaatatatacatataaaaaaatatgtttttttcctacggaatcatgctgttgcccaggctggagtgcagtagtgctcactaacctctaactcctggactcaaacgattgttctgcttaggcctcccaagtagctagggctacagggacacaccaccaagcccgactaattcctaaatttttttatttgtagagatggggtctccctatgttccccaggctggtcctgaactcctggcctcaagccattctcctgcctcgccttcccaaagtgctggaattacaggcaggagccactgcgcccggccagtgctggagaatgtaatggagatgatcctgcctatccctgagttccagtctagtttactgtcagagaatacttatttccatttttcctattttgttcttgagtctctttcctcagaatttacttttccacttaaatgacgtacgcagcttttaaatttgcgttgtaagatttattttggctctccccgcctgttctttgcacattaaaaatgaaaaagtttgtagaactaagctaagcagatggtcttcctgcaaaaagaccgggctgaagtaaagcattgttttggagctggttcacagaaaaaaggcaaaactggttatcctgacttcaagctccaacataaactgctcgctttctccgggaaacttgccccgccacatacacttgactgcgtggccagttctttcgaagcctctcgctcccaacacggagttcctcccatttcttcacagtcggctctcagcagctgctgctggtttctcggctccagcaccacgagtaccgcactctgaggtttacaaagcactctgcttcaccgactgtgatcctcacagtcctgtccggtggcctcacgcaggtggcggtgcagcctttcaggcccagagcggccaggagcgaagcccgcagccccgcctggaagcgcagcgcggtcggtcgcgcgcccctgaggcttggaggcctgggcttcccccagcagcgctcgagcaccgcccagtcgagcctcacaccggatgccacttcatatttgggcccagagctcaattcgcgccgatgcggtccgccgtccttaaatctcttcagccaggatctctccccgactgcaaagcagccctgggcgggagcggcaacatctccacgtcacccttttggagccgccgacattcagaggggcaggacacgggaacgcgcgctgtcttgctttacggcgcgggtgcgcgagtttgcggcagcgtgacgccctcaagttttggcgggaaaagcgctgcatttggattcctgcagtggtgggcaaaggacagtccggtgaggaagggcggccggtagagtagggaaggtttctaaagaaggagttcggggtctagattagtgagggagggcatggtgggagaaagttagcattgactagcgcaggggattggagagactcctgcggaggggcggtttcggagggtggaggaatggtaccaggaggttcccgttgtgggggcgggggcaggagggactaacccgctgctagctaagaaccccaaggaagagtcccagcccttcctttcgcctctgggggcagtttggccccgccccggcctttgggacgggtggggctgtggatggggatgggaattggaattgagcaattgggaggaggcgctgccgcaggcgttttctgccccataccgctccctatatcctcttcctctcttccccagacccccacctctccctcctccttccccagtcgttcgccggaaagcatttgtctcccacctcttcataacaacaattaatttcctctggggcctgaggagggcagaatttcaaccttcggtgtgcttgggagtggcgattgtgatttacacgacaaaatggtcaggtttagaatagttgttcgtggttgaaagacttggataaatgtggatgagatagaaggggaaggcaagagctgttaattttcgtgggcaatcctggggagaggcggggctcagtggcttcactggtgatcttacactctacatcttttctggattcctgccttttacagccgaggtgctcggtggagtcatggcagtgccctttgtggaagactgggacttggtgcaaaccctgggagaaggtgcctatggagagtgagttcttttaagcttgccttcgttttctgagtgcatattcattgttttggagtctcacactctggtgatttagaaagtagatgtttgagatccaagggttttggcaactgaagttacacagccttttgctaggattaaaaattttttccttccctttaaaaaaaaaagttttctttgtagagagctggaagggacacgaagttattgtttccatgcccacaaattgcttctcagggtttaagcattgcggttaatgagcaaatgagcagactctggagattgcctgcctggtttcagatccttgctctatcacatactggtcattgttttgtgatcttaggcaagcttcttaatgtcattgtgtacctctccttcactacctttagggtggcaataatcgcatctaccccataggagcttaggacagtcagttacacaagcacatatagtatgggattaatgctcttaaaagtatatgagtagaacatgtatatatgtgatgtggcttagaattatctcaatctattttatgaagcgtttattaaatgacttgtgtgacagcataatgacgtctttggagggttagctattgtatttcacattttagaaaagagtagtgtgtgttgagaacatagcagaaaccacttccttggtttctcctttgtggaaaaagtaatagaggtaaaatcgttttggatgagtcatgtttaatctttggaagttttagaagaaatggaattctgtaatgttaaaactcttttcctttttagagttcaacttgctgtgaatagagtaactgaagaagcagtcgcagtgaagattgtagatatgaagcgtgccgtagactgtccagaaaatattaagaaagagatctgtatcaataaaatgctaaatcatgaaaatgtagtaaaattctatggtcacaggagagaaggcaatatccaatatttatttctggagtactgtagtggaggagagctttttgacagaataggtatggaagaaatttaagataattattttaaacaagtttttaaatttgttttttaaatcttgggcatgctatttggtcgttgtcctttcaaaattgctcatgcaactgtgaaattggaatacattatctttaaaaaatttttccacctggtgttaataacataaaagcatatatagagtcaatgaaagaaaacttctttcccaagttatataagtgattttgatttaagattggtgtcttacagaatttaagagtgacaaacaagttttatggtacatcataaatgcagtgtatcctaaatgcaatgtattgcctacacaattttttctttgtagacattctagttacatgaaatcattgtatacattttatacatttacagatctaaaatagcatgctgtttcctcttggtttacatgaaataattgagaattttctaggattgctttttgtatattaagtaaattctatgtttgctattaatacttaaatattcgatgtagaatcaaaggattgatatttcagaacactgagaagtacataaaatctggatctaaatttataatttaaatttataatttaaagctattgtattaaataagtttatcagttaaaaactgataaagaggtattaggatctccagtgtgactcaggagagagttgagggtaaaagaaatggagttaatgagagagatcaaaatataaaaagataactgataaaagaactttcataataaaactgtttcacgaaggacctcacaggcatttgtggttttgtactgtgagactatatgaagtttaaatctgagccaggtgtggtggtacatgcctgcaatcctagctacttaggaggcaggaggattgcttgagctcaagagttccaggttacagtaagttatgatctcacgccagggcactccagcctgggtgaaagaacaagaccgtatctctaaaaaaagttaaattataaaagaagtataatctgtaaaatatttagtgaaattggcttagatttgcccagacttcccctttggcattatatttcaggaatgagaaaaataattagcatagcatttagaagaaatggggggaatttcaaggttactaaataaatcagggttagtataagaggaagcagaggctttgaagtcatggcttgcattcttgatttggatattggttttctctttataatttttctgtgatgacgccttttgccacctaacacaggtaaatgtgagttaagccccatatgtgttagtggactcctgaatcttttgttggcatttgcttctgtttgcctaagcacatttgtaaatgtctaagcttcaaattaagaagctatgtggttgctacctgattatatttagtcaataaacttactttcatatttgttttagagccagacataggcatgcctgaaccagatgctcagagattcttccatcaactcatggcaggggtggtaggtatagttgtctatttcccttttacttaaaattagagtgaatacattacattaccaaattctagtgtgtttctctctgcatccctcttaggtttatctgcatggtattggaataactcacagggatattaaaccagaaaatcttctgttggatgaaaggggtaagtttagcattttatcactacctaaaataaaataaaataattacctaaattattttaattacctaattattttaatatagccatacaaggcaaaatcaagtctttttgcattactggaatttcaagacaagatctgaaaaatcaaggaaattttggagacttcgtatatttggaaatcacaagtctcattttgcaatacaagtgcggatcaggtagagaaatctgacctaggtgcaagcctagctcactatatgtataagaataatttttttttttttgatacaggctcactgtgttgtccagtctggggtgcactgtattatcacagttcactgcagccttgacctcctaggctcaagcaatcctaccatctcagcttcccgagtagctaggaccaaccacaggcaggtgccaccatgcctggctaatttttgattttttgaagaggtggagtcttcctgtgttgctcaggctagtcttgaactcctggactcaagcagtttaccagccttagcctcccagagtgttgggattatagacgtgagccaccatgcctggccaagaatagtttaaaataatcctttaatggattaataaagggaagttcctgtggaataccctggaccttagtcttgtcctgttcactctttttttatgtatgacgtggataaaaatgtaagaaatttagttatattttctgaatgtcatcaaattgagaaggatggatagcgaaagctttaagcttacagggtcagaatcaaaaaagaaatgtcagctgtatgaggcagtagtttttgtctggtttaatgctttattcttagtattagaatagtgcttaacaaatggtcagcttttttttttttttgaaacagagtcttgctgtgttgcccaggctggagtgtagtgacatgatctcggctcactgtaacctctacctctctggttcaggtgattcttgtgccttaggcccctgagtagctgggattacaagcctgagtcaccacacctggctcatttttatatttttagtagagatggggttttgtcatattggccaggctggtctcgagctcctggcctcaagtgatctgcctcccttggcctcccagagtgctgggattataggtgtgagccgctgtacccagcctatacatgcttttttcttatgtgcatatggattttactttttacccctttaaactgagtttatatgacataaaaatctttatttttatttaaaactttaaaaattcaggtacacaaaaattcttatgtattataatgaaatgtaaatatatgtatatcaacccacctggtttaaaaatacaacattattcgtatataagaatgctcacagtggtgatgtttttaatatagcaggaaactaacccaaatgtctgtcaacaataaattatgaaatgcatggcttttcaagccatgtcacaagcagtgacacaagcatgtcacaagcagtgacatggatgaatttcaggtatataatgatgtagagcaaaaagagacagttgcaaaagaattcatatggtctgattctgtttatacaaagttcaaaaatatgtaaaacctagtatattgttcaagtatgtaaacatggagaaaaaaacatgcagaaaagcaagggtataataaaaccaaattcagaatggtctaagaaagtaggggagggaatgtatttaaggaagtatttaaagatttcaaaggaaatagagcattgtttttctaaagtgagtgggtgtttattacattgttattctttatatcttgtattaatatacaagatataattctttgtttctatttaatatttaggagtcttttaaaaaaagaaataaaatgttaccagtatttaatgtcctcctgtttatttcatcacaaatatattcttcctttgtttttctaagagctaaacacattcctacatttaaattttattatgtgcagttctctaacatagctgagtattatgttgcagacataacaaagtccaaggaatactatagttatccattagtattttaagtgattactactcataagtaatttgaaactcaatctcagtggtttgtccaatagtgtcatatttaactactgaaaagataatcaactgggtgcagtagctcatgcctgtaatcccagaggctgaggtgggacgattgagtgattctaggagtttgagaccagcctagacaacatagaccctgtctttatgaaaaattaaaaaaaaaaattagctagacatggtggtgcacacctggagtcccagctacttggaaggctgaagcaggaggattgatcacttcagcctaggaggtcaaggctgcagtaagctgtgatcacatcactacactctagtctgggcagcagagtgagacactttctcaaaaaaaaaaaaaaaaaaaaaaaaaagggtaatcacagtagctacctcctaagtcagatagaggtaaacatttcattggtttacatattgtgtgaatgtacttgatttttaaagaaatcagtcccctattttgagacatttaagttgtttctaacttataaaataggacagtgatggcttctatcaatttgtgtaaaaggccaatataaaaattgcgtcatgctataatattttttatgctataatattttttatgccattagcctttttgtcccacttacacactatttcatgttagtatgtatagatataccttgttgattgttttcaaaacctacctccacattttccattgtacaaatttggacatttatttacaaataatattgctatgaatattcttatgtttatgaatttgtgggattatttctatggatatagaagtgggaattgctagttcaaagagtgaatgtttcacagtttagtatgttttgccaaattgccctctgataatagagggccttttctaactcttaagactgggttacattcctttgctctaagatcctatagtgctctatatttttataaccttcataacagttttctattgtcagtcttcactaatttatctattacctgcattggctggcatagtgtctgtcactaagttacagtagatattcactaaacataagttaagtcctgcctgcagtttttgtgtgttgaagatgggaagttagggtggaagttgggtcttctgatattttttttttgtacagagtttgtcctctttttctcagactctctactttgaagaaaaaaattactgtggtttgttgaattttggtgtgtcttcacatattttcttctgccaactgggtttgtttgctgctgagaaagttgtgcctaacatactactgatgtttccttcctgccctccaccctacctgatgaggggccttgctttactttcatctcaggtttagagtgctcttttccagaagggcagccccttctgactccagcctctttctttaatctggtccagactgttctgtgtgttgataatacttcttttaagttaatagaagaggtgaggcctttttctacttttagcatagatgatgatttattttatttttttaaatttctttttgtctattttgcttattttaagagaagttctacaaaccttaagtaacaccagtgattttttttcagtaaaacttaattcctgtaagtatatctatttgcaaaacatttttattcagtgtcatctttttttcttttggtttagataacctcaaaatctcagactttggcttggcaacagtatttcggtataataatcgtgagcgtttgttgaacaagatgtgtggtactttaccatatgttgctccagaacttctgaagagaagagaatttcatgcagaaccagttgatgtttggtcctgtggaatagtacttactgcaatgctcgctggaggtaagagctatttaatcatggtaaaactcctataaaaagtcagattagttatactgaaataaatgaaataaaccaaggaattcatgtttatataatagtttttgttttcttttttaagagacagggtctcactcttggccagactggagtacagtgagctgttatagctcactgcagcctcaaacttctaggctcaagcaatcctctggcctcactcttccaagtagctaggaccagtggtgcctgccacaagacatctggctaagttttaaaaattcattgtagagatgggatcttgctgtgttgtccaggctggtcttaaacacctggtctcaagcaagccttctgtcttggtctccaaactgttaggattaaagtaaagacatgagccatggtacccagcttttatagtagtattttaatagtgtcttgatcggtttggtaactgctgtaacaaagtatcatagactgcatagcttataaacagcaaatttatttctcacagttctggaggctgaaaatatgagattaggggtgccaacctggtcatgttttagtgagggccctcttcctgatttgcagatggctgtcttgctgtgctctctcatggtggacagccaagagagcagaagcaagctctattgtggtttttttttttttttttttagaccagagtcttgctctgtcacccacgctggagtacagtgatgtgatctcagctcactgcaacctctgcctcccaggttctagcaattctgtcccaggctcccaagtagctgggattacaggcatgcatcatcacacccggctaatttttgtattttgagtagagacagggtttcaccatgttggccagactggtctcaaactcctgacctcaagtgatcccccaacctcagcctcccaaagtgctgttttttgggttttttgttaaatgaccagatgttgtgagatattgtgtctgttttttgtttttttgtggttttttttgagacagggtctcactctattgcccaggctggagtgcagtggcacaattcaaggctcactgcagccttgagctcccaggctcaagcgatcctcctgcctcagtctcctcagtatctgggtctacaggcgtgcaccaccacacctggctaatttgttgtgggttttttttcacagacggtctctccatgttacgtaggctggtcttaaactcctgggctcaagtaatctgcctacctaagcctcccaaagtgctgggattatataattagtgccctataaagatacaatattgtccgggcacacaagcccttattagacattaataagctcttaataagagcactaataccattttttgagtggtcccatcaccaggacctaattacgtctcaaaggccccacctccgaatgccattgcattatgagttaggatatcaacatgacttttgagggggatacaaatatttagcacattgcaaatagtaacttatttataatcccaaagattttttaagctaaggcatgcatagttattaaatatcacaacacttatctctcctgtgtatcatgtaaacatttgtgaaaacaagactagggcaagaaatgattcatctgttttttggtttttttttttttgagacaaagtcttgctctgtcgcccaggctgcagtgcagcagtgtgatcttggctcactgcagtcttgacctcttgggttcaagtgatcctctcactttagcctcctgaggagccaggactacagatgcacaccatcacgcccagctaattttatttattttttgtagagatggggtctcactatgttgcccaggctggtcttgaactcctgggctcaagcagtccttctgcctcagcctcccaaagtgctgtgattacaggcctgagctgccatgcctatcctgattcatctatctttgaagtgcctctaaagtttccaagttgggattcttagtgtgaaaaccatattgaattaattcaaaggaaacttttcatggatttatattattatttttccttgaaatctttataataagaacatttaaaaaaactgggacttgctttgtttttagaattgccatgggaccaacccagtgacagctgtcaggagtattctgactggaaagaaaaaaaaacatacctcaacccttggaaaaaaatcgattctgctcctctaggtaactgaattatcttgagtgaaagagtaccgatttcttggatatgaagtcttgtgctatttgaattttttcttacttttttttttgttttaaacttacaaataattcatgttcgttgtagataaaatagtaactataagtaaaaaattaaggaaaaaataactctttagtcccagaactctgcaatagatttttaaaaatattttggggagtgtatattcagagcaacttgaatctgctcttagatggctttttacttaaagttttcatatgtgctatactttgttgcaaatacactcgtttgttgcttaattatagggatgcactctaacaaatgtttcattaggtggtttcatcattgtgtgaacatcatagagtatatttacataaatctagatagtatagcttactataaatctaggctatttggtataccctattgatctcaggctgcaaacctgtacagcatgttactatactgagcactgtaaggaattgtaacataatggtatttgtgtatctaagtatagaaaaagtatagtaaaaatacagtattataatctaatgggactgtctgttatacgtgtggtccattcctgactgaaacatcattaatgtggcccataagtatgtaaaatgaatatatgtatattatttatatgtgtttttatacaaaatgagatcacactaataatattttgtaactgtttttggttttagtgcgcagcgaacattcttccatgactataattgtaggtctacatcgttggtttaaaggctgtgataatattctgccatgtggatatgccttactttactcttttaatcactttgttggagatttttctaaattttcacagatacaaaagagatataagtatctgtgtaacttaatcatgacacatacccttaaattgttcattgaaatccccagaagcaaaattgcaggatcaaggatgtagtttttattattatggcttattttgtcaaattgcttcccgaaagttcgaaccatttcatcacagtctcatcaatttacattaaggaaaaaaactttaaataatagtttttcatttttattttaaatttaatactaatgaagttgtataccctttatgtatgtattagttttttgtctattttgctcatttttgtcaaggatattgtttttcttaccactttgaagcttttttttttccttgataacacattgacctttgcacttgttacaaatacttttcacaatttatcatttattttcattttgttttgctatattgacattcaaatctattatcttgtcctttgtggtccctgactataatttctttggaaaggtcttctacctctactatttaaaagttccctatgttttcatttagtgtttttatggcttcatttttccatttaaatctttggtccattaggaaataatcttcacataggaagatacgtgaattttttctcaagaaaattaagataccttaggatggttagttagattactgtctcttaaaaagttattggtaagtaaatgttcattataaaactgtgtgaataaggaggtcacgtgagaacatgacattgaagtaatgaaattcggtattgaaaatggataagaggggtttctgtatctttttgttaatctcgtcacatgaggagaaacatttccatctggctcttgttctcagttgcaaacaattgagaatcagatcagggaagactactccaagatacagcagcagagaaaaactgcatgaaattaaagcagtaatttagtagctttaattctttctcttccccaggaataatatttagacataagtaggctaacagaaaatgtgtttcttacctcaagccataggcttctctaacatgattctttcgtgaatgttgtcgtaatgtttgtttttagctctgctgcataaaatcttagttgagaatccatcagcaagaattaccattccagacatcaaaaaagatagatggtacaacaaacccctcaagaaaggtaatatccttaaactacaagtttgtttgtttttctgtggaagaaaaggtaattgcaaagttattatcacaagtcaacaacacatgatagctatgatctctgtcctcatggagattataatgtccagtagaaaaaaatacagaaataattttgtttattaataattataaaggggaaagtcagggtactatagctaagtgtttgaccaagtctaagggacagggaagacttttcttcctgaagaaattacattaaatctaagatttgaagattaaagggaagctaggcaggcaaagtaagtggcagatttgattctgaacaggggaagcagtatttgaaaaatcttagattttagaaagtctgatgcttttgagaaacttgaaagatcagtatggcacaagccgtgtctgttgtgttcatcattgtatcatcagtgctttagcacagtatatggtgcaccataggcactcattaaatatttgttgagtgagtgaacagggaagtgggagaggaagacaggtttgagatgaggccagagaggtcgctagtggccaatttgtggaagaagaccttgtaagccatgttaaggattttgggctttaacttaagaccactggggagacctctgagagattttaagcaagactatgacatagtcatatcttcggtttaaaaatatttctctgacttccttattttttttccattgttttttatgaatagggaaagattcagggtgctgtaggtttttctgctagttgtctagaagtgggaggctggtggcttggaataggttagggcaatggtattggagaaatgagatgattccaaagaaatttaagaactagtattgataggactgttaggctgtgaatggaaggagagaggacaatgactagagatgatgaatgaaaaacattcagagagttattaatgtttaactctgtcctcatggatagaaaagagttaatgtttaaacattcactcttctttaatacctctctgcatgtttcttcctccttgtcctaacttaaagtccaattctcccctgaggacactgcttcctctgaagcggtaggtgttttctttcccataccctcatgtcctttgatctggacatggtacaggtgtcctccttattcttcattgtcactttctcccatcttcctttatgtctctcccctctaacttttgaaccccaaattaaaatttctgccgtactatcacagtctgcaaaatgactcttgatgttattttcgtcatgattcttggtgatttaaatatttatttggatcatcctcctgatatcctgacttcactgtttcttgaccctctctcctatagtgatgttgtctttgaacacgctgcactgatcaccagtataattttttctgacttcctcccttaatattctaacttaaacagtcctttgtatctggacttgcaattaattaattctatctcttcagtctcttacctgctccctctctaggtccttgatttcatctttacctatcttaaatctttaggttagtcattataaatgactgctttgcgttcatcatcttcaatttccttgtccccttctctcttcatcatacttagtgggtaaaacccagtaagtagtttctgggtttaatctagtagttttctacgtactgcacacttgtacctgcacaacagattgcagcaggagaaaaatacccaaaaatgttcactttaaattcaggattactaatctcaagtgggcccttaatgcttcctggcatttggccttcgtttccccacatctttctctgtcctgttctcctaaatcacgtttttataatacttttctctttttttttttttttttttttgagacagggtctaggctggagtgcagtggcgccatctccactcacttcaacctctgcctctcaggttcaagcgattcgattctcgtgccttagccacccgagtagctgggattacaggtgtgaaccaccacacctggctaatttttatatttttagtagaggttttgccatgctggccaggctggtctcaaactcctagcctcaagtgatccccctgcctcagcctcccaaagtgctgggtttataggtgtgagctactgtgtctggtcccttaacttttattatcttctctccatcctcactctcagttgttcactttgcttcctgtgtcactgggaaatgaaagccacaagagaacttaggcaagctcccaccaccatctcctccatactaactgcctctatgctcatgtactctctttcatcctgtattgctgtagataaattgctctggatgtaagccaggtctttctcttacccactcaatgactttgtctagcaatttttctccctctcctacattattaatttttccttctctaccggatctttctcatcagcatatctacatgctttttctcccattttaaaatcaaatcataatggtaataaaatttctcttaactccacttttccctaccattccatcttcttcacaattgaatattcctaaaattgcttctcatctctaacacctcaaaactagttttcaatttcatctattttgttgccaagagtcacagtgatttttggaacgtgttgccaagttcaatgtaatagtccactgtggtcaaccgaggtctgaaaagattaaatggaaagtaccagaagtaaacaattcatcaattcatgggttttggccgggcgcggtggctcacgcctgtaatcccagcactttgggaggccaaggcgggcggatcacgaggtcaggagatcgagaccatcctggctaacacggtgtcaccccgtctctactaaaaatacaaaaaattagccgggcgaggtggcggtcgcctgtagtcccagctactcgggaggctgaggcaagagaatggcgtgaaccccggggggcggagcttgcagtgagccgagatcgcaccactgcactccagcctgggcaacagcgagactccgtctcaaaaaaaaaaaaaaagaaattcatgggttttatttatttatttaattcgagacgggatctcgctctgtcgcccagactggagtgcagtggcgtggtctccacttactgaaacctctacctcctgagcttaaatgatcctcccatctcagcttcccgagtagctgggactacaggtgtgagccactatgcccggctaatttttgtatttttggtagagatgaggtttcgccatgttgcctatgcttttctaccaaaaatacaaaaattagccaggtgtggtggttcacgcctgtaatcccagctgttctcaaactgctgggcttaagcaatccacccaccccggcctcccaaagtactgggattataggcatgagccacaatgccctgccataggttttaaattgtgtgctgttctgagtagcataataaaatcttgtgctgtcctacttcatctcacttgggatgtgaatcactcctttttccagtgtattcacgttccatgtgctacctgcttgtaactcccttagtagctgttttggttattagatcgaaagaacatatatagggtttggtaccatttgtactttcaggcatccacttgaacatatccctctgtggataaggggggtactactgtagtcagttctcagacctcttgttttatctcatcaatattttatacagttgatcatgccctcctcctttaaacactttcttcatttggcttccaggcgttacactcttctgattttcgtccttctcactggtcgctcttttcagtctcttgatggttttttttcatctgctcagcctcctactattggagttctccagggctgaatctatggatctcctttgttttcttctccacactcactccattagtgatattacttggtttcatggctctaaataaaactatatgttgatagtcacatttatatcaacctagacctttcctctgaattccaaacttacatgtcttaactgccttctgaaatttcacttgaatgttaagaggcatctcacacttgatgaattccaaactgagttactgatcttttcctttcaaacccattccttttcaaagtctttcccatgttggttaatggcaactgcattattcttattatgcagatcagaaactttggaatcatccttcatttttctcattctcttttacttcacatccagtacaccagctaattctgttaacctctatctttaaaaaaatcttagaatctgattaccttttttttttttacctctactgttaccctatcattccaaattaccatgatatctttccaaaatgttctgatttaaaagtgaattagaatatatcactattctacccaaatcctccaatgctttagttctcacgtgtagtgtaagctaaaatcagttcatgacctgtgagttcttacacaattttgttccttacattacctctccaacctcagttctgctttgctcccccttggtcatattgttgttcttcttattgttctccaagtgctctaggcacacttctacctcactgtttttgtagtgactgttcctatgtctgaaaatgctttttcccatgggacttatttgcatgtcttattctcttactttctttggatattgacttcagtgtcatctttccaataagcctttcctggccatgctatttaaaatggtatcctcttccctctaacacatttcttaaatttttaaaatttttactctcttgtggacatacgcaatccaacacgtttcttcattttattttccttcagtgtacttaccaccatttagcttactgatttttaactgtatttgtatttattttatgttattttgtctctcctcagtagaatgtaggatttaaaaggtcaagagttttttttctattttgctcactgctgaatacctgatacctagaataatgcctggcacagagtagacctaataaaatatctgaatgaatggattaataaataaaaagcaggtttaaaaaaaaacttgagcatgtttaaaaagaaacaaacttaagcatgtttaagtggtttgggtacggatcctgtagagaggaagaggctgacagtctaagagaaaggaaataaataacagaggatcaagatccctaaggaggtagaagggtatgggctccagagcacaagtagagagatgaacattcgatgggagaatggaagggatgaaaagatgtataataatacaaataacttagctttggtagggataagttgatgtagtttctgtctaatggctttattttttctctgaaatgggaggtggtagtataggtactggatggtagtcttgggaattacagaaaagtgtagttttgaaatgatccttgtggagaaaaggaaaggaaactagagaaacaaatattatctggcaatattgaggtttagctagggattgtaaccataaatttacagtggcgtcattttccatataatattcttctttataaagcttttccaaggaatcaaagaatgttggctatagcagattcataatgtttattgctattatcataaattattttttattttaaaaagttctagtcctttagccaggtctgttgtcttcatagaacattgttctgttacccataaaagatgccattaagactgtggcctgggccgggcgcagtggctcacgcctgtaatcccagcactttgggaggccgaggcgggtggatcacgaggtcaggagatcaacaccatcctggctaacatggtgaaaccccatctctcctaaaaatacaaaaaaaaaaaaaaaaaaaattagctgggcgtggtggcgggtgcctgtagtcccagctactcaggaggctgaggcaggagaatggcgtgaaccctggagacagagcttgtagtgagccaagatcgcgccactgcactccagcctgggtgacagagcgagactccgtctcaaaaaaagaaaaaaaaaaagattgtggtctgagcatactccacactttgaacatgtctacagatcatacttaggtattgtaaaatacctaatttgacaaatgagttttagtaattttataacttggccatattttttataaaatcatataggaagactttgttttatatcttacaaaaattttgtgttaaataaatagatttagacatagttttacttcttcaagttgccagttgggttaatttaaaaacatacttgcatagaagacttgaaagcatttgtatttgttttcttttttaggggcaaaaaggccccgagtcacttcaggtggtgtgtcagagtctcccagtggattttctaagcacattcaatccaatttggacttctctccagtaaacagtgcttctaggtaagactgataaagattgagtagtttttgattgtagtattccccatgaagaataatacatgtatgtgttttttcataataatcgacattaacataatactgtaagcatgagaacttgtgtgtgatataagaaaggcctgatagattttattttattaaatgtatgtttctttctgtcttaatgcctcagtgaagaaaatgtgaagtactccagttctcagccagaaccccgcacaggtctttccttatgggataccagcccctcatacattgataaattggtacaagggatcagcttttcccagcccacatgtcctgatcatatgcttttgaatagtcagttacttggcaccccaggatcctcacaggtgagggaatttaattttttaaaagtaatggcagctctttattttttattgtcttaaagtccttttttaatgtgtaaatcttagatatataacttttaaatcacatgtattcttttttggtcaaggaagaaagagaggagggaggccttcatgcaaaataattttaagtcagactaaatagctatgatattactgtctttagtcctaatggatttattcatttgtcttctgtttgacatgtagaacccctggcagcggttggtcaaaagaatgacacgattctttaccaaattggatgcagacaaatcttatcaatgcctgaaagagacttgtgagaagttgggctatcaatggaagaaaagttgtatgaatcaggtgtgtttcattgattttcattataccttttcctgaagaagaatttaaatatttgagtaaaagctatcattagtatattttttaaatataggctgtggctcacacctgtaatcccagctttttgggaggctggggtgggcggatcacctgaggtcaggggttcgagaccagcctggccaacatggtaagaccctgtctctactaaaagcacaaaaattagccggcctggtggtgcatggctgtaatcccagcttctcgggaggctgaggcacgagaattgcttgaacctggaagacggaagttgcagtgagccgagatcctgccagtgcactcctgcgtggccaacagagtgagactgtctcaaagaaaaccaaacaaacataaaaatacaaagtaattagttaatttgaaaaagaaactatttaagtaaaatgttctttactttaagaaataatacttttttttattttgttttattttttaatttttaatttttagccactgtgcctggcctaagaaataatatttcttaaaagacctttttattgttattaaaaatagtagggagctggaatcattatctttgtaaaaactatgtatacttaaactgtagacaataacagttgactgcctactatgaaagacgaatacattagcaatcccacactttctcccatctcccttgattgcacccgtcaatttttattgtttatattattagagcatagttataacattggtattctaaactgtctttaaggcttttcaaaaaaaatgttaatgtcaatgaaagacaaatagggtagctgttttttactcaaggagactaaagaggcctgataactaagtgcaagtgcaatgcatgatctttcactagatcatgtatttgaaaaaaactataacggacattattggaacaattggggaaatttgaatatggactgtatattaattaggtaatgtttttgtatcagcgtcagatttcttgggtgtgataatactgtggtttgtaggagaatgcccttgttcaaaggagaacaagtgtcaaagcaaagttgaagtgaagtgatattttcattcagcttaaaatttaaaaaaataaagggcaaacaactacataaaggccaataaacacacacatatctggtagataaggccaatgaagagtatatggttatttattatactcttttttcagtttttctgtagattcgagttttcaaaattaaaaattgggggaactgttactgtgtagaaatctgaggtcagcctgatagtcttctcactcacataggtgattcactttctttcaggtagactcagagataaaatttgcataacataagaatcatcactttaaccattttaaaatgtaaaatgcagtgctttttagtatattcacaaggttgtgcaaccatcgcccctaattccagaacattgcatcaccacggggaaaaaaaaacaaaacacctctgtaccacctagaatcactctttattcctttcttgctccattcccagacaacctcgaatctactttctgtctttagggattgcctttttggacattttatataaatggaatcatataacatgtagtcctttgggtctgtctgctttcatttagcacgttttcaaggttcatagcatctatcagtactttattcctttttatggctgaataatattctgttgtgtgtatgtattacatttcgtttatccattcatccactcatggacatttgggttgtttgtactttttcatcattatgaataatactgctgtgaacaatcttgtaccagtttttgtgtgaccatatgttttcaatttcttagatatatatggaggaatagaattgttggagcatatggtaactcttcatttaactttttgagaaactgtgaaatgatttttccaaagcacctgtaccattttacgttcccatcagtaatgtaagagggttccaatttctctacaaccttgccaacacttactgcctcccctttttgctatggccatcctagtgtgtatgaagtcttatctcattttgcttttgattttcatctctctaaagactaatgatcttgagcatattcttatatgcttattggccatttctttataacagtatccggatattttgtccatgctttaactggcttgtttttattgttgagttgttagagttcttttacattctggacactagaaccttgtcaggtacctgatttgcaaatattttatcccattctgtgggagaaaattcccccattcttttgttttcttgttagtgtcgtttgatgtactcaagttttagattttgatgaattccagtggatctataatttctcttttgttgcctatgcttttagtgtcaaatttaagaaactgttgcctgatgtaagattgtaaagatttatactttatgctttcttttaggagtcccagcctcctaagtagcggggactacagtcttaaagtttagctcttatatttaggtctttgtccattttgagttaatatttgtatatagtatgatgtagggtgcaaattcaaatgtttgtatgtgaatattcagattccagcaccatttgttgaagatatgttttactattagatggtcttggcacctttgttgaaaataaataggtcatagatgtatgggtttatttctggaatctcaattctttttttttccttttttttttcttcccctgtggactcaattcttttatttcatggatctatatgtctgtgctatgccgttaccacactatgttgattactgtagctttatagtgaattttgacattagaaaatatgagttgtccaagtttgttctttttttcaaggtattttggttatttgtggccccttgtttttctgtcttttaggattatcttatttctgcaagaaaaaaatttggaattttaaaagagattacattggggagtatttccattttagtatatattgagtattctttattcaaggtgcttgggaccaaaagttttgtggattttacatttgtttggattttggaatatttgcatatgcatattgagataacttacagatgggactcaagttgaaacatgaataattttatttatgcttcatatatacctgatacagatagcctgaaggtaattttatacaatgttttaaataattttgtgcatgaaacaaagtttgtacattgaactatcagaaagcaaacctgtcaggtatgaaattttcagtttgtcacatgatgtcagcacctgaaaagttttggagtttggaacattttggatttcagatttgagattaaggatgctaaacctctaatagtaactcttctaatccaataacatggggccttttttttcccatttttttagggtctttaatttctttcaagaatattttgtagttttcagtgttcaagtcttgcacttcctaggttaaatgtaatcctgtttattcttttttttttttatcctgatgctgatgtaaatggaattttttaaaattttattttcaaattgttcattgctatatgcaaatgaattttgtatattgatcttgtatcctgaaaatttgctgaattcattaactccagtagtttttttgacaaattctttaggttttttaatatattaagattacattatttggcagggcgtggtggctcacgcctgtaatcccagcactttgggaggccgatgcgggtggatcatgaggtcaagcgtttgagacctgcctggcccacatagtgaaaccccgtctctactaaaaatacaaaaaattagctgggcgtggttgtgggcaccggtaatcccagctactcgggaggctgaggccggagaatcacttgaacctgggaggcggaggttgcagtgagccgagatgacgccactgcactccagcctgggcgacagatcaagactccgtctcaaaaaaaaaaaaattacattgtttatcaatagagatacaggaaattgttttacttttttttttttttttaacccagatgccttttaattctttttgtttagttgtcctggctaggacttccaacattatgttgaacagaaatagagtctttgtcttgttcttgatcttagggttaagtttcgagtctttcagcattaagtatgatgttagctgtggggtttttgtttttatggtgaaagagtattggattttgtcaaatgttttctccgtctattgagataatcatgtggattttttttccctttattaatatagcttgacctcctgtgcccaagtgatcctctcatctcagcctcctaagtagctgggactacaggtgtacactatcatacccagctaactttttaaaaatgtttttgtagagatgcagtctctgtgtttaccaggctggccttgaccttctgggctcaagtgatcctcctgagtagtgggtactacaggtgtgcaccaccatgcccagctaaattgacagttttcatcagtctgtttattttgtctaatgttagtatatccacatcagctcaccagctatcttgtgtattttcctttttttagatggagtctcactatgttgcctaggctagactgtagtggctacttaaaggcacgatcatagtgcaatgcagcctcaaattcctgggctcaagtgaccctcctgccttggcctcccaagtaggtgggactgcaggcatgtaccaccatacccagctaccagctctcttttggttattgtttccatggtctattttttttttccttttccttttaacctatttgtgtctttgaatctaaagtgccttagccaggtgtcatggctgacacctgtaattccagcactttaggaggctgaggtgggtagatcacttgaggccaggagtttgagaccagcctggccaacatggtgaaaccccatctctactaaaaatattttaaaaattagttgggcgttgtggtgtgcacctgtaatgccagctattggggaggctttaggtgggaggatagtctgagccattggagatcaaggctgcagtgagtcgtgatctgattgcatgactgctctccagcctgggtgacagagcaagactgtctcaaaaaaaaaaaaaaatcgcttcttagccttttggctaagatcaagtgtagtatctattcctatcagtttaagtgccttaatttctcttccactttttggacaggtagttttgctggatatagaattcttattagcttttgtctttcagcactttgattatgccactactgccttctagcctttgtggtttctgatgagaaatcagctgttaatcttactgaggatctcttttatgtgagacgttgctgctctcttgctgcttttatgtttctctgttgaccacagtttgactatggtgtatcttggtgtggatttcttttttcattctgttcggagttcgttgagcttcttggatatgtaaattaatgtttttaatcacacttgggaagtttttggccacaatttcttcagatttttttttttatatctaactctcctctccctcttggactcattatgtttattgttggtatacttgatgtgccacagttcttagactctgttcatttttctttattcttctttctttatgtttctcagggacagttttggttgctgtttttcctttataagggccatactttgtttccttacatgctttgtaattttttgttgaaaactggacatattgtggcaatatgtggcaactctagaaagtcagattttcccctcttgccagtgtttgttaccgcttgatgtagttgtttgttttttttagtggtgtttgtttttttttttttttgagacggagctttgctcttgttgcccaggctggagtgcagtggcgtgatcttggctcactgcagcctccacctcctggcttcaagtgagtctcctgcctcagccttccaagtatctgggactacaggcacctgccactgtgcctggctttttgtatttttattagagatggggtttcatcatgttggccaggctggtctcgaactcctgacctcaggtggctgggattacaggtgtgaggcaccatgcccggccctagtgatttttcttatataattttttaaagttggtattgtttgtcatgcatggctgtacaatttctgtcccattagttttagtggtcagctaatgattggacagagatttccttaaattctgtataccaaaaacaaaaaatctgcagagtgttctgtatttgtgttggggcacacctgcaatactcaaccaagaagtttacaacgttgcttcagccttcgctatctgcttgtgcaaaatgcaaagttagggcacatgtagagcttaggggccttctcagctctttcctaagcatatgtactgccctggtcatgggtgtgtctttttagattcccaggtatatgttggaccttttcagagtcctattccccagaaacatctcactccctaacctcttcttccaaacttcttgggtagtctgtttgcaccagttgctttcattgcttcaggcaacagagactaaagcattttcctgtaagtgttttcagcaaacgctactcaggagtagctttagcacaaggtgagttagagttacaaaggtgaaataaagacaagcctctttttttttttttttttttgagatggagtctcgcactgttgcccagtctggagtgcaatggtgtgatctcagcccactgcaacctctgcatcccgggttcaagcgattctcctgcctcagcctcccaagtagctgggattacaggcgcctgccaccacaccctactaatttttgtatttttagtacagacagggtttcaccatgttggtcaggctggtcttgaactcctgacctcaggtgatccacccacctcggcctccccaagtgttgggattacaggcatgagccactgtgcctggccaggacaagccttttgatcaggtcattttagagggtcagatcggcttaagatagtttgtaaatgaggtttattctgctcccacctggacctatgccttaaatatgaactgttattttcaaggctgctactgagtgaggagcaggggataaacagggtaagttaaaatgccagaaagctcactgttcttactgcgtttcacttgttttgaataagttgctgcaagcttttagctagtttacaatgttctgaaaaagttgattctgacaggctttggcaggtttttaaaattgcttttgtggagtaatggacttctggagttcttttctctgccattttcactgacatcactccttgattcactctctctcagttcttgaagtattttctttgtctttgaagtttaagagcttaattcagatgtgttgagttgaatatcttgtattaattttcccagaacatagtgggttatttcagtgctgcacagtcgtggtatggttgtgtgttttcatagtttcttgaagtaagaattattacaaaaacttttgtaatttgggctgtgttttttgggcaaatctgctgatctcgctcgggcttaactcatccagctgtagtcatttgatgtctttactgtggctggtggtctaaaacatccttactcccatatttggagtcttggcactgtctgttagctgagtcttttctttctgcatcattcagctaggctgagcgtctttccatgccataggaacgttctaaaagactgaaagtggaagttgaaggcctctcaagacctttgccatcttctaattgccgctctagcttttcagccacaagtcaggcctttttctttctcacattttaataatcttgtttttcctcccattatgttttcatctttgattgtttcttctttcagtggtattttggtaaaagacagtaagttttgttgctatgagttcatatacactcaatccctaggagctgcacccctgttgatagattgggttggggacacacatacccactgggagaagagagactctggaatgagtgagattatcagcatacttaatattactcctgttatggaggtagccagcaaattttttttaattgatacaataattgtaatgtattcatggggtatgtagtgatgttttgattcatataatgtataatgatcagatcaggataattagcatattcataatttcaaacattgtgggaatgggaatgttcagtgatgggaatgttcagtatccttctagcaatttgaaactctattattgttaagtatagtcatcctacagtggtctagaacttactcctatctagctgtaattttgtattctttcatgaatctctatctttcccttccctctccccttcctggactctagtatcctctgttctgccttctacttctatgaaattaacagtttttttgtttccacatatgagtgagaacatgtgatgtttaattttctgttcctggcttatttcactttacataatgtcctccagttccacccatgttgctgcaaatgacaggatttcattcctttatatggctgagtagtatttcattgtgtatatatatcatattatcctcatctgtttgcttggctttttgttttgtttttttgagacagggtctcgctctgtcgcccatgctagagtgcagtggcgcaatcatagctcactgcagcttcaacctcctgggctcaagtgacccttctgcctcagccccctgagtagctgggcctgtaggcatgcaccaccatgcccgctaattttttgggaattttagtagagatgaggtatcgatatgttgcccagcctggtctgaagcgatccttctgctttggcctcccaaagtgctggattacaggcgtgagccacagtgcctggcctacactcatctgttgttggatacctaggttgattccatatcttggctattgtgaataatgctgtagggttgcaaatttctcttccatataatttcctttcctttggatcagtagtgggattgctggaacatataggtagttttatttgtagttttttgagaaacttctattctgttcttcatagtgggtttactagtttattatctactcacccatgtggcttaaccttatttttgttgccttaggttactatatcaacaactgataggagaaacaataaactcattttcaaagtgaatttgttagaaatggatgataaaatattggttgacttccggctttctaaggtatttttatgttttattgtattctttctatggaaatatttctatatgaatttttttaatggcattatgtttgtatatatgtggcatttgtaaataggttacttgcttttttcgtttaatattatgagcatgtgttttcgttatctatttttcccgaacattgtttttttcaaatgacattttccttattataaaagtttttgccaggcgtggtggctcatgcctgtaatcccagcactttgggagtccgagacgggtggatctcgaggtcaggagtttgagaccagcctggccaacatagtgaaaccccatctttactaaaaatacaaaaaattagccaggcgtggtggcgggtgcctgtaatcccagctacttgggaggctgaagcaggagaatcatttgaacctgggaggcggaggttgcagtgagccgagatgacgccactgcactccagtctgggtgacaatacaagagactctgtctcaaaaaaaagaaatttctgcttttgtgaaaaatgtagataagcaaaaaatgagaaaataaaaataattctaaattttcagtgatcacattaatatttcgaagcattttaatatttttcttaatttatgtcttttaataaaaattatgatttgttacaaatatttcattataatttaatgaacctttaccagttataataattctgtgattgctattttatgcatagatttttttgttcatatttctgatgatttctttagaaatcattgattctaagatgatagtattacagcccttgatatataaaaccaaaataacatttttctctattttctgagagattgtatgtggctctaaagagggttggaggggtagctgctgtgttagagcatttgccgcagtactctttgtattagagatttgctgcaatactgtttttcagatgcttgctacagaattaaattaagatcgtagtataatgaaattcttctcataactaaatctattgattttggtcagtagtgttatgacaacaagacttcagtttagttgtatagtttattgttagtttccaaaccctcactgcctatggaatgtaatgacttaggtccagatataccaacacctgaaacagataggatgccatgtttatctgctctctgagctcagtgcagtaggaacagtgatgggcatgaaaccacatcagaattatttgtgtaacaattttctcttccaggatatttggtcttcataaacagaccgaaaagaaaatggtagctagacatacctaaagatgtttgtctcttgttaccactacaaagagattgattttaggacagaattttgtttttgtttttgttttgacataattttttaatactatttctaatatagggtgatggattggagttcaagagacacttcctgaagattaaagggaagctgattgatattgtgagcagccagaaggtttggcttcctgccacatgatcggaccatcggctctggggaatcctggtgaatatagtgctgctatgttgacattattcttcctagagaagattatcctgtcctgcaaactgcaaatagtagttcctgaagtgttcacttccctgtttatccaaacatcttccaatttattttgtttgttcggcatacaaataatacctatatcttaattgtaagcaaaactttggggaaaggatgaatagaattcatttgattatttcttcatgtgtgtttagtatctgaatttgaaactcatctggtggaaaccaagtttcaggggacatgagttttccagcttttatacacacgtatctcatttttatcaaaacattttgtttaattcaaaaagtacatattccatgttgatttaattctaagatgaaccaataaagacataattcttgtgacttttggacagtagatttatcagtctgtgaagcgaagccagcttcaaaacatatccccaagatttgtacttatattttcaaaagggcctggccagttatataaacctgtttttgaattataatgattaattaaaattgcaagtaggtgttttttccagtgtagttagtaaaatacttgtattttacagtgttgcataaactctagtgcttaactaactttactctaaaaattactgttgaacatcttaaatatttttctatattttctactttcatagccatattttaaccttttcaacttactggtgaccaagcttttaggtgataaagaataaaagagggaagggaagagtaaggaagctataagaaaaatagatctgattctttgttcctttacctgttagacttacaaaaagtttgtttttctaataaaatttgtatcaactttggggcatattaggttgaggccttggctcctgcctgtagtcccagctacttaggaggctgagagaggaggatcgcgtgaacctggaagtttgaggctgtagtgagctatgattgcaccagtgcactccagcttggatgacagagtaagaccctacctctaataaaaatttttaaaattgtaaaacattataaaattaatcagttattttaatctgaagccaagaacatgtagaatgttatgattagagtttatcacatattaatgtatactggcaaattgtgttactggagtatacccataggaggaataaattcaaacctgttttatttatttgaacctatttacggtatgcttaagaattgaatcagtataaattctcaaatatgggagaaattttgttcttgagaattatctgagtcattaatatttttcaaaaacagctctcactgacttgaacctcttctgtaagctctaaccttttacctgctttacatttccacttgaatgtctagtaggcatctcttgaccaaaaacagcttttgattcctgttctccaacctgttcctctcctagttttctccatctcagaaatgttacttcctctgcaaagtctttccctgacttatctaaaataataacctcctctgtttgctgtgggaatttgtatagaatggtgggaaaatttcaagtttcatatttggattagctctgacatttatttatctgaacactggtaattgcctcagtaaagacactgataataagtaccttttagagttattttaatctttaatgctttaatgtgtaggaagagtatagtgtcctgttttgcacagaaaggcattctgtaaataataagttgccttaattttcctgtaatgttcattatattgttgtgggaaggtatttactcctattattaaaaataaaaatgtgtaaaatttactacctgaagataacagttcaaattttgatggaaaaatcaacctatgcttgtgtgtgtgtgtgtgtgtgtgtgtgtgtgtgtaatgtgtacagtgtgtgtggttgttgagataagcataattatataaaaatacataaaatatgtacacttcaatgtgcagttgtaaagttaacattcacttaaccacaactcaattgtagaaagatcatttacagacccttaagaacttcctatatgcagtctcccaatcacaacccacttctttcccccagaaataatcacaaaatagactttggtgataatcttttccttcgtgtgttttagagtgttctcagctatttatgcaaataatatcatttagtttatgtatttttaattaatatggtttttattaacgaactttatatacattttgctgtatttttcatgtgttgattttttatagccatgcttttgtgcatattgaattcattaattttaatttttatataggatgtatttatgaacatcccactaactattctgctgctaattgatatttggattgtgtacagttcgatgctattataaaattcttctaaggacattcttgtacatgttcatttgttttgctaggtcctagagtctaaggtatatatccagaagaggaatagctggatattaggatagaataatgacaaactgttttctaaagtgattgtacagattagtgtttccataggagaaaagtgtacagttactggaaaaacagtttggaatgatctaaagcataagaatgttcatagcaacagaatgtatttctagtattccaaattttcacctacagttggtgtggtcagtataagttgttgtttttgtttttgttaatgtttttttttcctttgagacagggcctcactttgctgcccaggctggagagcagtggtacaaacatgactcactgcagccttagccttgcaggctcaagcaatcctcctgcctcagcctcccaagtaactgggaccacaggcacatgccaccacacctggctaacttttgtattttttgtagagacagggtctcaccatgttgcccagtctggtctagtctgttttaacaagttgttgctgtgtaatgatatatgtgtggtgttaatttgcttgttcctaagtttaaatgaggtagagcattttatgacatgcctgttctagtcttttgcttatttttctaattgccttttctttttcttaataatttcagttcttcatatgttcagcatactagtcctttgtcaatttacatgtattgaatatgtatactctcccattctgcggcttattgttccattcttcatgaacatttgtaattttaatgtcctatttagacctttcctctgtctattgttttatattttgtattaaaggagtcattcattactccaagatcatgaagattttcttgtatgtaatcatgtaatcttcttaaaagctttatggcttttgctttttttttttttttttttttttttaagagtcttgttgtgtctccaaagctggagtgcagtggcacaatcacagctcactgcagcctcagcctccctggcccaagtgatccttccacctcagccttctgagctgggactatagccatgcaccaccatgcccagcaaattttttattttttgaagagaccagatttcactgtgttgccgaggctggtttcgaatgcctgggctcaagtgatcatcctgccttggcctcccagagtgctgggattacaggtgtgagccaccatgtctgcctggcctgttttttggctgatttaggtctataattcatctgaaattggcttttgtgtagaatgtgaggtagagattaggtttcatttttttccttcatatggctatccagtttagcactggttattgaaaagatcattattttttttcactagtcttcattgatatccaatcaagtactcaaatgttttaattattttttatactttgtattgaatcagatccaaataaagtttaaacataataatcgattgatgtcttttaagttgcttttagtctgtaagttccctctttattcccttttttttctcttgcagtttattggttgaagaatccagctggtttactctatgattttcttaagtctagatttgtgggtttgattgctatgatagtttcagatctttcttctattttctgcatatcctataaatacattcgagatactagtcctgtgtcaattatatgttgcatataggcattttataaatttcctaagtaccatttttcttcatgccacaaatttttatgtgtactatttttgttatccagctcaaatttttttctaatattgttatgacttttttctatatttttacattgtagttctcagatctttatatgatttattttttgatccataaattattttgaattatgtttctgaatttccaggcctttgggaattgtttttatttaaaaaatgtttttattgagatattcacatagcttaaaattcactttttaaagtgttgtactccctttaaagtgcacttctgtggtttttagtatgttcataaagttatgcaaccatcaccactctcaaattctaaaacaatttcatcctttcagaaagaacctccctgctcattagcagtcactccccactttttcttcctccagtctctggaaaatactaacctacattttgtctctgtggatttgcttattccagacatttcatataaatagaattggataatacatgtgtggcttctttcacttaatggtttcaagattctccatgttgtagcatgtatcaggactccttatggctgaataattttcgtgtgcgtgtgtgtgtgtattgtacattctgttcattatgtggacattttagttctttttacttcttggttattatgaataaggctgctgtgcacattcttttacagcttggtgtgtgtccacacattttcagttttcttgggtatgtacctagaagtagaattttttgatagtgatagtttttacaattgttgggtacaggcttctgtatatctccatgtaattaactgagttaatcatattcagatcttacatatctttactgcttatacagtgaattactagagaagcatgttaaaatttactatgatttggatttgtgtatttttacttgtggttctcatttttttctttttttaagagacagggtctcattatattgcctaggctacactcaagctcctaggctcaagcgatcttcctgcctcagtctcccaactagctgggactacaggtatatgccaccatgcctggctaggttctgttaattttgctttatacattttgggactatttccttaggttatatactgatacatacttgtcatatcttcttagtgaattaaaccatttatttatttagaagtaacttctttatagatataatacttttgccttaaatattctttatctgatattaatctagccccacttgctttcttttggctaatatttatatgattttcataaaggatttattaacaaaaaaaaaaaagaaaaagtttgcatggcataacttttttgagacggagtttcactcttgttgcccaggctggagtgaaatggcgcgatcttggctcactgcaacctccgcctcctgggttcaagcgattctcctgcctcagcctcccgagtagctgggattacaggcatgcgccactacgcctggctaatttttgtatttttagtagagatggggtttctccatgttggtcaggctggtctcaaactcctgacctcaggtgatcagcccaccttgtcctccccaagtgctgggattacaagcgtgagccactgcgcctggcctggcataactttttatctttttacttttacttttctaaatcatataaaatgtccctcttttaattatcttaaaaatccaatctgacagtatttgtttttcaatggaccattgattccatttgctttcactgtaattactgatatatttggatttatttctatcatcttactttggttccactggatttgcattcttttctaccattttttttttgccttaaaaaattttttttcttgcttagtattttatttttgagacagggtctcactctgtcacccaggctagagtgcagtggtaccatctcagctcactgccacctctgcctcctgggtgcaagtgattcttgtgcctcagcctccccagtagctgggattataggcgtgtgccatcatgtctggctaatttttgtatttttagtagagacagggtttcatcgtgttgtccaggctggtctcaaactcttggcctcaagttatctgcccgccttggcctcctaaagtactgacattacaggcgtgagccaccgcgcccaaccttgcttagtattttttaaaaatcactgtatttatcctcctctcctaatttggaatctatatgctttttttttttgagggttactctagctattacaatatgcatacttgttatagtctgaagtcagtctcttgtcctctttctgacaatcaaagatctttacacttttataatttatatacaattgtctattttgataatatatatgtgtttctatgtgaatatatgtacatacatatctttgaagagatagtagatttgcatgtagttgtaagagttaatactgagacatcctgtgcacctttcactcagttttccccactggtatccaataaaataatataacgaggatattggcattgataaggtcaagataggacatttccatcagcaccagaattcctcatgatacccttttatagcaacattcactttcctcccacttctggcaactactaatcttttctctgttcctgtaattttgtcattataagaatggtatcttagcctgtttaggcttctagaacaaaaacactgtaaactgtgtggcttataaacaacaaacatctatttctaacaattctggagtctgggaagtccgagttcaaggtgccagcagattcagtgtctggtgagggcctcttccccatagatgtcacctttttactgtgtccccacatagtggaaggggcaaagcagctctttagggcctcttttttaagggcactaattccattcaggaaggtcctgccccataacctaatcacttcccaaagtccccatttcccaatactatcacattgggaattgggtttcagtatattaatttgtctggaggggaatacgagcattcagactacagcagttacataaataaaatcacatagtattgtaccttttggaactggcttttttcactcaacataattctctggagattcatccaggttgttagcctgtatcaagttcattcctttttattgctatgtggtatccacggtattgtttaaccattcacctgttgaaggacatctttgttatatctactcttttgctattgtgactaaagctgctataaatatctacaggcttttgtgtgaatatagtctttatttctctgggataaatgtactggagtggcactactcaattatatggtagtcatatgtttagttttcgagaaaactgccactcatttccagaatggctgtaccattttatattctcaccaccaatatatgagtaatgcagtttcttcacatcctcatcaatgttgtcactattttttgttttagccattctgataggtatgtagtaatatctcattgtgagttgaatttgcatttccctagtgggtaatgatgttgaacatcttttcatgtactcatttgtcatctatgtatctttggtgaaatatctcttcatgtcttttgttcgtgttccaattagatttgtttacattgagtttttaaagctacttatgtagtcgagatactagtcctttgtcaaatatgtcatttgtgaaaaaaaaaaaacaaatatgtctcccattctgttgcttatcttttcatcctgttaacagagtgctttatagggcagaagtttttaatttcaatgaaatccagtttaccaattttttcttatatggatcatgtttctgttgtctatcctagaataagcctagattctgaagattttttccagtgttttttcttaaattttgacagtttaagactgaagcatttcaaattaattttcgtataggtgtgaaccttaggttgaatttcatttttttgcctctgaatcttaagttgttccaccatttgttgaaaaggctatccttcctccactgaattgctttttaaaatttaatattagagagcagtttttatttttatttgtttatttttatgtatttttccttttaagttccttgtagattctggatattagaccttcgttgaattatgtggtttgcaaatattttcttcctttccatagattgtctctttactctgttgatagtttcttttgccatgcagaagctctttagtttaattagatatcatttgttaatttttgtttttgttgcagttgcttttgatgtcttcatcataaaatcttttccagggcctatgtcaaaatggtgtttcctgggttatcttccagggtttttatagttttagttttacatttaagtctttaatccatcttgactttatttttgtttgtggtacaggaaaggagtccagtttcagtcttctgcatatgggtagtcagttatcacagcatcatttattgagtcctttttccattgcttgtttgaatccactttccatttgagtgcttttccccttgcttgtttttgtcaacttggtcgaagatcagatggttgtaggtgtgcagcattacttctgtgctctctattctgttccacaagtctatgtgtctgcttttgtacttagtgctatgctgttttggttactgtagccttgcagtatagtttgaagtgaggtagtatgatgcctccaggataatagccattttaacaggagagatatctcaatgtggtatctcaatgtggtaatatgcatttccctgctgattagtcatgttgaactattttttttttttttttttggagacagagtctcactctgtcgcccaggctagagtacaatggtgcgatctcagctcactgcaacctccacctcctgggttcaagcaattctcctacctcagcctcccaagtagctgggattacaggcacccgccactacgcctggctaattttttgtatttttagtagagacagggttttaccacgttgaccaggctggtctcgaactcctgacctcaagtgatccacccatctcagcctccccaagtactgggattacaggtgtgagccaccatgcctggccgaacattttttcatatacctattggccatttgtatgtcttttgagaaatgtctgttcagttcttttgcccattttaaaatcagatttcttttgttttatttgctattgagctgtctgagtttcatatgaattctggttattaatcccttgtcagatggatactttgcaaatattttctcccattctgtaggttgtctcttcattccgatttttttttgctgtgcagaaatgttttaacttgatgtaatactatgtctgtttttgcttttgtttcctgtacttgtgatgtcttccacagaaaaacctttgcccagacccgtgtgtcctcttagtgttttccaaatgttttcttctagtagttttatagttgcaggtcctacatttagaactttaattcattttcagttgatttttgtgtgtgtgtatggtgaaagatacggctctagtttcattcttttgcctatggatatccagtttttctagaatcatttattgaagagactgtccccagtgtaggttcttggcatctttgttgaaaatgagttggctataaaaatgtagatttatttctgggttctctattctgtttcattggtctacgtgtgtatctgtattccagtatcggtctgttttggttactatagctttgtagtataatttgaagtcaggtggtacgatgtctccagctttgttttttttttttttttggtttctgtccttgattctattgatgttgatatgtcatgtttattgatttgcatatgttgaactacccttacatccctaggatgaattctacctgatcatggggaagatctttttaatgtgttttttggattctgttttgtagtattttgttgacggtttttgcatctatatttatcagggatattggtctggaattttctttttatgttacatctttgcctgattttggtattatggtaatgctggcctggtaaaatcagtttgataggattccctcctcttcacttttttgagtagtttgggtagaattgatattagttgttctttaaacgtttgatagaattcaacagtgaatcatcaggtcctgagcttttctttgatggaagactttttattactgctttgatcttgctactcattattgatatgttcaggttttctatttctttatggttcaatcttgataggttgtttgtatccaggaatttatccatgtcttctagcttttccaattttttggcatatagtgttcatgatagtctctaatgatcttttgtgtttctgtggtaccagttgtcatttttcctttttcatctctgattttatttatttgggtcttcattcccctttttttttttttttttttttttttgtagtctaggtaaagatttcttgaatcttgttgatcttttccaaaaaacaactttttgtttcatttatcttatgcacttttgtctaaatttatttatttctacattgatctttatttctttgcttctattaactttggatttgatttttttaaaaaaatttggttctttgttttagttccttgaggtgcatttttaggttgtttattttttttctgtttttttatgtaagcatttattgctacagatttcctttttagcactatttttgctggatcccatagattttgatgtatgtcatgtttccattttcatttgttttaagaaatttttaattttacttctaattttttttttctttttacttattggtctttcagaagcacattgtttaattttcatgtatttgtacaacttccaaagttcctcttattattgatttctagttttattccagtgtggttgggcaatatacttgatatgattttgacttttttgaatttcttgagacttgttttgtggcctctcatatggtctgacttgaaaagtgttccatatgtgatgacaagaacatgtattctgcagtagttggatgaaatgttctataaatgtctgttagatctgtttggtctaaagtatagtttacctctgatgtttctttgatgatctggatgatccgttcactgccaaagtgggttgttgaagacccctaatattactgtattgcagtcggtctcttcctttagatctagtaatatttgctttatatatttaggtgctatggtgctgggtacatgtatatttactatttttatttctctcgctatattgacttctttaacaatctataaggatgttctttatttccttttacagtttttgcttaaagtctatttgatataaatacaggtaatcctggtcttttttgctttctgtttacttggcatatatttttccaacccttcactttcagtttatatgtatcttcgtaaagtgagtttcttgtgggcaggatatagttgaatcttgattttttttttcaatccattcagacaacttttgttgttgttgttgttgttttgtgtttttcggtgtttttttttttaaagaaaaatttacctttgttatagattaaagggtacacatgccggtttattacatgggataatttcacgatgctgaggcttggggtcccagtgatcctgttaccaaggcagtaagcatagtacccaacagatggttcttcagtccattcccccatctctctctctccctgctattgatccccactgtctattgttctcatctttacattcatgtatactccatgtttagcttccacttataaatgagaacatgttgtatttggttttctcttctcgcattaggtcacttagtataaaggcctcctgctctatccatgttgctgcaaaggtcattatttcattctttttcatggctgcatattattccttgtaaatgattcctctctattgtaaatgagattgtgctcttgaattggttctcagctggaacactattggtttataaaaatgctagtgattgtcgtacattgattttgtcaattccaggagccttgtgtcagattctttagggtttttcatgtatggactcatatcatcagtaaagagagagagtttgacttttcctatttgaatctctttcatttctttttcttgcctcattgctctggctaggacttccagtactaagttttttgtttttgagacagagtcttgctctgtcacccaggctggagggcagtggcacgatctcagttcactgcaacctctgcctcctgggttcaagcaattcttgtgtctcagcctcccaagtagctggaattacaggtgcatgccaccacgcccggctaatttttgtatttttggtagagatggggtttcaccatgttggccaggctggtctcgatctcctgacctcaaatgatccacccacatcagcctcccaaaaagtgctgggattacaggcatgagccaccacacctggctgatttttaaaagagtttccagtaagttttagttactatgttcattgtaaggattagtctaaataatgtatcccatcattaagtctcagttgctagtatttttcctctaattaattcagtatgtatttccttagaataaagaccttctcacagacaacctggtttagttaacagaaatgagggtatttaacattgatataacactattgtctagttcaaggtccgcattcaaattttatcagtcctaacaatgtcttttgtaaaaaaaagtttttccccttgcctgtgttcaaacccagatcatgcatggttttcatgtccccttagtctcctttcatttggaatagttcctcgatgtttatatttcttgaccttgatactttagaaaaatacagaccagctattttgtataatttccctaaattttgttttatctcatgttctcacattattgggttcaagttatgcattttcacaagaccactgtagtgatgatgtatactcaattgttgatatttggatttttgccattttttttgtttaacatttttatttgacccacctaattgttgggggttttttaaaatttcattttaatttctcatttttaattaattatttatttatttttgagacaagatctgttgtctcaaaaacagaccttgtctgttgtccagggtatagtgcagtagcacaatcatagctcactgcagcctcaaatccctgggctcaaggaattctcctgccttagtctctgggtaactgggactataggcgcatgtcaccatgaccagatacttttttaaaaaatagtttttagagagggggtcttgctgtgttgcccaggctggtcttgaacttcagggcttaagcaatcctcccatgtcagcctcctaaagttctgagattacaggtataagccaccgtccccagccttcattttatttattagctttttaactgtacctttctgtattttttaaattcttttttccaaggattatcatatcttatcacagtttaaagttaatattgtactacttcacttaaaaataagaacctttcaaaagtataggtccacttatctcctcatcctttgtgctattattgtcatatatatctacttacattaaaaaaaagtctgtgcaggcatggcttttaaaattcagaaaaatagtatgtatgtcttaaatttacccacatctttactatatctggaactgttcatttctccctgtaggtcagggtttccacgtggtattgtttctctttagcctgaagttcttttagcttgtgtgcatctactggttgtgaattctcttagctttggtttatatggaaatgtgttaccttcgcttttgaagggttattatcttggagataacattctgctgacagtattttcccttcattacttcgaagtatctcctcttgttttctgctctccattgtttctgatgagaaatcagtcaacatttgtatcagtgttccactatatgtaatgtatcttttctttagaccagttttgaatttttctctttgaatttcagtaatttgcttattatgtgcctaggtatatttctttttcttttcttttttcctttttttttttttttttttgggatgaagtcctcgctctgtcgcccaggctggagtacagtggtgcgatctcgggctcactgcaacctccgcctcccgggtttaagtgattctcctgcctcagccttccaaatagctgggattacaggcgcccaccaccacgcctggctaatttttgtatttttttagtagagacgggatttcaccatgttggccaggctagtcttgaactgctgacctcgtgatccacccgcctcggcctcccaaagtgctgggattacaggcatgagccactgtgcccgaccatgcctaggcatatttctttgtatttatcctcccttgagtttattgagcttcctagattttataagtttatgtttttcacccaatttggcaaaatttagttattatttatttaaatgtctttttctgtctcatctctttcctattctcaactgcaatatcttacatattatttgttatgttccacagttcactgaagctttattttaattcttttcctgtgttcttccgatttgataattactattgatctgtcttcaaatttggtgactaaacatggtctccaatatgctattaaaccatgtagggatttttctcaattattgcacttcttagtacagtaaatacaataatttccattggttcatttttatagtttcagtatctgtgtaagattcattgtctgtttattcgtatggcactattttcctttacattcttgaatgtatctttaatagctgtttattgcctttgttcactttgttccagtatctgtgattcatatgggggtcaaggtctatagactgcttttttttcttggctatgggtcacaattccctgctttttctatgtgtaataattttttattacatagtagacatagtaaatgaggaattgtagagattctgtactcttctgttcctctgaagagtattgacttttgttctattaggtctgtctccttcaatgtggacagaagctaaaatcactgccctattttttcagctttcagatgttattgtttttgagcctcctggagtcagtgaccagacaataatttggtcagaggttatcctcaaatttaggggcttctctgtggctgtcttattttcaggagtaccccctaattttgcagctgctctgctagtcccaacctatgttctctgaaacttcaaaccagtgagcctgtggctttttgccagcctgtgatgcatggattgagaagtaccctccagcataagctcacaaatctctctttttagtggtgacttctcttcagttcctttggaggagctttcaaatcttttttttatgttttgtccagaacatataattgttacctgtgagagggttacttcaaattattccactataaatggaagccagaattttcctacccttaaattttttttttaagatgagtctcactatgttgcccaggctgtctttgaactcctgggctcaagtgattatcccacctcagcctcccaagtaggtaggcctattgacatgagccatcatacccagttaattttttaactttttgtagagacggggtcttgctgtgttgcccaagctggtctcaaattattttcctgcctcagcttcccaaagcactgggattacaagtgtgagccatcatgcctggctccttaaattttaacaacatatttgaacttacatttttccctcaacacctatacctagtagactattatttatcttctcccttcaaaaaaaaaagttattagtgttgacaatgttggcaggctttcatttcccttctggccaagttgaaaattcatttaggattttagttcctgctttggggattttatttttgtatactattttatctaggggtatgagtataagttcaaaataattttccttcagaagtttgaagatgttccattttcttccagcttaccattattgccagtgaagagcttgttagcaatatattttggggaaggggtcatgatgtgtatatatgttgaaattttaaattttatatacagtaaaattgacttcttgttgtactgttctaagagttcttagaaccattctggctactttcattgtggtggaaacagctcagatttagatcttgcagatttggttgtggaatctgcctatagctctctgtagctctgtaaccttggtaaatttggaacaacatggagtatgaataaagaaaacatctctgtgtcacatttccttatttgcaaaaaaggatgatgccatctttcctgtctaccactctgggatctttcctgaggatcagatgagaccgtgtatgtgaaaacatcttgaagaacataacacttatatgagggaccgtttagtatttccatttgccctcctatcctgtatagatgattcagtaacattgtgtgtgaaaaaaatgatttaagcattatgaactgctgcaatatatagcaaataaggaatcattatactattatcattatgttagtagtggactactgaagactagaaactctcaagagccaaagaagagttgagtttttgtatgccataataaatggaagagtgtgtagggatggaaaagggggggtgtcagaagtacctgcacgtttacaccctgtaaaagattaatacctactttgcattcctctttgttgtctctgcccttggagactcctttactttcataaatatggaatgcttaaacaatgcacccagtttagtgtcggtgtggaaggaagctcatgttgaccctgcaactagattaatgggggaaaaaaaggtctgtcttgagcctgtgtgctttaaccatgtgaaatttattgaaaaaaaaatcaggaatattgagagaaagagttggagcagggaagacaggacagagaagaatggataaaagcatgaatagaagaagaaagataggatgtttgagcatcctaatgctcaggcagaggcagatgtggtcagttgttgactggggaaggaactaaatataaaatgagccaaatagagtgatggaggctttttactgcctgagtcaaaacaagcaagggcccaggcttctagatcttattgcagaaagattgatttcgacagcatataatttgcatcctcgttccatgggagaagaggttcatagatgggcacatgttctcacacccttgaaccatgaattggagttttccacctgaaaggagcagagacagactagtgagcagaaagcttcgtcctccaaccttagcctttatctgtgatgctcagtgtctccatgcaggatggtcaagacctccacttgtccattatcccttctctttctcttctatttgcttcctctgggaacttgccccccatcagttgcccactcctttcttatattgtcagtccgtttctatggactccttttttggtttacaaggatgctcaggttaccccaaatttaaaatactttctcttaatcgtgctactcccctagcactatccttcctttccttacagccttcccagagtctgcctatcctcctcaccttggcccctcacagtttgaatcatgaccctactatgccgaaacctctctcaaaagtcatagagatctactcatcaaattctgcatccttttctcaggacttttttaacctctttgcttgcacatcatactgtggactacaccctttcttttcttttcttttttttttttgagacaatctcgctctgttgcccaggctggagtgcagtggtgcaacctcagctcaccgcagcctccacctcccaggttcaagcgattgtcctccctcagcctcctgagtagctgggattacaggcgcaccaccacacctggctaatttttgtaattttattagagacggggtttcaccatgttggtcaggctggtctcgatctcctgaccttgtgatccgcccacctcagcctcccaaagcgctgggattacaggcgtgagccactgcacctggcctgaaactacaccctttcttgatactctctgcttctgacaaggtcttccccactgctcatctactcctctggatccaattatttctgctctcccaagttgaactgtcacattaccaactaaccgatgatcacctccatgccaatatgctaagggcatctaaaacttactatgcccaaaatgaaactcattactttcctccccaaacctgcttgtttttgtgagtttcctttatatacttcctgtaccacaccttcaaaacctctgtcatctctgattcttccctttgctttttccatccaatttgttgtgaaggtctgtcagttctacttgcaatctagtttgtttctgtcactcggtttccatttatcaaacatttggccgggcacagtggctcatgcctgtaatcctagcactttgggaggccgaggcaggtggatcacttgaggccaggagttcaagaccagcctggccaaaatggtgaaacactgtccctgctaaaaatacagaaattagccaggcaggcgcttgtgatcccagctactcaggagggtgaggcaggagaatcgctggggggcagaggttgcagtgagctgagatcgcgccactgcactcagcctgggtgacagcaagactccatctcaaaaaaaaaattaacggacctagtaaggaactatgctagactctggagaatgcaaagattaataacatcatttgatgtcaagagctgagagagataaaaatagccaattattacatgcaatggaaaaaccatgttatatgctatgctggcaaataaatgattaattttggtattttgattaaggggggcatagtatcaaggaaattcttaggaaggaagtgagactgaactaagctatgaagaattgttagcatttcgattagaaaggaaagaggataatttcaggctgaagcataactggagaaaacatgaaaacatgaaactgttcaggaagtggtgacttgcgtagctggagtaagtgtagagtgtaaacagggatgcagaatgagtgaaaagacatgggagagatgttaataagtctttccatcagtcactcctattaccttttactgaaatattacaatagccctttaacaggttctcttgtgtccactgtaacttgcttctaaggtaatcttcctgaagaagcgctttgaccaacctggatgggctactggctctgccttttcctagtaacaggtctttaggcaagctcctactttgtgaggattaaatgataaagggtattttaaaatgcatatcatactgtctggaagcaataaataaaggagaactattaaattcaaactctttttaactgacactgaagctcttgtatcagctggctccagtcaacctttccaagtttatcttctatgtctctgctcaccatcctcaaaaaactctttgctctttttcctatttacatcctgcacttttctgacttttgctttcattccctgtctctggaatacccatcaaccattgctgtatgactaaatcagtatctctttaatcttgactgcacatcggaattgtctaggagcctttaaaaaaatactgatgcctggattctattcccagagatcctggtttaattgctttggtgcaacctgaacattaggattttttaaagttgctcaggtgattgtaatgtacaaacaagattgagaactcctggcccaaatcgtaaatgttccctcaaagcattttctgaataccaccttctccccatacttctctgcacctctaatctttcctttccctgaactctctgcactttatatgtgcctttcttaagacacaattttctcccttgtgatattgtttcttatttcttacattataacataatctctttgtacacagtttatatttgagtcatctttctgtagttcatggtatgtgtcattaatgttttccgagtgatggtggatgaatgtctgcatgtagaaataggaaaatgacatttctagtgaggaagaagaaaaactacaagaggagtcaggcagtgtggttcctgggatggaaataaccagtatcccttattttagggatgaggaactgagagtaagggtaaagaggtgtgggaatatactcagactggtctggtaacctgtgaacacagacttgtagacagttgtttattagtttatccattcaatatttactaaatgcctaccatatgcttgacattgtgctaggtcccaggaatatatagctatagcttacagtcaatgtcccaatggctcatggggcaatcaacacattgctttaatgggaagagacagctagtctctctgccttctcttaggcctaatgggaagggcatctatctcttcatcagtacctggtggtagaataaagaattctattctttattttctttctttctttattttttttagatggagtttcactcttgtctcccaggctggagtacaatggcatgatctcagcttactgcaacctccgtctcctgggttcaagcgattctcctgcctcagccttccaagtagctgggattacaggtgcccaccaccacacctggctaggttttgtatttttagtagagatggggttttttcatgttggccaggctgatctggaactcctgacctcaagtgatccacctgccttggcctcccaaagtgctgggattttaggtgtgagccacctcgcctggcaagggattctgttcttagtccttgaaaaaataaagttctgaatcttcaagttccttgattctttcctgggcccctgtcattccaactgccccctaccagaagtaagttgatgtgttctcaggcagaaattgcctcatgaagtccccatataccttcaaagatcttctttaacatgcactgctgggaattctgagtgatgcaggttccctctccacgaagacattttccttgatcattcatataagcacatgtgtagcaatttaatattgtgcctgaaaatttaagataagcctgatgacatttccttgtggaccagatgtgtagccttgattcacatctgggaggggtaatgggcaataggtagcatggatactacacatttatttcttagttctttttggggatctgggccctgtgtctgatagacctgtgccagaggaaattccttcattcttcttcatctctgaccctcattgctgatgaatcccaaatttctctctctaatatttttactccagtccatatctgcattgacttcctgggcatttatcattagatacccttctgtcatgtgacagcataggagcaaaatgtatgtgtgattttcatctcccttttgtactccccatcatactctcacccacaaggcacaaacacttggagtcatatttgaccgattaataagctatgttagaatgctctaacattgcaaaccctgtgaagagtgtgtccttctccattttcaaattgaccttattgaaggtcactaacagcactatctttgaaatacttccatgttgcctcttttactgtctctactgctaatcccccagtttgggaagcctaaagaagtggaaagattatgggctttgcacagtcctaagtttgaatccaaagtttgccactttctagccatgtgacattggacatattacatttgcctcacttctttcatctgaaaatttagaataatgatatttaaacaatagagtgaaatgtgaactatgtctggtaataacttgaggcatcaaactttgggtcttgttttctttcccagaacaaacccttttaattaagagccacagactagcagttgtcctaggaactcatttctggatctaaaagaaaatagctttacattccatgttcaaacaaaaagaaccaccagctgcacacatctctttacagaatttgtaaagttatagcattctaacatggtttaagaggcagggttagcataaagctaatgaaggttagtcttcagaactctgcactttcatgatccccttctagggaagtcggaagggctgtgtattcataatttcttatggagagtgaagttggaggggtactggcattttgtatttgttttatttttcttatagagggccctccatattgtttagctttcaggctcccacatgcctcttggtatgattgtgacgagaactagagagactttgagagagctgtttgtgaagtgttaacaattctttcttctgcactccttccctaaaattgggttttcttgatgtgttccccatttcccacctgaagtcaatgactggcacccatccaaacatggctcacctgtagatgtgcttgaaattggtgcacctgaagcctgttcccctgaagcgtgctcacctgaaggctgttcacccgaggcctgctcaccagaaggctgttcaccggagccatgttcacctgaaggctgttcatctgaaggctgttcacctgactcaagctcactcaaaggctgttctccggagaggtgttcacctgaaggctgttctcctgaaggctgctcacctacagtatgctcaccttcagcatgttcagtcgcagcgggctcacctgaagcatgctcactctcagcatgttctccagaagtgtgctcggccacagtgtgcttgcttgaaccatgctcactggaaccatgctcacttaaagtgttcaggcctgaagaagtctcatataaagcctcagcatcagaagggttttcaagtgaaaagaactcacctggaagttgctgaactgaagtttgatgatctatggagccagaaagctcattaggctgacttgatgttcctgggatggagaaggaacagaagagagttggtgaagctgacagaatgggataaagactatcttcctatggagttaggctaatgttatgagactcctaggtttcctatgggcctagattgggcacctgaagactgcagatgttgggaaaaatcaactaagtatcccaaaaggccatggaggacagaagtgtttagtgaaacaaacagaggccacctctgggattgaagggaagaatcttaagttccccaatattaagaactacttaggagaatccactcatccatgtacaaaaaacccctgaaggaaaatgaatgtgcctccctgacaaagtcagcatcaggaagtcaggataccatccctgatagaatcagaagttcgccaccaaccctcccattcctctatgggtgaaagacaagaagagtagagatagaagagggagagagaaagcaagtagttttcaatacctgagtatttgtaacctaaattaagggcggaagagttaacctttggacagggatgacaagtatgagcccacaaaaattatcagaagggattaagccgcctgtatttggtaatgtcaagtattttctcacactcaatccccaatccatgtgggttggggattcagagagcaaagttgctataagctattaaggtaaaaaaaaaaaagtctaggcatattatatatatatatatatatatatagacacacacacatatatgaattgtatccttgtgacataccatttacattcacttcatggagttgtcctgagtacttaataagataaattgtgaagtgcaccattgcctagtactcaattttatttttcttttcttcccaccttacactgggaattacaaaactcttacatggttatttttttctggccagtctcttctacctttaatccgtctctttctttttttttttttgtttcaaagatagagtctcgctctgttgcccaggctggagtacagtggcacaatcttggctcactgcaacctccgcctcccgggttcaagtgatcctcctgcctctgcctcccgagtagctgggattacaggtgcatgccaccatacctggctaatttttgtatttttagtagagacagggtctcgccatgttggccaggctggtcttgaactcctgacctcaagtgatccgcccgcctcagcctcccaaaatgctgggattacaggcatgagccactgtgtctggccaatccatctcatcattgactgtcagacaaatattccttaagtatattttaagtgaacagaagcacaaaacagataatttgattattactctttgattaaactgagccacctagaggaagacaagtagactacaacaaccaagttatttaattctagccaaaagctgagaggaattattggatctttgaggctgaggtagtctaaaaccccagagtactcaaaactctaagaatcttgcgatagatatattttcttggcacagtgcagtacttacaatcagtgactttctaaatgactagggtgagaatatgttgataaaggaaaggtaagatttagtaaagcttttaggaggtttttattttttaaacttattacataaatactatctacttgactggtttttcaataattaacacaagttttgataaagagatgtttctgatatagaaaggagacataaaaagcatgctaatttcttgatcttatagtttatgactcgtgtcaccatgtgactggcacatactatcacctggtggctgtgtatctacatttttgagtcaacttttgaaggtctaacaaagcaaaaagcaaaacctctgacagtcgacattatagaaaatacattgttttttcactaaaagctcagagctcatggcctctttctgctgtaggaggcaggagggaacacagcacaccatgaatgggggatcccaaaagaagagatgatacagaaaacctgattgatataacacagccatgaagaagaggcttatgaagtctctggcctatagctctgtcgtgttctgaggttgttttctgaacacattacatcttcccatctcccatctttccttggcacattaaccacacaaggatccctcacatttaattggtgggacaaaccttcattgggcttctacagaacccctaagcctactttttcatctcatgcagcatcaggtataaatgttgagtggctaaaataagtagaaaccagactgtgccaagccagtgggaccctctgactgtaaagctatgactagagaaatcaactggttcaggagctctccgagttggacttgtttagctgctcttgattctgactcagattggtttgggtgactgagagactggtcttccttcttcaaggcctgaaatgtcttaagggagaccccttttgtatttacctgaagcctagatcaaacactcacctctggcagatccaagcagataaagactcattagcaagagaaacctgttcatctggatttaggaaaagaggggaccccagtgtgggccacagcttcttcacagagctatgaagcaaactgcgagcaaaagcttccagtgctgaagcagagcttctgggaattctagaacctcagaagtaacccatgtttcttcacaatgggttgggctctgaggttcttgtgtagcctgttcaggcaagttggcccttagcaacccactgcttatttcactagtgaagaccaatgattattttctgtgtgcagggtagtgtgttggggctatctgccctatctttaaaaaaaaaaaaaaaagtattaccaaaaagcacatattttttgtaataaagtttaaaagatatctactgtcttttaaaagtgtttttgacaatgagatgtaattgttgattgttttctgtttggctttctaaatcagcctttcttggctctgatctgtaccctggaaggttgacctctgttgactttatcacctgaatgctggctggatttggcttcagattgggtttatacaggattggaggggagaagagagaaagagagagaggaagagggaagggaggaatggggagaaagagagcgagactggaatatttgttcttcctattcccttcctgccacagttgacactggctgagtctacatgacagagcttctgttgggtgtcctctcttccatggctccagctctcatccatgctatggtaatatgtttttctccccctgccctcttaggcctagggatgataatggtttcctgctgttactaaaatctggatgcccaaacttatctctttttttgtttgtttgtttccttaaccttgcccacttctgtaaatagtcttttcatacagacctttatcaacatggttttagcaggaaacaggtggcaaactcaaatgggtaactgaggagagtttacacagatatgggcagagtaaagagatcaagagacagtagaaagctgcgttttgagctgcaacttggtagcaagggggtggccaagctgagaagatggatgcagtgaggcatccacctgatataaaactagaacttatggaggattgagtggcaaagatctggtagcttccatttctcgctgcttctctgctcagctctcttgaacaactttgttttatataccactgaatgctaaatctagaatagatgtacttattgttacattttgaaaggaaggtgagggttaaagaaagagagagtggcggctctacatcaaatccaggctttctgtctagcataagacctacagaggtgggggactagcttaatgccagtgcccactgcttcgtacaggttggggtacttgtaggtatgagcaggacgggtctgggcagtatggcttgctgcctgggaagatgttcccataatgaggcattttggcccttgttcccgcagaatgtgatgctgatgttccttggactttttcccagcagagtgtgataaagtcagggaggcagttggacaggctgtttctaagggcccaaacccccgtggaatgcttcactttagccaaggtctgcaaaatggcgggggtcggtgggggttacgaaatggtgcagtttggactaacactttatcactgttataattatttgtttcatgtttgtactccccgttggactctaagcttgaatgcagagaccctgtcttgactattgttgtagtcccagtacctagcagcatgcctaagcttttcctgaaggaaggaaggaatgagttaccttttggggcctctctctgcctcatagaggagaatttatagagaatcatgtaagagaatctatagaagagaatctggattaaggttctgggttagttgaagacagcaagatcaccagggatcaaaagttacttgacttgagttagaggataaagctaggatttctgagcctcaggcaggttcctttacagtagagaaaggtatgaaagagcatgctatcaataattcttttcctccaggatgagtttggaagaacagctatgagccttgggtctgacttttgttgatagaagcagtggaaattagtagaagggaagaggtgctatctattccaccctaacttagaacatagaaagacagacagtgggctctggagagctgatgctttcagctgaaaacaattgtttttaaaaattccctatgtaaatttgcttcaaaataacctaaatgagggattgtagcaatgaacggggaaagaagataaaataagactggacacagtggcttgtgcctgtgatcctagcactttggaaggctgaggcgagcagatcacctgaggtcaggagttcaagaccagcctggccaacatggtgaaaccccatctctactaaaaatacaaaaaaattagtcgggcatggtggcgggcacctgcaattccagctacttgggaggcgaaggcaggagaatcgcttgaacctgggaggtggaggtttcagtgagctgagactgtgccattgcattccagcctgggcaacaagaaagaaactctgtctcaaaaaaaaaaaaaaagaagataaaataagattggtcctgtgtgcatgattgttgaagctgtgtgatgggtacatgcgggtactctctacttttgtatatgtttgaaactttctatactgaaaatcttcagggtggagggcagaaatacctatttggaaagcctagataatcaatgccttatttaaaatagcttcaggggatgatggagaagtctttttaatatgtgtgtgcattaagacctagataggagcttaactgctccctattatacaactatcctacacccagggctggcttcctgagcaggcgcatgggcccacactcaaaagggccctggtttcttgctttgctttcaatctctggaaattcttcgtcactttctaacaaaggcgcctcatttttgcgttgcactgggtcccacaagtgctgtctccagtcctgcctagatctcattttccagtccccttaggtatatcaccgtctggtattggaaagctttggcctctgaaaccaggttgaggaagctttcttttaggaagagctggggcacacctaagtccaggctgctggcttcaagcagacattcctccccttcttgcactcttccctacttgataaatatgttcccatataagtttgttgtgctctgatttttagtagaagccttctcagaaacatcccttccaacctctccctctactccttagatttcctcaggtttgatgctttgctagaaggacttacagaactcaggaaagtgctttacttatatttaccagattattctagaggacacagcacagtaacagccacatggaagaaatacataggaaaggtatgtggcggcaggtggggcggggaggtggttgggtgcagagcttccgtggcctctgtgggtgggccattctcccagcacatcagtgtgttcatcaacccagatggtctctgaatcctgtttagagggttttatggaggcttcattacataggcaaaattgattaaatcattggccatttgtggagctgaacttctcaacccttgaatcatgggattggtttctctgatgaccaacccgtaccctgaagctacctaggcccacttcatgaatcatctcattagcataaaaagacagttccaagggtattaggatccctgtgccaggaaccaggagcaaggaccaaatagatatttttatgatgtcacaaagaaattcccaggattgccatgaaggaaggcctcagcatgattgctgtgcagctggggtggagacaaccctcccagataagggcaggagaatgaatggcccaaagtggaagtctccagagaaataataatatattatctgatagctccgatgacagccatgtacaaatgtgtactgagaagctcttggaaggtggggaagcttagccagaagcataaaattaattgagcaaatgataatgtaattattatttgtaggaaaaagaatataaaatcatgtaataaaaaatgtcatcctagtactcattttatttcacttgtgaatactatttaaatatctaccagtcagggcccacttgcaggacacaggagcttgtctggtgagttaccttcagcagaaaggtattaggttggtgcaaaagtaattgcagtttttgccattcttttttctttttttttttaatggctgccacctctatcacaatcaggaaagtcactgtagagtgtcaggcagcttccacaggaactgttggcttcaggagggcaccactgtgtgagccaggaatcaggagtgggctgccactaggacttgtagctgtatatgcactccacgcatgctagacgggcattggcaagacatggtgtcttgttcctcttctctcactatcataaagctggtacctggatgtagaatgctgcttctgcaaaaacaaccaacaaaataaaacacaaaacacctcacaaaattccaacatattctcaaacatcggaaaactatagacatagcagaaagattgtaatacctaaccttgttttaagactctcccttagctacctaaccttgtttcaatatgaataggctctcccttagttgagaaaaccggacgaacaccatttggctccttcatttacaagacatcaaggactcctcacccatccccttcctcaaggagttaacttgtgtaagcagatcgaagagtccaattaactgataaggtactgtggcaagcaatgtccatagttcccaggaattcgctcaagagatagcaccataaagcctcggcgtttgtgtccagcagagcccccgtacctatcgccttgtgataaatttaaagcccctgctcctggaactgtttgttttcttgtaaccattcgtttttttttaactttttgcatgttttaacttctgtagaattgctacaattaagcaccccctcccatctctaaaccaaagtataaaagaaaatcaagccccttcttcagggccgattgaatttcgagcgttagccgcctctcgggcgctggctgataaacgactcctgaattcggctcaaagtgtggcgtttctctctaactcgctcaggtacaacaagatgaccctcatttctgcattcttaattagtgaaattttaatcacactggcaaatgtagttcttggctttccagaaagaagagctattagaagagattggggaagatgttgagggctaatgcaccaaggccagaacaacatagcccccatctcaaggccttcacatttactgctccttctgcctggagtccttttccttcagtggcaaaaactctccttgatctaacttgaatcaggctctcttgagtcctctgccccactaggcccaatctttggcttgcctttctctctgtttgtaaaatccactttgagcaggaatcctgctaagtcagtgcagtgaaaatccctgcccttgatatctgatcacctgaatatctatc

SEQ ID NO: 95 - DNA, 3046 bp, Homo sapiens
ggagcggtccgggaggcggacccggctcctgccagggttgggtgcgccgctgaacggatggctgagggagccccgcggatcgtttaggaaagccggccagctgatcgtcgtgtgttgccacccattcatgtcaagatgactaagtttggatttttgcgattgtcctatgagaagcaggacacacttttgaagcttctcattctgtcaatggctgctgtattatccttctccactcgtctgtttgctgtcctgagatttgaaagtgttatccatgagtttgatccgtactttaattatcggactaccaggttcctggctgaggaggggttttataaattccataactggtttgatgaccgagcctggtaccctttgggacgaatcattggaggaacaatttacccaggtttaatgatcacctctgctgcaatctaccatgtactccattttttccacatcaccatcgacattcggaatgtctgtgtgttcctggcccctctcttctcctccttcaccaccatcgtcacgtaccaccttaccaaagagctcaaggatgcaggggctgggcttcttgctgctgccatgattgctgtagttcctggatatatctcccgatctgtggctggctcctatgataatgaagggattgccatcttttgcatgctactcacctactacatgtggatcaaggcagtaaagactggttccatctgttgggcagctaagtgtgcccttgcttatttctacatggtctcgtcatggggaggttatgtgttcctgatcaacttaattcctctccacgtcctcgtgctgatgctcacaggccgtttctctcaccggatctatgtggcctactgtactgtttactgcctgggcactatactttctatgcagatctcctttgtgggtttccagcctgtcctttcatcagagcacatggcagcctttggggtctttggtctctgccagatccatgcctttgtggattacctgcgcagcaagttgaatccacaacaatttgaagttcttttccggagcgtcatctctctggtaggctttgtccttctcaccgtgggagctctcctcatgctgacaggaaaaatatctccctggacggggcgtttctactcgctgctggatccctcttatgctaagaacaacatccccatcattgcttctgtgtctgagcatcagcccacaacctggtcctcatactattttgacctgcagctcctcgtcttcatgtttccagttggcctctattactgctttagcaacctgtctgatgcccggatttttatcatcatgtatggtgtgaccagcatgtacttttcagctgtaatggtgcgtctaatgctagtgttggcacctgttatgtgcattctctctggcattggagtctcccaggtgctgtccacatacatgaagaatctggacataagtcgtccagacaagaagagcaagaagcaacaggattccacctaccctattaagaatgaagtggcaagtgggatgatactggtcatggctttctttctcatcacctacacctttcattcaacctgggtgaccagtgaggcctactcttctccgtccattgtactatctgcccgtggtggggatggcagtaggatcatatttgatgacttccgagaagcatattattggcttcgtcataatactccagaggatgcgaaggtcatgtcctggtgggattatggctatcagattacagctatggcaaaccgaacaattttagtggacaataacacatggaataatacccatatttctcgagtagggcaggcaatggcgtccacagaggaaaaagcctatgagatcatgagggagctcgatgtcagctatgtgctggtcatttttggaggcctcactgggtattcctctgatgatatcaacaagtttctttggatggtccggattggagggagcacagatacaggcaaacatatcaaggagaatgactattatactccaactggggagttccgtgtggaccgtgaaggttctccagtgctgctcaactgcctcatgtacaagatgtgttactatcgctttggacaggtttacacagaagccaagcgtcctccaggctttgaccgtgtccgaaatgctgagattgggaataaagactttgagcttgatgtcctggaggaagcatataccacagaacattggctggtcaggatatacaaggtaaaggacctggataatcgaggcttgtcaaggacataaatgtcacgtccagctctgatatgcttcgcactgagcacatcacatttaggacgttgaagatttttttttttttttttttttaatatgcagtttgtaagaacaaaactggatggcatcagaattgtctggaagttttgtcttgggcagtatgggctgggccaaatgaaatgatttttataattctaaacaggttaccaaatgaaatgtcatggctttactttggtcaattaaaggggggaatttttttaaaaaatgtgccttatttgttttgacttataactgatttgagggaggcaaaagctatgctaggctgccagaaggacataagcagaccttgtccattctcttagctccctaaattagccaaatagagacttctttctcaaatcaggaaaactatcaaagaccaattcagatcctacatttacagacagttttgtcataaccctttgcattgcagcacctagtacaattccttggaaacagcgtggctcaataaatttttattgaatgaataaatgtgggaccagaagagtgctagaagagtgcctttctgggctactatgtctctgttctcaatgtcttttatccttagacgctctttgactttataaatcagcagttttgaagactcaagacaaacagtgaaattattggtttatcaatggagaggaagaaactcttccagcattacatatagagcttgatggtcagtaggtgtttttgaatcagcttaaatataatcatacatatcaatttgaaatggagcttttcagtactctcacttattcat

SEQ ID NO: 96 - protein, 697 aa, Homo sapiens
MTKFGFLRLSYEKQDTLLKLLILSMAAVLSFSTRLFAVLRFESVIHEFDPYFNYRTTRFLAEEGFYKFHNWFDDRAWYPLGRIIGGTIYPGLMITSAAIYHVLHFFHITIDIRNVCVFLAPLFSSFTTIVTYHLTKELKDAGAGLLAAAMIAVVPGYISRSVAGSYDNEGIAIFCMLLTYYMWIKAVKTGSICWAAKCAYFYMVSSWGGYVFLINLIPLHVLVLMLTGRFSHRIYVAYCTVYCLGTILSMQISFVGFQPVLSSEHMAAFGVFGLCQIHAFVDYLRSKLNPQQFEVLFRSVISLVGFVLLTVGALLMLTGKISPWTGRFYSLLDPSYAKNNIPIIASVSEHQPTTWSSYYFDLQLLVFMFPVGYCFSNLSDARIFIIMYGVTSMYFSAVMVRLMLVLAPVMCILSGIGVSQVLSTYMKNLDISRPDKKSKKQQDSTYPIKNEVASGMILVMAFFLITYTFHSTWVTSEAYSSPSIVLSRGDGSRIIFDDFREAYYWLRHNTPEDAKVMSWWDYGYQITAMANRTILVDNNTWNNTHRVGQAMASTEEKAYEIMRELDVSYVLVIFGGLTGYSSDDINKFLWMVRIGGSTDTGKHIKENDYYTPTGEFRVDREGSPVLLNCLMYKMCYYRFGQVYTEAKRPPGFDRVRNAEIGNKDFELDVLEEAYTTEHWLVRIYKVKDLDNRGLSRT

SEQ ID NO: 97 - DNA, 5827 bp, Homo sapiens
ggagcggtccgggaggcggacccggctcctgccagggttgggtgcgccgctgaacggatggctgagggagccccgcggatcgtttaggaaagccggccagctgatcgtcgtgtgttgccacccattcatgtcaagatgactaagtttggatttttgcgattgtcctatgagaagcaggacacacttttgaagcttctcattctgtcaatggctgctgtattatccttctccactcgtctgtttgctgtcctgagatttgaaagtgttatccatgagtttgatccgtactttaattatcggactaccaggttcctggctgaggaggggttttataaattccataactggtttgatgaccgagcctggtaccctttgggacgaatcattggaggaacaatttacccaggtttaatgatcacctctgctgcaatctaccatgtactccattttttccacatcaccatcgacattcggaatgtctgtgtgttcctggcccctctcttctcctccttcaccaccatcgtcacgtaccaccttaccaaagagctcaaggatgcaggggctgggcttcttgctgctgccatgattgctgtagttcctggatatatctcccgatctgtggctggctcctatgataatgaagggattgccatcttttgcatgctactcacctactacatgtggatcaaggcagtaaagactggttccatctgttgggcagctaagtgtgcccttgcttatttctacatggtctcgtcatggggaggttatgtgttcctgatcaacttaattcctctccacgtcctcgtgctgatgctcacaggccgtttctctcaccggatctatgtggcctactgtactgtttactgcctgggcactatactttctatgcagatctcctttgtgggtttccagcctgtcctttcatcagagcacatggcagcctttggggtctttggtctctgccagatccatgcctttgtggattacctgcgcagcaagttgaatccacaacaatttgaagttcttttccggagcgtcatctctctggtaggctttgtccttctcaccgtgggagctctcctcatgctgacaggaaaaatatctccctggacggggcgtttctactcgctgctggatccctcttatgctaagaacaacatccccatcattgcttctgtgtctgagcatcagcccacaacctggtcctcatactattttgacctgcagctcctcgtcttcatgtttccagttggcctctattactgctttagcaacctgtctgatgcccggatttttatcatcatgtatggtgtgaccagcatgtacttttcagctgtaatggtgcgtctaatgctagtgttggcacctgttatgtgcattctctctggcattggagtctcccaggtgctgtccacatacatgaagaatctggacataagtcgtccagacaagaagagcaagaagcaacaggattccacctaccctattaagaatgaagtggcaagtgggatgatactggtcatggctttctttctcatcacctacacctttcattcaacctgggtgaccagtgaggcctactcttctccgtccattgtactatctgcccgtggtggggatggcagtaggatcatatttgatgacttccgagaagcatattattggcttcgtcataatactccagaggatgcgaaggtcatgtcctggtgggattatggctatcagattacagctatggcaaaccgaacaattttagtggacaataacacatggaataatacccatatttctcgagtagggcaggcaatggcgtccacagaggaaaaagcctatgagatcatgagggagctcgatgtcagctatgtgctggtcatttttggaggcctcactgggtattcctctgatgatatcaacaagtttctttggatggtccggattggagggagcacagatacaggcaaacatatcaaggagaatgactattatactccaactggggagttccgtgtggaccgtgaaggttctccagtgctgctcaactgcctcatgtacaagatgtgttactatcgctttggacaggtttacacagaagccaagcgtcctccaggctttgaccgtgtccgaaatgctgagattgggaataaagactttgagcttgatgtcctggaggaagcatataccacagaacattggctggtcaggatatacaagacgctctttgactttataaatcagcagttttgaagactcaagacaaacagtgaaattattggtttatcaatggagaggaagaaactcttccagcattacatatagagcttgatgagatggggtctccctatgttccccaggctggtcctgaactcctggcctcaagccattctcctgcctcgccttcccaaagtgctggaattacaggcaggagccactgcgcccggccagtgctggagaatgtaatggagatgatcctgcctatccctgagttccagtctagtttactgtcagagaatacttatttccatttttcctattttgttcttgagtctctttcctcagaatttacttttccacttaaatgacgtacgcagcttttaaatttgcgttgtaagatttattttggctctccccgcctgttctttgcacattaaaaatgaaaaagtttgtagaactaagctaagcagatggtcttcctgcaaaaagaccgggctgaagtaaagcattgttttggagctggttcacagaaaaaaggcaaaactggttatcctgacttcaagctccaacataaactgctcgctttctccgggaaacttgccccgccacatacacttgactgcgtggccagttctttcgaagcctctcgctcccaacacggagttcctcccatttcttcacagtcggctctcagcagctgctgctggtttctcggctccagcaccacgagtaccgcactctgaggtttacaaagcactctgcttcaccgactgtgatcctcacagtcctgtccggtggcctcacgcaggtggcggtgcagcctttcaggcccagagcggccaggagcgaagcccgcagccccgcctggaagcgcagcgcggtcggtcgcgcgcccctgaggcttggaggcctgggcttcccccagcagcgctcgagcaccgcccagtcgagcctcacaccggatgccacttcatatttgggcccagagctcaattcgcgccgatgcggtccgccgtccttaaatctcttcagccaggatctctccccgactgcaaagcagccctgggcgggagcggcaacatctccacgtcacccttttggagccgccgacattcagaggggcaggacacgggaacgcgcgctgtcttgctttacggcgcgggtgcgcgagtttgcggcagcgtgacgccctcaagttttggcgggaaaagcgctgcatttggattcctgcagtggtgggcaaaggacagtccgccgaggtgctcggtggagtcatggcagtgccctttgtggaagactgggacttggtgcaaaccctgggagaaggtgcctatggagaagttcaacttgctgtgaatagagtaactgaagaagcagtcgcagtgaagattgtagatatgaagcgtgccgtagactgtccagaaaatattaagaaagagatctgtatcaataaaatgctaaatcatgaaaatgtagtaaaattctatggtcacaggagagaaggcaatatccaatatttatttctggagtactgtagtggaggagagctttttgacagaatagagccagacataggcatgcctgaaccagatgctcagagattcttccatcaactcatggcaggggtggtttatctgcatggtattggaataactcacagggatattaaaccagaaaatcttctgttggatgaaagggataacctcaaaatctcagactttggcttggcaacagtatttcggtataataatcgtgagcgtttgttgaacaagatgtgtggtactttaccatatgttgctccagaacttctgaagagaagagaatttcatgcagaaccagttgatgtttggtcctgtggaatagtacttactgcaatgctcgctggagaattgccatgggaccaacccagtgacagctgtcaggagtattctgactggaaagaaaaaaaaacatacctcaacccttggaaaaaaatcgattctgctcctctagctctgctgcataaaatcttagttgagaatccatcagcaagaattaccattccagacatcaaaaaagatagatggtacaacaaacccctcaagaaaggggcaaaaaggccccgagtcacttcaggtggtgtgtcagagtctcccagtggattttctaagcacattcaatccaatttggacttctctccagtaaacagtgcttctagtgaagaaaatgtgaagtactccagttctcagccagaaccccgcacaggtctttccttatgggataccagcccctcatacattgataaattggtacaagggatcagcttttcccagcccacatgtcctgatcatatgcttttgaatagtcagttacttggcaccccaggatcctcacagaacccctggcagcggttggtcaaaagaatgacacgattctttaccaaattggatgcagacaaatcttatcaatgcctgaaagagacttgtgagaagttgggctatcaatggaagaaaagttgtatgaatcaggttactatatcaacaactgataggagaaacaataaactcattttcaaagtgaatttgttagaaatggatgataaaatattggttgacttccggctttctaagggtgatggattggagttcaagagacacttcctgaagattaaagggaagctgattgatattgtgagcagccagaaggtttggcttcctgccacatgatcggaccatcggctctggggaatcctggtgaatatagtgctgctatgttgacattattcttcctagagaagattatcctgtcctgcaaactgcaaatagtagttcctgaagtgttcacttccctgtttatccaaacatcttccaatttattttgtttgttcggcatacaaataatacctatatcttaattgtaagcaaaactttggggaaaggatgaatagaattcatttgattatttcttcatgtgtgtttagtatctgaatttgaaactcatctggtggaaaccaagtttcaggggacatgagttttccagcttttatacacacgtatctcatttttatcaaaacattttgtttaattcaaaaagtacatattccatgttgatttaattctaagatgaaccaataaagacataattcttgtgacttttggacagtagatttatcagtctgtgaagcgaagccagcttcaaaacatatccccaagatttgtacttatattttcaaaagggcctggccagttatataaacctgtttttgaattataatgattaattaaaattgcaagtaggtgttttttccagtgtagttagtaaaatacttgtattttacagtgttgcataaactctagtgcttaactaactttactctaaaaattactgttgaacatcttaaatatttttctatattttctactttcatagccatattttaaccttttcaacttactggtgaccaagcttttaggtgataaagaataaaagagggaagggaagagtaaggaagctataagaaaaatagatctgattctttgttcctttacctgttagacttacaaaaagtttgtttttctaataaaatttgtatcaactttggggcatattaggttgaggccttggctcctgcctg

SEQ ID NO: 98 - protein, 695 aa, Homo sapiens
MTKFGFLRLSYEKQDTLLKLLILSMAAVLSFSTRLFAVLRFESVIHEFDPYFNYRTTRFLAEEGFYKFHNWFDDRAWYPLGRIIGGTIYPGLMITSAAIYHVLHFFHITIDIRNVCVFLAPLFSSFTTIVTYHLTKELKDAGAGLLAAAMIAVVPGYISRSVAGSYDNEGIAIFCMLLTYYMWIKAVKTGSICWAAKCAYFYMVSSWGGYVFLINLIPLHVLVLMLTGRFSHRIYVAYCTVYCLGTILSMQISFVGFQPVLSSEHMAAFGVFGLCQIHAFVDYLRSKLNPQQFEVLFRSVISLVGFVLLTVGALLMLTGKISPWTGRFYSLLDPSYAKNNIPIIASVSEHQPTTWSSYYFDLQLLVFMFPVGYCFSNLSDARIFIIMYGVTSMYFSAVMVRLMLVLAPVMCILSGIGVSQVLSTYMKNLDISRPDKKSKKQQDSTYPIKNEVASGMILVMAFFLITYTFHSTWVTSEAYSSPSIVLSRGDGSRIIFDDFREAYYWLRHNTPEDAKVMSWWDYGYQITAMANRTILVDNNTWNNTHRVGQAMASTEEKAYEIMRELDVSYVLVIFGGLTGYSSDDINKFLWMVRIGGSTDTGKHIKENDYYTPTGEFRVDREGSPVLLNCLMYKMCYYRFGQVYTEAKRPPGFDRVRNAEIGNKDFELDVLEEAYTTEHWLVRIYKTLFDFINQQF

SEQ ID NO: 99 - DNA, 5404 bp, Homo sapiens
ggagcggtccgggaggcggacccggctcctgccagggttgggtgcgccgctgaacggatggctgagggagccccgcggatcgtttaggaaagccggccagctgatcgtcgtgtgttgccacccattcatgtcaagatgactaagtttggatttttgcgattgtcctatgagaagcaggacacacttttgaagcttctcattctgtcaatggctgctgtattatccttctccactcgtctgtttgctgtcctgagatttgaaagtgttatccatgagtttgatccgtactttaattatcggactaccaggttcctggctgaggaggggttttataaattccataactggtttgatgaccgagcctggtaccctttgggacgaatcattggaggaacaatttacccaggtttaatgatcacctctgctgcaatctaccatgtactccattttttccacatcaccatcgacattcggaatgtctgtgtgttcctggcccctctcttctcctccttcaccaccatcgtcacgtaccaccttaccaaagagctcaaggatgcaggggctgggcttcttgctgctgccatgattgctgtagttcctggatatatctcccgatctgtggctggctcctatgataatgaagggattgccatcttttgcatgctactcacctactacatgtggatcaaggcagtaaagactggttccatctgttgggcagctaagtgtgcccttgcttatttctacatggtctcgtcatggggaggttatgtgttcctgatcaacttaattcctctccacgtcctcgtgctgatgctcacaggccgtttctctcaccggatctatgtggcctactgtactgtttactgcctgggcactatactttctatgcagatctcctttgtgggtttccagcctgtcctttcatcagagcacatggcagcctttggggtctttggtctctgccagatccatgcctttgtggattacctgcgcagcaagttgaatccacaacaatttgaagttcttttccggagcgtcatctctctggtaggctttgtccttctcaccgtgggagctctcctcatgctgacaggaaaaatatctccctggacggggcgtttctactcgctgctggatccctcttatgctaagaacaacatccccatcattgcttctgtgtctgagcatcagcccacaacctggtcctcatactattttgacctgcagctcctcgtcttcatgtttccagttggcctctattactgctttagcaacctgtctgatgcccggatttttatcatcatgtatggtgtgaccagcatgtacttttcagctgtaatggtgcgtctaatgctagtgttggcacctgttatgtgcattctctctggcattggagtctcccaggtgctgtccacatacatgaagaatctggacataagtcgtccagacaagaagagcaagaagcaacaggattccacctaccctattaagaatgaagtggcaagtgggatgatactggtcatggctttctttctcatcacctacacctttcattcaacctgggtgaccagtgaggcctactcttctccgtccattgtactatctgcccgtggtggggatggcagtaggatcatatttgatgacttccgagaagcatattattggcttcgtcataatactccagaggatgcgaaggtcatgtcctggtgggattatggctatcagattacagctatggcaaaccgaacaattttagtggacaataacacatggaataatacccatatttctcgagtagggcaggcaatggcgtccacagaggaaaaagcctatgagatcatgagggagctcgatgtcagctatgtgctggtcatttttggaggcctcactgggtattcctctgatgatatcaacaagtttctttggatggtccggattggagggagcacagatacaggcaaacatatcaaggagaatgactattatactccaactggggagttccgtgtggaccgtgaaggttctccagtgctgctcaactgcctcatgtacaagatgtgttactatcgctttggacaggtttacacagaagccaagcgtcctccaggctttgaccgtgtccgaaatgctgagattgggaataaagactttgagcttgatgtcctggaggaagcatataccacagaacattggctggtcaggatatacaagacgctctttgactttataaatcagcagttttgaagactcaagacaaacagtgaaattattggtttatcaatggagaggaagaaactcttccagcattacatatagagcttgatgagatggggtctccctatgttccccaggctggtcctgaactcctggcctcaagccattctcctgcctcgccttcccaaagtgctggaattacaggcaggagccactgcgcccggccagtgctggagaatgtaatggagatgatcctgcctatccctgagttccagtctagtttactgtcagagaatacttatttccatttttcctattttgttcttgagtctctttcctcagaatttacttttccacttaaatgacgtacgcagcttttaaatttgcgttgtaagatttattttggctctccccgcctgttctttgcacattaaaaatgaaaaagtttgtagaactaagctaagcagatggtcttcctgcaaaaagaccgggctgaagtaaagcattgttttggagctggttcacagaaaaaaggcaaaactggttatcctgacttcaagctccaacataaactgctcgctttctccgggaaacttgccccgccacatacacttgactgcgtggccagttctttcgaagcctctcgctcccaacacggagttcctcccatttcttcacagtcggctctcagcagctgctgctggtttctcggctccagcaccacgagtaccgcactctgaggtttacaaagcactctgcttcaccgactgtgatcctcacagtcctgtccggtggcctcacgcaggtggcggtgcagcctttcaggcccagagcggccaggagcgaagcccgcagccccgcctggaagcgcagcgcggtcggtcgcgcgcccctgaggcttggaggcctgggcttcccccagcagcgctcgagcaccgcccagtcgagcctcacaccggatgccacttcatatttgggcccagagctcaattcgcgccgatgcggtccgccgtccttaaatctcttcagccaggatctctccccgactgcaaagcagccctgggcgggagcggcaacatctccacgtcacccttttggagccgccgacattcagaggggcaggacacgggaacgcgcgctgtcttgctttacggcgcgggtgcgcgagtttgcggcagcgtgacgccctcaagttttggcgggaaaagcgctgcatttggattcctgcagtggtgggcaaaggacagtccgccgaggtgctcggtggagtcatggcagtgccctttgtggaagactgggacttggtgcaaaccctgggagaaggtgcctatggagaagttcaacttgctgtgaatagagtaactgaagaagcagtcgcagtgaagattgtagatatgaagcgtgccgtagactgtccagaaaatattaagaaagagatctgtatcaataaaatgctaaatcatgaaaatgtagtaaaattctatggtcacaggagagaaggcaatatccaatatttatttctggagtactgtagtggaggagagctttttgacagaatagagccagacataggcatgcctgaaccagatgctcagagattcttccatcaactcatggcaggggtggtttatctgcatggtattggaataactcacagggatattaaaccagaaaatcttctgttggatgaaagggataacctcaaaatctcagactttggcttggcaacagtatttcggtataataatcgtgagcgtttgttgaacaagatgtgtggtactttaccatatgttgctccagaacttctgaagagaagagaatttcatgcagaaccagttgatgtttggtcctgtggaatagtacttactgcaatgctcgctggagaattgccatgggaccaacccagtgacagctgtcaggagtattctgactggaaagaaaaaaaaacatacctcaacccttggaaaaaaatcgattctgctcctctagctctgctgcataaaatcttagttgagaatccatcagcaagaattaccattccagacatcaaaaaagatagatggtacaacaaacccctcaagaaaggggcaaaaaggccccgagtcacttcaggtggtgtgtcagagtctcccagtggattttctaagcacattcaatccaatttggacttctctccagtaaacagtgcttctagtgaagaaaatgtgaagtactccagttctcagccagaaccccgcacaggtctttccttatgggataccagcccctcatacattgataaattggtacaagggatcagcttttcccagcccacatgtcctgatcatatgcttttgaatagtcagttacttggcaccccaggatcctcacagaacccctggcagcggttggtcaaaagaatgacacgattctttaccaaattggatgcagacaaatcttatcaatgcctgaaagagacttgtgagaagttgggctatcaatggaagaaaagttgtatgaatcaggttactatatcaacaactgataggagaaacaataaactcattttcaaagtgaatttgttagaaatggatgataaaatattggttgacttccggctttctaagggtgatggattggagttcaagagacacttcctgaagattaaagggaagctgattgatattgtgagcagccagaaggtttggcttcctgccacatgatcggaccatcggctctggggaatcctggttgaggccttggctcctgcctgtagtcccagctacttaggaggctgagagaggaggatcgcgtgaacctggaagtttgaggctgtagtgagctatgattgcaccagtgcactccagcttggatgacagaatggagtttcactcttgtctcccaggctggagtacaatggcatgatctcagcttactgcaacctccgtctcctgggttcaagcgattctcctgcctcagccttccaagtagctgggattacaggtgcccaccaccacacctggctaggttttgtatttttagtagagatggggttttttcatgttggccaggctgatctggaactcctgacctcaagtgatccacctgccttggcctcccaaagtgctgggattttaggtgtgagccacctcgcctggcaagggattctgttcttagtccttgaaaaaataaagttctgaatcttcaa

SEQ ID NO: 100 - protein, 695 aa, Homo sapiens; identical to SEQ ID NO: 98

SEQ ID NO: 101 - DNA, 2497 bp, Homo sapiens
ttccccagtcgttcgccggaaagcatttgtctcccacctcttcataacaacaattaatttcctctggggcctgaggagggcagaatttcaaccttcggtgtgcttgggagtggcgattgtgatttacacgacaaaatgccgaggtgctcggtggagtcatggcagtgccctttgtggaagactgggacttggtgcaaaccctgggagaaggtgcctatggagaagttcaacttgctgtgaatagagtaactgaagaagcagtcgcagtgaagattgtagatatgaagcgtgccgtagactgtccagaaaatattaagaaagagatctgtatcaataaaatgctaaatcatgaaaatgtagtaaaattctatggtcacaggagagaaggcaatatccaatatttatttctggagtactgtagtggaggagagctttttgacagaatagagccagacataggcatgcctgaaccagatgctcagagattcttccatcaactcatggcaggggtggtttatctgcatggtattggaataactcacagggatattaaaccagaaaatcttctgttggatgaaagggataacctcaaaatctcagactttggcttggcaacagtatttcggtataataatcgtgagcgtttgttgaacaagatgtgtggtactttaccatatgttgctccagaacttctgaagagaagagaatttcatgcagaaccagttgatgtttggtcctgtggaatagtacttactgcaatgctcgctggagaattgccatgggaccaacccagtgacagctgtcaggagtattctgactggaaagaaaaaaaaacatacctcaacccttggaaaaaaatcgattctgctcctctagctctgctgcataaaatcttagttgagaatccatcagcaagaattaccattccagacatcaaaaaagatagatggtacaacaaacccctcaagaaaggggcaaaaaggccccgagtcacttcaggtggtgtgtcagagtctcccagtggattttctaagcacattcaatccaatttggacttctctccagtaaacagtgcttctagtgaagaaaatgtgaagtactccagttctcagccagaaccccgcacaggtctttccttatgggataccagcccctcatacattgataaattggtacaagggatcagcttttcccagcccacatgtcctgatcatatgcttttgaatagtcagttacttggcaccccaggatcctcacagaacccctggcagcggttggtcaaaagaatgacacgattctttaccaaattggatgcagacaaatcttatcaatgcctgaaagagacttgtgagaagttgggctatcaatggaagaaaagttgtatgaatcaggttactatatcaacaactgataggagaaacaataaactcattttcaaagtgaatttgttagaaatggatgataaaatattggttgacttccggctttctaagggtgatggattggagttcaagagacacttcctgaagattaaagggaagctgattgatattgtgagcagccagaaggtttggcttcctgccacatgatcggaccatcggctctggggaatcctggtgaatatagtgctgctatgttgacattattcttcctagagaagattatcctgtcctgcaaactgcaaatagtagttcctgaagtgttcacttccctgtttatccaaacatcttccaatttattttgtttgttcggcatacaaataatacctatatcttaattgtaagcaaaactttggggaaaggatgaatagaattcatttgattatttcttcatgtgtgtttagtatctgaatttgaaactcatctggtggaaaccaagtttcaggggacatgagttttccagcttttatacacacgtatctcatttttatcaaaacattttgtttaattcaaaaagtacatattccatgttgatttaattctaagatgaaccaataaagacataattcttgtgacttttggacagtagatttatcagtctgtgaagcgaagccagcttcaaaacatatccccaagatttgtacttatattttcaaaagggcctggccagttatataaacctgtttttgaattataatgattaattaaaattgcaagtaggtgttttttccagtgtagttagtaaaatacttgtattttacagtgttgcataaactctagtgcttaactaactttactctaaaaattactgttgaacatcttaaatatttttctatattttctactttcatagccatattttaaccttttcaacttactggtgaccaagcttttaggtgataaagaataaaagagggaagggaagagtaaggaagctataagaaaaatagatctgattctttgttcctttacctgttagacttacaaaaagtttgtttttctaataaaatttgtatcaactttggggcatattaggttgaggccttggctcctgcctg

SEQ ID NO: 102 - protein, 474 aa, Homo sapiens
MAVPFVEDWDLVQTLGEGAYGEVQLAVNRVTEEAVAVKIVDMKRAVDCPENIKKEICINKMLNHENVVKFYGHRREGNIQYLFLEYCSGGELFDRIEPDIGMPEPDAQRFFHQLMAGVVYLHGIGITDIKPENLLLDERDNLKISDFGLATVFRYNNRERLLNKMCGTLPYVAPELLKRREFHAEPVDVWSCGIVLTAMLAGELPWDQPSDSCQEYSDWKEKKTYLNPWKKIDSAPLALLHKILVENPSARITIPDIKKDRWYNKPLKKGAKRPRVTSGGVSESPSGFSKHIQSNLDFSPVNSASSEENVKYSSSQPEPRTGLSLWDTSPSYIDKLVQGISFSQPTCPDHMLLNSQLLGTPGSSQNPWQRLVKRMTRFFTKLDADKSYQCLKETCEKLGYQWKKSCMNQVTISTTDRRNNKLIFKVNLLEMDDKILVDFRLSKGDGLEFKRHFLKIKGKLIDIVSSQKVWLPAT

SEQ ID NO: 103 - DNA, 2498 bp, Homo sapiens
gagcaattgggaggaggcgctgccgcaggcgttttctgccccataccgctccctatatcctcttcctctcttccccagacccccacctctccctcctccttccccagtcgttcgccggaaagcatttgtctcccacctcttcataacaacaattaatttcctctggggcctgaggagggcagaatttcaaccttcggtgtgcttgggagtggcgattgtgatttacacgacaaaatggtcaggtttagaatagttgttcgtggttgaaagacttggataaatgtggatgagatagaaggggaagccgaggtgctcggtggagtcatggcagtgccctttgtggaagactgggacttggtgcaaaccctgggagaaggtgcctatggagaagccagacataggcatgcctgaaccagatgctcagagattcttccatcaactcatggcaggggtggtttatctgcatggtattggaataactcacagggatattaaaccagaaaatcttctgttggatgaaagggataacctcaaaatctcagactttggcttggcaacagtatttcggtataataatcgtgagcgtttgttgaacaagatgtgtggtactttaccatatgttgctccagaacttctgaagagaagagaatttcatgcagaaccagttgatgtttggtcctgtggaatagtacttactgcaatgctcgctggagaattgccatgggaccaacccagtgacagctgtcaggagtattctgactggaaagaaaaaaaaacatacctcaacccttggaaaaaaatcgattctgctcctctagctctgctgcataaaatcttagttgagaatccatcagcaagaattaccattccagacatcaaaaaagatagatggtacaacaaacccctcaagaaaggggcaaaaaggccccgagtcacttcaggtggtgtgtcagagtctcccagtggattttctaagcacattcaatccaatttggacttctctccagtaaacagtgcttctagtgaagaaaatgtgaagtactccagttctcagccagaaccccgcacaggtctttccttatgggataccagcccctcatacattgataaattggtacaagggatcagcttttcccagcccacatgtcctgatcatatgcttttgaatagtcagttacttggcaccccaggatcctcacagaacccctggcagcggttggtcaaaagaatgacacgattctttaccaaattggatgcagacaaatcttatcaatgcctgaaagagacttgtgagaagttgggctatcaatggaagaaaagttgtatgaatcaggttactatatcaacaactgataggagaaacaataaactcattttcaaagtgaatttgttagaaatggatgataaaatattggttgacttccggctttctaagggtgatggattggagttcaagagacacttcctgaagattaaagggaagctgattgatattgtgagcagccagaaggtttggcttcctgccacatgatcggaccatcggctctggggaatcctggttgaggccttggctcctgcctgtagtcccagctacttaggaggctgagagaggaggatcgcgtgaacctggaagtttgaggctgtagtgagctatgattgcaccagtgcactccagcttggatgacagagtaagaccctacctctaataaaaatttttaaaattgtaaaacattataaaattaatcagttattttaatctgaagccaagaacatgtagaatgttatgattagagtttatcacatattaatgtatactggcaaattgtgttactggagtatacccataggaggaataaattcaaacctgttttatttatttgaacctatttacggtatgcttaagaattgaatcagtataaattctcaaatatgggagaaattttgttcttgagaattatctgagtcattaatatttttcaaaaacagctctcactgacttgaacctcttctgtaagctctaaccttttacctgctttacatttccacttgaatgtctagtaggcatctcttgaccaaaaacagcttttgattcctgttctccaacctgttcctctcctagttttctccatctcagaaatgttacttcctctgcaaagtctttccctgacttatctaaaataataacctcctctgtttgctgtgggaatttgtatagaatggtgggaaaatttcaagtttcatatttggattagctctgacatttatttatctgaacactggtaattgcctcagtaaagacactgataataagtaccttttagagttattttaatctttaatgctttaatgtgtaggaagagtatagtgtcctgttttgcacagaaaggcattctgtaaataataagttgccttaattttcctgtaatgttcattatattgttgtgggaaggtatttactcctattattaaaaataaaaatgtgtaaaatttactacctg

SEQ ID NO: 104 - protein, 380 aa, Homo sapiens
MEKPDIGMPEPDAQRFFHQLMAGVVYLHGIGITDIKPENLLLDERDNLKISDFGLATVFRYNNRERLLNKMCGTLPYVAPELLKRREFHAEPVDVWSCGIVLTAMLAGELPWDQPSDSCQEYSDWKEKKTYLNPWKKIDSAPLALLHKILVENPSARITIPDIKKDRWYNKPLKKGAKRPRVTSGGVSESPSGFSKHIQSNLDFSPVNSASSEENVKYSSSQPEPRTGLSLWDTSPSYIDKLVQGISFSQPTCPDHMLLNSQLLGTPGSSQNPWQRLVKRMTRFFTKLDADKSYQCLKETCEKLGYQWKKSCMNQVTISTTDRRNNKLIFKVNLLEMDDKILVDFRLSKGDGLEFKRHFLKIKGKLIDIVSSQKVWLPAT

SEQ ID NO: 105 - DNA, 33956 bp, Mus musculus
  misc_feature (1)...(33956): n = A,T,C or G
gaatttgttctaccattggggttctgcagtttggactcaggtcatctggcttggtggtaagagctttactgactggaccccatcataggcctccacagataaggtgcagcaggagggacagcaaggtgggtcagcgagtaaaggcaattttcactaaacctgacaacctgaattttacctgctggaacctacatgttaggaaataaccagttcccatgggttgccatctaacctccacaaacatttgtttaagtgcaactagttgtgatggttaggaagtcaaggcaagatcaggagttggggctggagagatagctcagtgattaagaacactagctgctcttccagaagtcaaggttcaatttccaacagccacatgacagctcacagccatctgtaagtccaggcctatagtatctggtgccccctcttctggcactgcacacacatggtgcatacatacacatacaaataagacagccatacacattaaaacagcaatagttaaatgaaaaaaagaatcatgtgttcaaggctatccttggctacacagccaggtcagtctgggctacatgtatcaaagacccataaataaataaataaataaataaataagagtttatcttaccaggtgtggtagtacagtcttctaattccagcaaaagggtctgggctacatgtatcaaagacccctaaataaataaataaataaataaataaataaataagagtttatcttaccaggtgtggtagtacagtcttctaattccagcaaaagggtttgaaatcaacctgtgctacacagcaaagccttccataaaaccaatagctgggtctagtggtgcttgctgtagtcccagtatctggagtctgagcagtaagattttaatctagcctggcctacatagtaagagcctgtgtcaaaaactccaaaccagctgggcatagttacacgtaccttcaatttcagcatttgggaggcaaaaacaggaaaaactctaagttcaatcaaagccagcctgttctacaaagcaggttctggccaaacagggttacatggtgagaccctgacttgcaaacaaacaaacaaacaaacaaataaacaaacactgtctacaccaaccaacaataccaaactccaaaacaaaacaaaaaaaaaatcacagaataataaaaatgtatcctgcagatacactaatatacaaagacatatgtgtattcgtacgaagcttatttgtagcacagtctgcaaaacaaaatccagaagtaaactaaatatgactgagtaggggactgattgtaagtgcatggtacagctgtgcactgtccagcaaaatatggtggtattcaggttctcaaaggatagcaatatatgtgcttagatgcttttatcaaacttcaaaggaaaagctaacagtgtggagaaaacagccccacttttcccagcctttgttatatctgcaacaagatgtgtacacttccgaaacctaggtgcctccagatttctgggcttggtagggtgtatggcaaagtgtgcccctgcagggctttccattggaaccctgtagggaaagggatactcttgggcagggaggggctgacttattatctcagcagctacagggtctcagccaaggaaccttggctcctgccaggggaagctcctgctgtctgcctgccagctgggtgctgctctttgctctctgatcccccctcctgtcacctctctagctcaggaatcatcattctgaagttagcaaccctgttgggttattcttggcatagctcagtgggggtggggcagatgttaggtccctgtgtcccttccccctcccacacaaacaaacacatacacccacacatatgttcaatgggaatccatgccctgggaagagatccaggcagggaggatggtgggaggcagtaagctctagggggatataaacagagttctctctctctctctctctctctctgtgtgtgtgtgtgtgtgtgtgtgtgtgtgtgtgaagaggcagaggcaataatcagtgtgagattgcaggggctgtcttcagactaccctctggggcaatcacatgccggcagccccatcactaccagctggcatatgggtgtaggaccaccaagaagcctccccatatggcccccagcttggtcactgaaaattcccaaccacattctctggccgttgtgctggcactaggccaacaaatgttagcctggggtagtattctcttatccaattcagattcccccctctatctctgacaggtgaggagtccctttagactcacttgattccccaaacaccattcatgccagattcctgtatgacacaatcagtgcagtctccaaaatgaacccccccccccaccctacagaaagacgtctacctcatcagcccctgccccatgttctcttctgcagctccacctgtaaacacacacttctttcccttcgagaacagaactctatcaggctgtacatacaacccctcccatcccccccatggcctttgtcaatttccttctttaccaactcccctttaaaacctccttttctcttcctagctctttcttttttcttttcttttttttttttttttggctttttaaaaaattagatattttctttatttacatttcaaatgctatcctgaaagttccctataccctcccccctccctgctcccctactcacccacttccacttcttggccctggcattcccctgtactggggcatataaagtttgcaataccaaggggcctcgtttcccaatgatggccaactaggccatcttctgctacatatgcagctagagagatgagttctgggggtactggttagttcatattgttgttccacctatagggttgcagaccccttcagctccttgggtactttctctagctcctccattgggggccctgtgttccatcctatagatgactgtgagcatccacttctgtatttgccaggcactggcatagcctcacacgagacagctatataagggttctttcagcaaaatcttgctggcatatgcaatagtgtctgggtttggtggctgattatgggatggatccccggcatcactcctgtcagaatggctaagataaaaaattcaggaacagcagatgctggcgtggatgtggagaaagaggaacactcctccattgttggtgggattgcaggcttgtacaaccactctggaaatcagtctggcagttcctcagaaaaattagacacagtactaccagaagatccagcaatgcctctcttgggcatatatccagaagatgttccaactggtaataaggacacatgctctactatgttcatagcagacttatttataatagccagaagctggaaagaacccagatgtccctcaacagaggaatggatacagaaaatgtggtacatttacacaatggagtactactcagctattaaaaagaatgaatttatgaaattcttgagcaaatggatgtggctggaggatatcatcctgagtgaggtaacccaatcacaaaagaagtcacttgatatgtactcactgataagtagatattagcccagaatcttagaatacccaagatagaatttgcaaaacacaagaaaatcaagaagaaggaagaccaaagtgtggatacttcattcctccttagaatagggaacaaaatacccatggaaggaattacagagacaaagtttggagctaagacgaaaggatggaccatccagagactccccagctctttctaaagttcaactctacatactattggcaaaaggtggttcctgagataatataaagaagttctcagctggatatgacacatggctgtaatcccagaacacgggatgtgaaacaggagttcaagactatccttgtatatgaggccactctgggctacatgagaccctgtctcaaccaacaaataacaagaagcacaaaacaaaactaacaaacacacaccccggagaaaaaggagatggttgaattgagctctggctcttccttcagcccaagattaagctcaaaagtcaaaggcacaagagaaccccgccaagggcaatacaaaggcagtgcactgcaggttagaaaatggaggcgtgagtgttgctgcccatcccagctaaacaaaagataaaacccagagtcgtgatcttcttggttgcagtctggtgtgaggaggtaagcaggagtcattctttgcacgactgcctttggaagcagctcacagagcagctatacttaaagaggtcaaggacttgtttcctgcctgccctgggaccagagtaatgagtcagagaaaatgagggaaggctgaagaattgctggacttgtgacctccattgggtcatctcttcttactctgggttccacctctgccagtggagaatctctggggaccctggaggatggggaaatggagaaaggagatggaagtaacttgtgatatagatggtataacttaatctcctagccatctcccttgagtccttagccttcttttgtctttagatctggctggttttctgagaagaaataatatcctagagatacaacaaacacagcaaaggaaagagtggagaaagacaatcaggaaaatagggaggttttttttttaagttagttttaaaaataggagagaggggaggagggagggagggagacgggggtgagagagagagagagagagagagagagagagagagagagagaggtgagattcacaagatggaccagataggggccaagagtcctagaaaaatggctttcctccatttgttcagcatccaaacccagacgacagggattaggaggaagcggtgcccacgggctgcgctgccgcctccgcttagggaacccagagcaaatactccctgatccccacataaagggccaattaactgtgcggtctccagaaacaaatccgctaacagggtgacaagcccctagacgccaggcgggggtgtgtttgcccagaggccggccgggagcaaatcaagggattagcatagggcaaaatctgcatggttagggggtttccagcctttccagctccaaagcagggccatgaagttaagtttctgccttgcttggccttctaatgtgatggaacccgcaagaccgaccagcagaaggccaagcaaacggtccttaagattctgaggatcagaccagatgaactagtcctcttcatccttaactctgaagggattggtctcaaatggtgatgtcttctgattggcaaattcagcacacacaccccttccttacctctccggctgaaagtggtctagcactacagcaagcccctggatgagggtctgatgtaaaaaacttctatctctttagtgccctagcctaccccattctcaagatctgcccaggttttgtcttcggtggatgcaccagggacccagttcagcacccacagatgtgtcagctcccagggctctaagtcccgtgggattgttgagccccatcagccctcaccatttagttcatcccaccttgagctctctggtcctggaccgaggactccgaagcactaaatgcccccagaattccgtgggcaggacactggattgtagagacaaactggttggtggggccatgttcctctactcttgacctgcttttggtttggaatctgccacagcttcatcttccaccctggaattgagtagcatatagcgctctgagctgtcttcctgtgcaggtgtccccttacatatcagaagcagccgctgcacgattacatagcctaagagcaatccaaacacttacttgtccacagaacctacaggatgggaaagccacggtctcttgctccacattcaacatcatttccagtctagagaaagtgtgtgcaggagaggggcaaaagcaaagatggttggctgcaacatctccaaggctaaaataacccctattcgagacagaaccggggctttggttttcctgttgcacaccccaccccacctcaccccgaccgggaggataaacagctgttatctggttccagcagtttcacacaatttggcattcacccggtctgtgacactttgcttcctttgttctagacttttggtctcttcaaaactgtcaaacaacttcctaaaacacgtcatagtggagcaatgcactatgctaataggtgcgtgctgcctggattctcggggtctcctccaattttactcagttctgagcacccggcaggatttcctgacggggcgggggggggggcgcatctggagcaggactccaggtcaagttggatctctgtatccctgtgggttcctagtggcaagccacaggattaggaggaatcggacgcgcacgtggggcgagaggtgatccagcggtggaattctcttcttcccctccacccccactcccaggtatcctagcaccctgcgctcacgtttccaggacccagaatttgaaaggcactggaagctgggacattgagagctcaacagtgtctgctctcccaatgcctcagtttccctgacgtccgagaaaggaaataattcctgctataattttagaaagaagggctgagtctgacagaggctcagttccgcgtcttggggtagagagagagagagagagagagagagagannnnnnnnnnnnnnnnnnnntagagagagagagagagagagagagagagagagagagactctcccgccaggttcagagcaacatttgatgagaggagtgtggggcggggactctaacttgcgcgcggccctgttagtggccatcctggtggaggtggggatatggaggaaggcggattaagcccttaattacggcgtgatccgagtggcacctgctttccgcccgcccagctcccaggggattctggcactgggggggggggggggtggagagaagaaccagcgaaggaggacagcccgcgcagaggcacggccggtacccaggcacgcctgcaggacagcggcatcgtggctgccgcagcgcgcaaaggctgtggaggggcttacggctcccggcccgcgggtcccagacccaagggctgggctccgaggcccctgcccaagacccaggcgggctgcgctatgctgcgctacctgcttaaaacactactacagatgaacttgttcgcggactccctggccagggacatctccaactccagcgagctactcttcggcttcaactcctcgctggcagcgctcaaccctagtctgcttcctcctggagatccctctctcaatggtgagactgttcgatggggaccttagatttggagatcgggatgagagggctgcttggaagggaagacggaaggtctccttttccaggacccaggggcgcctgtcagggccctcctgggaagtggggtcccaaaggagcgtctgagttggtgtatttgcctgtggtggagggctgctgagcccctttctcctcatctctcctactatccacctaccacacccaccccaggtgggagaaatgtaaagggcaagttccaagctaagaaggaaggttagaccagggcacgatgtcgccagtcggccaaggctaaaccgggcactaggtgatccacccaagtagcagatgccacttccaggacctaaagttttcaaaaacctcactcagagcaagggtgggaaagcccccaactttgtaggtgtttttacgcggagggtcaaagtcagcaatcttctcaaggaaacttagtattaagtttgtatccccagtgagactcacagctgacccagcctggcagagcgatggcgaggtcgttactgctaattacagtgattaataaataacttgagacagcgctgccccccctgagcgctgcaggcagtctggagagaggcctgatcgcgctccctgctggctacgtcaggaactctccctctgggaagcctctgcccaacttaggctagggccccggactctggacatggtccacctttgcagtctctaaaagatgaaaggatnnnnnnnnnnnnnnnnnnnnnnnnnnnnnnnnnnnnnnnnnnnnnnnnnnnnnnnnnnnnnnnnnnnnnnnnnnnnnnnnnnnnnnnnnnnnnnccccccccccccgtactcaggtgcaagggaggagccccagagccctatttgcatggccattagctattcattaggctgctgtcgaagcatctctggagaccaggaatgacagggaagaaattccagggaaagagagccctcggctgtgtctgcaggaattagagggaaagcgtggatcagaagggtgttgtgtggaaggagtttgaagagggctgagattctccagtcttgccacctttgaggagtcccaagagaccaagcagttattttctcggattttttactcacctagagctttataccagacatctatcttttcatttaagcttgaaaagtcagggagggacgatggttgttggtcactacacactgccactagggaaaacaaaacaaaaaaacagctatggaggataaagaatagggcagtgaccacaaaagcatagagcaagatcttggcagcagggaacttaaagtgtatttttatcacatatgagaggtttttgaagtggagatgggatgggtttagaaatactagagcctaaagtctcattcaggtagagactgtaggaaccacattaaagtgctggagaagaaaggatattaagtaatggtaaacttgtcatagctactgttgtgccttgcatctttttgggggttttgaactcccacattgcagataaggaagtgaaatttagagacctgaacctttttgttttttgagacctagcctaactatgtaacttagacgcctccacacccagagcagtgggcttacaggcatgggccaccaacgggctgcagttaaataagatgtccagcttactaactctgggaagtgtcaaatctgagattctagctcagagcatttcgaagccaaaacctgggctctaaccattccaggggcctctctcagtggagtgtttccaaaacaggattgggatgggacggaggaaagagatgcttgagcagcagacatccttccatctatctggaagggaaaagactgagaagtttattctcttccatacgtgggagagaaactgattttacactgagcaatcaaatcaacgaccagggtggagcctgcacccgccacgccccagcattctctataccagaactcttaaaaggaagggcaagaaacgaaacctaatcccccactgggcctagaaccaagaggtctctgaggatattggaacagggtaggcggggtgggggcgagagagagccgcagaacagatgcgcccaagagtcactggttatttaaggacaccagattgtgcaaggcttcagcgccgcctactggcagaagcgaataggtctgactgagagctcagtatttaactcttctgcataggcgagaatgaggatacatggaggcatgggaacatttgtgggtgaggatgacacctgggtcccaaacctgaggcaggagatgacccagcttcaggaaggaggtctgtaggacaagagaaagacaggggcggaatgtacagagaaatagtttcaagagagctagggaggaaaggaatttcttgatttttaaaactgtacctttcaggaaaagcagcgccactcaaatttccacttccaccatatttaatttctgtgacttcacaggattcctggaaatagggggggaaaaaaccgtgattgcctggggcttcatagcattcaaattaagaacttttctagtcttagccccagcccttaacacctttttttatacgaagaatccaggacaattaattttgtccatttcatctgtgggagcagagatcatcagagatgaataatctagtgtctgctacggtacggtatgcatggttggttgctcactgaggaagacttatatgcgatccagtgtgtgtgaatgcaaatcaacttgctagggtacaggttcctcaccaaagcatgctcagtcatcgctcactagtcaagaaatgaggcctggatctcaagaaggcccagaaaaccttcctaggagtttgtgcccggatccttctatagatctgcctatctgagggcggttccgttgttccaggctaaggcgttaccagagcctacagagcaggaggactggtgggccgatgtgatgtagatgactctctagcaaaggaagcatgggagatgagtgaggcagagggttctcttactcttcagagcaaacctggtcttcccccagttgctttgcctgggtacttggagttaccttcttctccagggtcaagagttgggccagaagatgccatgccacgcatcgtggagcagccgccagatctggtggtttccaggggcgagccggctactctgccctgtcgtgcagaaggccggcctcgacccaacatcgagtggtacaagaatggggcgcgtgtggcgactgcacgggaggatccgcgtgctcaccgtctgctgctgcccagcggcgccctcttctttccccgcattgtgcacgggcgtcgctctcggcctgacgagggtgtctacacctgtgtggctcgcaactacctgggagcagcggctagcagaaacgcctctctggaagtagctggtaagagagttcgtcagctgatgcttctagaacctggggcactccggaaggccaacagaaagttggcctgggggcggggtggagtggggtcagcccaatgaacgtcttttttgggacagagacctttggtctctaacaccaaaccttgaccatgggggaggaagtagatttgacttggtatttcaggaaaccgggtcagttgtgaccccctctatgacactcagctcctgttaacatcattctaccttgtttatttttctgacctttctccccatggtcccttctctattctcagtcctccgtgatgatttccggcaatcgcctgggaacgtggtggtagcggtgggggagccagctgtaatggaatgtgtgccccctaagggtcacccagagcctttggtgacctggaagaaaggcaaaataaagcttaaggaagaggagggaaggatcaccgtgagtgtgtgtgtatgtgtgtacacattcacatacatgtaggcaatgagtctaggacatgcctcaaaggaggaagtctaagacagtgcttctcagcctatgggctgtaacccctttggggctgcatatcaaatattctgcatatcaaatatttacattacaattcataacaatcacaaaattacagttatgaagtagcaacaaaaaaaatttatggttgggagtcaccacaacataagaaactatatgtgggctggtgagatggctcagtggctaagagcactgactgctcttccgaaagtcctgagttcaaatcccagcaaccacatggtggtttacgaccacccataatgagatctgatgccctcttctggtgggtctgaagacagctacagggtacttatgtataataataaataaatcttaaagaaactgtatgcattaagggattgcagcatcaggaatgttgagaaccactagtcttaagggacttgagacctatgaataatgtcttggtactgtacagaagacgatctgaaattaagctactaagtaaagaattcaggtttgtttttgtttttttgtggaaagagctgggtatgtaggtgcatacctttaatcccagcacttgggtggcagaggcaggcagatccttgtatttaaagccagtctggtctacaaaatgagttctagagcacccctctcctaaaaaaaagtcaagagagaacaccatgatgccccaaagcccccatatctgatacatgaatcaacttcattagcttactataaggaaccaagtaaaatttacatacacatgtacacacacgtacaagcatgcacacactcacaaacattttgatgtaaaggaccaatcacaaacattttgactgtaaaggaccaatttttaccattgttattccccagatacgtggaggaaagctgatgatgtcacacacgttcaagagtgatgctggcatgtatatgtgcgtagcctccaacatggctggagaacgagagagtggggcagctgaacttgtggtactgggtaggcaccgggcattttggagttatgggagtgtgtagcccagtgaggaagtagctgtgcagtacccctgacagttcaatggctcctactctgtagagcgtccctcatttctgcgtagaccaataaaccaggttgtcctggctgatgcccctgtgaatttcctgtgtgaggtgcagggagatccccagcccaatctacactggcgcaaggatgatggggagctgcccgcgggcaggtgagaagccccctccttttgacaacagagggaacccaggaaccccagaccctacctggccatggcatagagaaatttatttcccagaactaccgatccctggctaaacttacttcatatagtgggtgccatcttcttctgtaccatttgaaccgccccttgcctatcttgaccctggtgtttgttctgggggagagagacggggtttgtagctgtggccaacccagcttggtgtggggagtggagcaggtatgagattcggagtgaccacagcctttggatcgaccaagtgagctctgaagacgaggggacgtacacgtgtgtagcagagaacagtgtgggccgcgcagaggcatctggctccctcagtgttcacggtgagggctcttcctgggtcagcttgcaggggtgaaatgaggggtggtgatggaggagaatgggggagagagggcagaaccggaggcatggggagatcacatgagatacttctggagagagaaacgataaaaccaaagagatctgagcaattaatctagctttgggcttccctaccgacttccctaccactgaatccggcttctttttctgtctctcttcttcccagtcccaccacaatttgtgactaagccccagaaccagacagtagctcccggagcaaacgtgtcattccaatgtgagaccaaaggaaaccctccacctgccatcttctggcagaaggaagggagtcaagtaggtgctcattccaaagcgctgaccaattttccttctggatctttctctccctccactttttgtaaacttctctctcagtttcctgtcccagaaactcttgcaggttgagaggggcaaataaaacaatgaagataaaaaggccaggagcatttgggcacttggacaattcagtgataatgcagcaatatgttaggtggggccgagcaattcgagtggcaagttctgagagaatctttatgtgttgaccagtgctgtcttgaaagtagaaatctagctaaggtttttcctcccccaaactatctggaccttggcttttggacctggaaaccaagtattgaaggaattaaagcttcctagggtagacgacttacactattgatcactcattccaccaggggtgctcacagccatctcctttccacctagtgaaagaatccagatcacactacccaaaagaatgcaatttacaaccttagtgattttctctatggaaagagtgggcactgtgctacagggtcactatagtaaatctggttatctccacacttcaggaaaactacaagatttttgtcccaaacccaaggtcacaattttccaatgtctccagttcttgtgactgttatattttaattaggtccccatggggatgaaaatggtgttggtaggaaggggtaagagggggtcagtcagagccttagcctggcctgttgtccagaggcccaaacctgttttccttccttcccacatctctctctaaagtaaaatactaagccagaaaatatttaacatttatcacagagccttataaaacattcacatgattccttcatactgagtttgacccctaagcttttagagccaagtttggagaaaccggggctcataaagatacacttgcccagaagttttttggttttttttttgtgtttttttttttttaagatttatttatttattatatgtaagtacactgtagctgtcttcagacactccagaagagggcatcagatttttgttaaggatggttgtgagccaccatgtggttgctgggatttgaactcagaacctttggaagagcagttggtgctcttaaccgctgagccatctcaccagccccagaggttttattttagttgttgttggttagttggctcttctttttttaagaaaagatttatttatgttcattggtattttgtttgaatgtatgttgtatgagggtgtcagatctaccagaactgggattacaggcagttgtgagctgctatctggattctggaaactgaacccagggcctctagaaaagcagccagtgctcttaacccctgagccatcttcccagaccccaggtggttcatcttctgagctaaggctggtctcttaacttgtgatcctcctgccttatctcagagcttagtttcttagagtttctcaaccaataaagtcacagaactggggcatggaccccaagagcttctaataaatgcctgtcctttttgtcagttgccctaactaatttggccaactgggtcatgtcaatggttggaggcagagtgcaaactaaaatcttagagtttcgctcagcaggtatagggttctctacatcctgcccattcctcatcttgtttccttgctccatcctaggtcctgcttttccctagtcagtcactccaacccatgggacgcctcttagtctctccaagaggccagctcaacatcactgaagtaaagatcggggatggtggctactacgtgtgccaggctgtcagtgtggctggtagcatcctagcaaaggccctattagagataaaaggcggtatgtgttcgtggagagtgggttggacctagaatctgcaaagacattgtttaaagagatgtttcccttggatgctgttcaatgtgtctaaaggggaaatgacatttttctgagggacattcttgatgttttgaaactagctccattcccagtgggccagcactctaccttctcctacaggagatggacatgggtttctacagctgtgtggccaagagttccataggggaggccacatggaatagtcccaggcagatactacaaatggttgtcaaagccctcttggataacaaggagggaggaatgaggtgatgaaacaaataaggcagaagacaaaggtttcctgacccaagttctccctctctcagcctccatagatgggctacctcccatcattctccagggaccagccaatcagacactggtacttggctcttctgtgtggctgccatgcagagtgattggaaacccccagcccaacatccagtggaagaaggatgagaggtggctgcagggggatgactcacagttcaacttaatggacaatggcactctacacattgccagcatacaggtgagtgacatccctggaatctttgtaactggaaaatagctatctggtccacattccaactctagtaagtaccaactaggcatctaatccatttctacctctctgctctctcagacttcctaaagtatccagcatcctcctcatccttctgttacctgcctctccaccccttcaccctactttgctccattcccagtgggccagcactctaccttctcctacaggagatggacatgggtttctacagctgtgtggccaagagttccataggggaggccacatggaatagctggcttaggaagcaaggtaagtttatccatcagtctagtcttgcagtagctttctccaggtttgttttaagagtagccaatatcttccaagcctcaggcttaattttatcttccaaacactatgttggtggggatggggatgaaccagtgcactcgggaggcagatgtgagtctgggttaatatacataaccattgccacttttggagctctacagctcttctaggaaggaggcatgtctcactttctccaccaatgtctctatctaatgataatctatcactgcagaagattggggagcatcaccaggtccagcaacaggacccagtaatcctccagggcctccctctcagccaatagtcacagaggtaaccgcaaacagcattaccttgacctggaagcccaatccacagtctggggccacagctacctcctatgtgatagaggccttcaggtatggagagaatgttgtgtgtctgtgtgcttgcaagtgtacatgtgtaggtgtatatgtgcacatagagaccacagcatagtatcaagtggcctcccccagggtctgtaaaacagtcttgctttgaatctgggtctcactagttggttagacaggctgactagtcagctctgaggatctacctgtctctaccctcctcccccaacaaatgctaagattacagatgcatgccaccatacctggggtttatgtgggtgaatgggatgtgaactcaggtcctcatgcttgcaggactttaaagtcctcagcaggcctttacctactgagctgtctctccaggcccatggagacaattgttgaatacaaagctggagagttaaaaacaggggggatcctatgtccttagggcctttgctattttggaataatgattgtctaggcctcctctcccaagataaggttctctagggaatgggtggaactgagtagacaggttgggcattcctggattagacactcctgtcatctctttccttcttagccaagcagctggcaacacgtggcggacggtggccgatggggtgcagctggaaacttacaccatcagtggcctgcagcccaacaccatctacttattcctagtgagagcagttggagcctggggcctcagtgaacccagtcctgtctctgagcctgttcaaacccagggtaaggccagaggccttatgggcctgagtatgaatgagggacagcagagaggagcccccaccccatccaaaccacagaatggtggcagttcaccagattttcttttgatatgccaggtctataccgatggccccagacttcagcaggaagtcatgctctctttcatggaagggccaagaaggggaggaggggaaaatgagggcatgtgatcgtcatccatctcagtaacgccttactattgaacctcttaaccacatgcagtacagattgttaaggctaaaagggacttgggggaatcaagtgcacataggagacaatgatttgaggcctttaatgaatgcagaagggaaaagaaaattcatactagccgctcctcctggttacctctgtaaaagattcccctaacgcagctgtgctatgcagcaatgcatgacagtctgtgagcctggcagagacagaacataaacatagccttagtacaacagtcttgcctttggtggcccctgctgactgggctctttgctcagcagacagcagcctatctaggccagcggaggacccgtggaaaggccagcgagggctagcggaagtggccgtgcgaatgcaggagcccactgtccttgggcccagaactctgcaggtttcctggactgtgagtgtggcatagggatgcggttagaaatggcatggcgatgggggccatgagggcatctgaggagtgatggggagtcatgggtgagaggctagggaaggcaggagcggaatagggtttgggcttggaggtcctgtgtggctgcagcctcctccaggactcgaacacactcttttatatttcctataggtggatggtccagtccagctggtgcaaggattccgtgtgtcttggaggattgcaggccttgaccagggaagctggacaatgctagacctacagagtccacacaagcaaagtactgtgctaagaggactgcccccaggggcccaaatccagatcaaggtgcaagtccaaggccaggaggggctgggggctgaaagcccttttgtgaccaggagcattcctgaggagggtaaggatgtgatgcagagtgatatagactggagaggaggaagaggagggagatttgaacagcaatgtaggaagggaggatgttctgtcatgtaagaactgggaggatgaaacttgaggccgcttgcaatgaccgtctgtgtccttcttcttaccatgctccaccctgggctagcccccagtggcccccctcagggagtggctgtggccttggggggtgatcgcaacagcagtgtcactgtatcctgggagcctccacttccctcccagcgaaatggggtcatcactgaataccaggtacagagttagcctggggattgggtgagtgggctgggcactgggagtggattaggggaggtgagacatagggccaaaagttatggccgagggtagaggtaatctttgggtctgggaaacgtctgagagagaggaaacgggttcaaagcattgtctccagtttcccctagctgcaacctcaagtttttccttgggacctaaatccagttcctgaccacacttgtatccgggatctctctagatttggtgcctgggtaatgaaagccgattccacctcaatcgatctgcagcaggttgggcacgctctgtgacgttcagcggactgctaccaggccagatctatcgagccttggtggcagcagctaccagtgctggcgtgggcgtggccagtgctccagtgctagtgcagctgcgtgagtcccgtggtgggcatggaagggcagagctagagaacttggggaaccaaaagtggcagagctttaattccctcacttgggaggcagaggtggttgactgtgaattcgaggccagcctggtctacacagaatgttccaggctagccaaggatacagtgagatcttgtctcaaaataaataaatagaatgaaattaggcaataaaaattttaaagtaataaaaaataacctgagggaatagtggggtagttgggtttacagatctggaatgacgctgtccgagcccctggatttcgggtttgtctcctttcatctttctgacccccacagcattccctccggcggcggagccggggcctgaggtcagcgaggggctggcagaacggttggctaaggtgctgcggaagcctgctttcctagctggcagcagcgcagcctgcggggcgctgctactcgggttctgcgccgccctctaccggcgtcagaagcagcgcaaagaactcagtcactatacgggtgagagccacgcctccgggcactgggatcctacgtgggaggggcttcgggggaagcggggcctcaactgagtgggtgggcggggccttaggtgggtccaaggagagcactgcccattcggttgcctcgcagcgctaagcgaggaaagcaagcttggaagtgagagggcagttctagaggggaagtaccagattggacagaggggttagatttaacactgggacactggttttgcaattcaacctcagtaaataggaacgtacctttcaagtcagagggcctgtatgacccctcgatgtctagactggtcgactcaaagatctactcctcaataaaactaatctctgaagtttggttacatgtaagattcacttgttaaagctttgggggggggggaaggaggaaatgaagtcagaaggggaactggtagaaacaggaggatcaggagttcaaagccatccttggcttatagtgagttcaaggacagactgggctacatgaaatcttgtctcaaattggggagggggggaggacagagactgaatacagacagagagacagagacagagagttagagacagagacagacttgagtctcattccaagaaattagtataaacatgagtagatttggaatgaggatcgaggagtagacaaacaaatggagttcccaactacccacctcatttcccctcttctttttcttccgggttccttttcggaagcctcctttgcctacacacctgcaggtaagcatctctactctgtggggttcagaaccccaataccaggtcttctcttaccgcgttcccctttatctccctcagtgtcctttccacactcagagggcctttctggatccagttccaggtaatcttgggacctttctaatgataattgtttctacagagagagtgtcccttccactccaggcctgaccacctctccatatccagcctctcctagtccctgcccctgaccattgtttctgtcctgtgactctagatttctgccatcttcctcccttcaccggcctcttttggctccccattcccaatattcacctgctccccctcaggccacccatgggccttggccctgctgcctacccatggctggcagactcctggccccacccacctcggagtccctcagctcaggagccccgggggagctgctgccccagcaatcctgatccagatgatagatactacaatggtgaggaactctaactcccttaagggggtacacctaccccatcccccaagacttagccttctgccatcctcacttctcactccgtcagcttcctggggcacactgaagggatctgaggaaccctggccttcctgagtttggttagagcttagaggactgggggatggaccttgggcttgagctatatagcacagcaatcagtccttaaccttggccttggtttgacatgtcatgtcagatttggggtgggggaggaagttgatcctatggaatctccttctgccttccatcttcctctgtgccccgtgtttgtgtgtctgcctcctcccctgggcctccctctttctcctcctcagaggcaggaatctccctgtacttggctcagactgcacgtggtgctaatgcctctggtgagggtcctgtctacagcaccattgacccagtaggggaagagctacagaccttccacggagggttccctcaacactcttctggggacccaagcacctggagccagtatgctcccccggaatggagcgagggggacagtggtatgaccctcctcactttagtcccacccacaatctcctccatcctctggcacctggcctgtgacttccttctgacacactgactcatctctggctcttttctgcatgctcctggcatgcccctatctctcctccccaggagccaggggaggccaggggaagcttctgggcaagcctgtacaaatgccatctttgagctggccagaagccctgccaccgcctcccccttcctgtgagctgagctgtccggaggggcctgaggaggagctgaagggcaggtagggatgctgtcagcagcacatacccctcacatttagagaagccagagacttcctagagcagggagtgggcagagaagcttccagaggacaatgtgaaggactcattccttcgcttctcatcttccttccccacctcagttcagatctggaagagtggtgcccaccagtgcctgagaaaagccacttggttgggtcaagctccagtggtgcgtgcatggtggctccagccccaagggacacaccctcccccacttcttcttatggacagcagtccacagctactcttaccccctcacctcctgatcctccccaaccccctactgacatcccacatctccatcagatgcccaggtaaggaggtgttgagtaccctgaatattataggccctccatatacatttgtttggtgggtggatgaatatataggggaagagggttcagaagtctcatggctgtgtttagatgacagcatgctgtgggggaggaagatggcgtcgagcagagctctcactcatctttcaggctctctctctctctctctctctctctctctctctctttggagtgggtctgcaaacttccaaggcattgcatacaaacatggatgtcctcatgcttccctggtttgaggccttgtgggggacaaatcatgtcttgcttatctaagtattaggctgagggtgcagcacaatgcctggagcagagtgagctcttgattctgtggagtgaacacatgctgaggccttatgtcattgcaggagagtacccctcgggccaagttctcctctcagcgtatcccagcccgctctgagtagccatgacggacggcctgttggcctgggtgctggccccgtactctcctatcacgctagccccagtcctgtccctagtacagccagcagtgcaccgggtgagtctgatgaaattcagcttgcttccacctcactctctctcttcaaaacttcctttctcaatacctttcaattgcctccccgtacctctctccctttgtctcttaatactaaagggagaacccgtcaggtaactggagagatgactcccccactccatggacaccgtgctcgaatccggaagaaacccaaggctcttccctacagaagggagcacagtcccgggggtgagaaccctaggcctgggagatggtgacagttagtagagagaatgggcaggaaaccaagaagaatgaagcaggtgacaccaagccttgggtcatgcatttgcctcccagtgtcagggatgggggaacgaggaatattagtgtctggagaagcaggagacttggctgaaaaagagttttcttctcagacttgcccccaccacccttgccaccaccagaggaagagacaagctggcccttgggtctgcgggcagcaggcagcatgtcttccctagagcgagagcgcagtggggagaggagagtggtgcaggcagtgcctctaggggcccaacctctaggggcccaacgtgggccccacccagatggtaaggagagccagggcagagggaggggactggaggcttgcagaagtcccaatagtccccagcttccagtggattcatgcatctggtcaacattgaaattgtctcttgtctctttcattccctctaagtaaaagttctcagagtctccacaatccccccccccccttccaggactgaagccaaggatgaggaaaaagtagtgtctgggtgctctgtcctgtcctccctttcctaatctctgtgctcaggagcaccccaaatgtttcttaacccatgtcatgtcaaggtcatgtgttaggccttcaacctgccggtgcccatccctcagaaattacccagagctgggagagtttacagggtgccagtggacaagtggtgacagtctgcttcctcctgtgggcccagctgcacttctgggttgtgctgcggaagaggcctggcttccatacggcagaccaagcttcctgagccatggccagggcaccagcacctgctctaccgctggtagcaattcttctaggggttccaacagctctcgaggttctcggggctctcggggccctggacgcagccgaagtcgaagccggagccagagccagagccagaggccaggacggaatcgccgagaggtgggaatcaaaggacataaagaagcagagcaaagggctgggaggacaggccaaagggaaacagagaagcagtaaagggctccagagatcacaaagagagggcccagggagggttgtaagggagaaatccttgagaagaaatgacaagggctgagggtgtaatgacacgtaagaggagagtctgactatgccataggaggtgtagattagaaaaaagggctgattccttcctatgcatggcctgtgacaaaatagcagatccccgcccctgcattacacacattcttttctccttaggaaccaagatgacccttcacgaagcaatgagcttattgaaggctccacagtgcaagaatatgaaccccttccctggtcaaccgatgtgggccaagaggagcaaggatgggcagactttcctcccagcaatgatgcttgtgactcactgaagcacactgtctacaacagttttagttgtcttgggaatcagagaactagctctttactttccatctcgttctgactgagacatgtttgtacaaaaggagaaagaaaaaagcctccgatctgagccctggtccctgcttgttttgtgcagtgttgtaagtagagcaggctatgaaggtctgaaggtcaatacacgctggtagcttctgcatgcttttgaatttctgttaaaattgcaagctaagaacagatgataagtgatactggcctgaactgtgtcacagaggaactgaagccactgtcctccagtgtgtatctgtccactgtcctccagtgtgttagtccactgtcccccactgtgtccactgttctccagtgtgttagttcagtgtcccccaatgttttagtccactgtcctccagtgtgttagcccactattcactgacacacaaacaacttaaggaaggaaagggttattttctctgagcttttcagtactgagccgatggttgactggaccttgttttgcggctatggtgaggcaaagtattatggtggagtagagttgctcaactataacatccaagaagcagaaaaaaagtatacaagaagtggccaaggttaaagaaatgatctccccagtgacttacttccttcagtcatcccacacctcatagaagctcgcagatgaagatgaagttactacctttatgatctagtcacctctcaatagtgacaccaaatatagcccctcaccacataggcctgttggagggatattttatatctataccataaaattctgttactttaggtatattcagatagccaacacatagatcattgttcctccttcagaaaactgagccaacttcttctttggtgcccttctctagggtctatctgctcactcacctcacaaggttaaagaaaggagagagagagagagagagagagagagagagagagagagagagagagagagagagagagagagagaatgtggtggtatttgcctgtaaatctgaacttgagaggcaggaaaattaggtgttcaaggccaatctcagctacatagcaagtctgaggttggcctgggctacatgaaacctagtctccagcaaagcaaagcaaaacaaaacaaagagtatatgcgtgaaatctcacccaagaagaaagtatcaaagagtatatgagtaacatcccagccaggaagaaagtatgtgtttcattgccccgactccttcccagagggtgtctgcagagggtacttcttagcaacattatatctagaatttgtcatagacaaattgctatcactctcaccccatagttgacccacaggttggctgcttgcttcatcctcactgctctaaacagcttggaccttcagagccatgactttgccctccactttgacctgaatattgttgtgtgcagataccttttcccctttcagtctggcaaacagagttggaatagtttcgagaggaattttgccagaaagctaaaggaagggaaaaaattttaaaacaggaaaagaattgaacggatgtgcaacactcattgcttttttcaagatcctgcaaaccaatcaagctggttcactgagcatagctcagaaatcagtcaccctgatcaaaccgcttggcttcctaacttagagtcatcttcaggaagagctgcagggcttaggaagtagtaccactgggccctgctgctgacacaccctccctccacacacaccagaggtatcttctttggctatgacagtgctctatagcacaattccgcccatgacctaacccagcatgtgtgagagatgcaggtagccctctctctagtgactttcaatggctcaggatccatgtcctccacaagactgtcctgtagttgtgtctaaaaagtgttcactagccaagtatcccagttgactctaccttccgtggaatttagttccctgtctatttttaagacggcatctggaactggagcaaagctgaggctgcagaagacaggagttggctccccaagatctacagacccttagacccacctactcctcttctttacatttcatttaaacttgctgggtatatctcattcccttcaattgcatgccagaaagaaatgaggccattctctgagtaacaatgaaggcctgattctgtctctagccaggtaactcttagacctctgcaggtacccttcccaaaatagagcccaaggaatgatgtcacagaactcgtctttacagttttatagaattaagttccttaagctcagagtggcggtagaatgagaatagcgcattggttccctgtttccctgcgtcctttccttcagtctcctccattgatctcactttgaagcattgactgtgacgctgtatagggcccactgcatccacgacctttctcctttagtttccttgcatggtgtgactggggaaagggttgagctggcctctaagggaggagtccaagtagatatgagagggctcttccacaggtcctccaccatagccctcaccaaaaaacatttctgtccttcctgaagacctggttggcttcccttctttccatgatccacttaggtgggagctccggagccaggcttacttaggccaaaggttctggttgtggagagtctgctgtcctgaagatgctgtcttgttctcagtgggaatccaagactcccgtgatcatattttggtttgctttcatttattttaacaatcccaatgacagagctctccagaagcctagtgacggtggacttctattacagagaagcataggccaagacctccacatgtgagaaagccaggggacagacaggagagtggtctgggtgctcttctggccttctcagggacaattcaggaggaatctggaatttgaaggagaatagagttactaaaaccccaagctcccttttggttcttctccaggacttctcaattaaggttaattgttaattagttagttagttaattgttaattaatgttagccagtcagccagatacttaccaccagccttgggcacagcaccagttagccaacttcgctgggaagaggccctagaatcaggaggccagggaggcagccccctccccagcctctgggtgtggctgatctcagcatcttccaaccagtctggcctccactcccacaaaggcagagagaagcttcgggtcagggagagatcaccccgaggggagggaggtgatgaggcatctgataaagaaggtggatcagtcagaaggtttaatatttacctcctagggaccaatttacagcagaaagcttaggactgatttggggtccacatacatctctacccctaaatataacctaactttaattcaatccatcagctccaatggctcctgggacctaacatatgtttctttacagagagtagtttggcttgttttcttccagaccagctctggctctctggactcttcacttcctactgttgggtatcctcttcctcctgtgatgggtgtttttgacctggatataatttttttttcataaagatttattttgtctttaagtatacatgtatgtgtaagttaaagtgcttgtgagtgcagtgcccatggaggccagaacagagcatcagattccctggaactaacattacaggtgatttttgagccatctgtcatggatgaccagacctgaacatgagtcctctttaagaacactaaagggttcttaacctcttagccatctttctagccctgacctgggtaatttttatcctgtcctttgctataggccttggttttcttgagaccaaagggtagagtaaaggtaagtaagatagtgtgcatgtgagattacaagtatgtgtgtgtgtgtgtgtgtgtgtgtgtgtgtgtaggatgaacttccaagggaccagtaatcactaaatcacctcctgcagacatggagagagactgagcccaggtattcctcaacctcagccatggacaggcagtcatgaggcctggaagcccggaaggagctaggaggcatatgaagtgccagttgaaagaagactagctgtggggcagctctttctgggacccacatctggcgaatagcccagtcctgaaggtggggattttgggccacccagctggattcctctagccttcataattggactattcatccgtgatctatgggggaacctaaagtggtcagtgcatctgcctgacctagtgctttctgcattggaaagaatggtaaagaattctcctcagggagttcttaattatccatgggaagcacttctcttagtacctaggacataccaatcattcggtaaaaaaaatacctctccttcttttgagacaaagttctactttgtagctcagactgacctggaactcatcatttttctgtttttcccacccaaatgctgagattttaggtacgtgccaccacaataaaactaattgtttagatgactgtgagggttaatggtgactaggaagcctgactcttgtttagggaaaaggggagctgtatccatgctaagaaaagtgggtgggcccacataccagtgaagacacagtcagcttccctgggatccagactgaggccaaagctatccacagccactgccagggcacgagcaaagtgagtatcagcgaggaaggagccatcagaagagctaaccaggctggccctggcgctggggacattgtcctcagaagctgagccccaaccattggccagggagccctcgctgggtgtaggggtggggcagggccgaggtggatacagtaagttcccaacctcagaccccacgcccccgccagctctgcccatgtctgccagtcctgagcaggttggtatgctgatatagccataggttgttggcggggaaggagctcttggcataggagatacactgttcctaaaaggcaaaaatggaagacaggacactggttagggcacagtagcaggagcatggcaattgaggccgtgtgctccctagcatgcttagctgtagtgtttcggctctcccagagtactcacgtgggtgtctcctccccatcactgagctccagacacagggctacctcctcgggggtgagcacgctgtcctgatcctcctcctcctctaaggatgacagcgaggagctggacaggttgctggaggatgggctaggacaggagaggaaagaggcctgggggctggaaggtctggaagagttgaggacggagagaggggctgctggcagtgggtcagaggagggagcttggagcttctccacacacctgggtgggggatgggagagacggcagattagttactctcagatcactcttcaggcccacccacatcatgagtcttgtctcatcaacttctcccaacgccctcagtgtcccaactctgtttcccgacccgtgccctcttactggctctgtgggtcatgactggaagctccacgaagagaaaggggtgttggagggagtggacgagatgccagctcactggagttgcggtgaagttgtggtcccacagcacgccaggataccacggctcggggcgcttctcctggggaaccagagtttggacctgagaacaacagattctctagaatcccatgcagtacggattccaacctgctcagaccccagtgtactgcccagtccacttaacctccttcaccccaaccccctcccccattcacaccatagcagaaccaagaagggcctggactggtggacctgaaaacctgccttaccctcacttccccactctcacctgggctttgagaaaggttcttggaggctctgcttcccaactcccaggcccagatttccatggggtggctgccccggagcagtggggagctgttagcttggtgcaattctagaagggaaagacagctcttacggactgcaagagtaggcttttcagacctcaatcataggtcctgtctttaaccttgtgattcactcactcagtcctgggaccttgaatctagagggaggaagagggagttagctccttctctctgctcccatctctttccagccctgataaactggaaagcacactggctatttttagctgtatgacctcagtgacatgcatcaagctttatgaacatcaagttcatttgtgaacaaccacttcaaagggcgatgttgaggattcaataacaacagattgtaaagcttctggctccagacagatattctgaaaccaacgttcttttcttggatgtgtgcattccagtgttgctgatctctagcctctcctactgctctccagtcgacttctgctccatgaagacaaatattcctcttctcagagagaatctgttaatgattttcatttctcaccttgcaagtagttacccttgtcctgggatacctggctatttacttgactggggaggtgggaaaaccgggttagggtgaggtgaaccacctaagtgaaccgttaaaaggcacgctaggaagtcctgaggcagaattagaggcctcctaggaaatggctgtagaaatgggggtgtggctcaattgtggagcatgtgcttagcatgtgaagcccctgattcaagccccagcagcgaagggataaaaggaagaaagaagagagggaggaagagagggaaggagaaaagaaataaatggctggagaaactaactcctctttgcctagaactgttaatgttccaagagggatcatatattccattaaagtcactgtggctttccacagaagaaaactgtttctttctttgtttgtttgtttggttggttggaagattgaattcggggccagctgcatgccaactgcaggctttgccactgagtttatgactcctaaatgagacttattccaactattttagctggcatttcattaccattcaagattgatcatgcaatagccctgaggcaaaatgggaaagaatgccagcttattaatatttacagtcacataaaattgtccatactgaacaagctcttaattactcttcatccacccttgccttttttatttttaactgaagttggatcttatctacttaaatacaactgactataaaaatatctgccaagtctctttaagcagttccgagagtctataaagatggcaggcaaagtgcaatgccttgccttgtaggacagcagctgggaaaacagccctcaaagcagggacagtgctaagtaattccctggagattctgtagtctttggagacaaatcatccaggcttcaaagttgagctctgcatcttattctggaattttgaataagttacccgatcattgtgtcaaattttgcctccctgtaaaattagagaagcaacgtccagtcccctaatctgcctcaaggatgacacatgataacaaggacgagtaaggcagctagcacgtttctcaacacaacacaagtcgttgcttgagaaatggagattatagtggttttcttctagaaagtcaaaacaggcagctggaaataaagagataaatctgtcctgtaagtattacaggtatctcttcctattataggggactggatccaactatacttgtttgtcggtcatcacagatggtgttcagaagagagaaaaggatgtgccctatgtctcttgtattccccacgccggccgtgcagtggtgcttcttaaatgtcctctgtgtccaattgagtgcagagacaaggcccactattgtaaagaggagctgagcaatcatccccccgcacgtggagatagaggtctgtgggccagcggaccacattaccactactatagtcccaccccaatctgccccagagtgtggcttttctcccatcctcaccctgcttctttttggccttccaagcctctgtaggggtcagagacatgcgtggggaacagagtcccctgcggctgcagagactatctgagctagcccaggggctggaggttccagccaacttggatggaaagcgcctagcagctggtgtcttggggcttggccggactggagggctggaaggctgctctgcaatgagggagccgtaaaacgtgctcgtgtctggaagcaggggtacaccggggctccgagggtcccaggagatcactaacattaaaaataacgacaaaaggcgttatagtgagcacattgcacccctcctcccctttgcatccccgaggtccctgtgcaggaggcatagttacaggagcgcctgccctctagtgggtcccgagggtccaatcccagccgactactaaggctgctgctgctgctcaggtctcgagagccagaggtggaacgccaggtgtctgccagccatggggagtcactgtggtccatcctgggacgtggtggggtgacaaggcaagacaggaggaataggaaccaaattagtcaagacgtgcagctctgaggagcagaaatggtagtgtttgctttaattaggtgtccctgaactcagcatatatctttctatcttgggattaggaaaaagctaatttgtcgagagttggggggtttaggagcgactgttacaggtactgagatgaaaagaacaagtatggagccaggaaaacacaaatagaaaatccctacctgccacagtttatctgcacaacccaggaaataaatctactcagagagccgagccactctgcttcctcaactgttaaatgacaacagaggtcctccatataagactgatgctgtgaaatttgagttaaggaaacttgaaatcattctgttggcagaacagaagcttgctacaatggctgttggcttccccactgcctgaataatccttcaagatcagcggtttgctaaaattactctgcctagaaccttcaattgctccttatttatcaagacagagttcagatgcctagcatgtctaagcttccttggttgggcttccagcttttagcattattctttgttctgacttatataccatatatcccagccagaacaatggtttacatttcccatggatatagcaagctatttctccttctccccacgctttcagaggataagtgtgggctcccctttctttggtttctctgtccccttccatgcattgggtccacactgcacatccaattccaggttgctctcctgcctgtctctgcctagtctgcaagttcctggtagatagagaatattccaaaggaatggatgagcagatctgaatagaattcccctcgaggagaatggaattcagaggagcagaggagacaaaggcagaatgtagtcagaagagagaagccagagagcaaagaaaaactcaggtacacgataccaggcagcctggaaccttgttctgggctgagaatatgaaagaaaattggtagcctgagggcttgacacatccagtacacagtaggtactcactgacacatccagtacacagtaggtactcaataaactctcctcaaacaattcagacccagagtgaaggagtaatgaagttgacaaagagaggaaatgtttacctagtctaaaactcagcccatggtgtattgtgcaggggggtgagggttggagggagaatgtattttttcttagtattgtgtatcttaactacagactaactctggtaataagaggttggagcagaggtacctattgtttggctcaggtttggaataatgagtaacaatctataacctaggagctggtcgccccctactggaagtatgcagcatatgcaagacaggtgggtggctcaagaggcaggcaactgtatagaatgcaaagatgctatcagaggtaaacacagtaggaacacagaggaaactactactcacttaacaagcaagagtagtgagagtaggtgacaaggacaacagatagttggtcagtaggtcactcagcagacaagaggactacagattcattgtcacacagagtccaagagagtttcaggtactaggaccctatactgcctggcaggagtgtagagtaaaactccacctgatttcctgctgagactctactcactctgaactctgtgacctctctaagggctcctttttagcttctcacctgtgttttagaatggcgtcctcgctggtgtatctgtacagacctg

SEQ ID NO: 106 - DNA, 4992 bp, Mus musculus
tcaccaaagcatgctcagtcatcgctcactagtcaagaaatgaggcctggatctcaagaaggcccagaaaaccttcctaggagtttgtgcccggatccttctatagatctgcctatctgagggcggttccgttgttccaggctaaggcgttaccagagcctacagagcaggaggactggtgggccgatgtgatgtagatgactctctagcaaaggaagcatgggagatgagtgaggcagagggttctcttactcttcagagcaaacctggtcttcccccagttgctttgcctgggtacttggagttaccttcttctccagggtcaagagttgggccagaagatgccatgccacgcatcgtggagcagccgccagatctggtggtttccaggggcgagccggctactctgccctgtcgtgcagaaggccggcctcgacccaacatcgagtggtacaagaatggggcgcgtgtggcgactgcacgggaggatccgcgtgctcaccgtctgctgctgcccagcggcgccctcttctttccccgcattgtgcacgggcgtcgctctcggcctgacgagggtgtctacacctgtgtggctcgcaactacctgggagcagcggctagcagaaacgcctctctggaagtagctgtcctccgtgatgatttccggcaatcgcctgggaacgtggtggtagcggtgggggagccagctgtaatggaatgtgtgccccctaagggtcacccagagcctttggtgacctggaagaaaggcaaaataaagcttaaggaagaggagggaaggatcaccatacgtggaggaaagctgatgatgtcacacacgttcaagagtgatgctggcatgtatatgtgcgtagcctccaacatggctggagaacgagagagtggggcagctgaacttgtggtactggagcgtccctcatttctgcgtagaccaataaaccaggttgtcctggctgatgcccctgtgaatttcctgtgtgaggtgcagggagatccccagcccaatctacactggcgcaaggatgatggggagctgcccgcgggcaggtatgagattcggagtgaccacagcctttggatcgaccaagtgagctctgaagacgaggggacgtacacgtgtgtagcagagaacagtgtgggccgcgcagaggcatctggctccctcagtgttcacgtcccaccacaatttgtgactaagccccagaaccagacagtagctcccggagcaaacgtgtcattccaatgtgagaccaaaggaaaccctccacctgccatcttctggcagaaggaagggagtcaagtcctgcttttccctagtcagtcactccaacccatgggacgcctcttagtctctccaagaggccagctcaacatcactgaagtaaagatcggggatggtggctactacgtgtgccaggctgtcagtgtggctggtagcatcctagcaaaggccctattagagataaaaggcgcctccatagatgggctacctcccatcattctccagggaccagccaatcagacactggtacttggctcttctgtgtggctgccatgcagagtgattggaaacccccagcccaacatccagtggaagaaggatgagaggtggctgcagggggatgactcacagttcaacttaatggacaatggcactctacacattgccagcatacaggagatggacatgggtttctacagctgtgtggccaagagttccataggggaggccacatggaatagctggcttaggaagcaagaagattggggagcatcaccaggtccagcaacaggacccagtaatcctccagggcctccctctcagccaatagtcacagaggtaaccgcaaacagcattaccttgacctggaagcccaatccacagtctggggccacagctacctcctatgtgatagaggccttcagccaagcagctggcaacacgtggcggacggtggccgatggggtgcagctggaaacttacaccatcagtggcctgcagcccaacaccatctacttattcctagtgagagcagttggagcctggggcctcagtgaacccagtcctgtctctgagcctgttcaaacccaggacagcagcctatctaggccagcggaggacccgtggaaaggccagcgagggctagcggaagtggccgtgcgaatgcaggagcccactgtccttgggcccagaactctgcaggtttcctggactgtggatggtccagtccagctggtgcaaggattccgtgtgtcttggaggattgcaggccttgaccagggaagctggacaatgctagacctacagagtccacacaagcaaagtactgtgctaagaggactgcccccaggggcccaaatccagatcaaggtgcaagtccaaggccaggaggggctgggggctgaaagcccttttgtgaccaggagcattcctgaggaggcccccagtggcccccctcagggagtggctgtggccttggggggtgatcgcaacagcagtgtcactgtatcctgggagcctccacttccctcccagcgaaatggggtcatcactgaataccagatttggtgcctgggtaatgaaagccgattccacctcaatcgatctgcagcaggttgggcacgctctgtgacgttcagcggactgctaccaggccagatctatcgagccttggtggcagcagctaccagtgctggcgtgggcgtggccagtgctccagtgctagtgcagctgccattccctccggcggcggagccggggcctgaggtcagcgaggggctggcagaacggttggctaaggtgctgcggaagcctgctttcctagctggcagcagcgcagcctgcggggcgctgctactcgggttctgcgccgccctctaccggcgtcagaagcagcgcaaagaactcagtcactatacggcctcctttgcctacacacctgcagtgtcctttccacactcagagggcctttctggatccagttccaggccacccatgggccttggccctgctgcctacccatggctggcagactcctggccccacccacctcggagtccctcagctcaggagccccgggggagctgctgccccagcaatcctgatccagatgatagatactacaatgaggcaggaatctccctgtacttggctcagactgcacgtggtgctaatgcctctggtgagggtcctgtctacagcaccattgacccagtaggggaagagctacagaccttccacggagggttccctcaacactcttctggggacccaagcacctggagccagtatgctcccccggaatggagcgagggggacagtggagccaggggaggccaggggaagcttctgggcaagcctgtacaaatgccatctttgagctggccagaagccctgccaccgcctcccccttcctgtgagctgagctgtccggaggggcctgaggaggagctgaagggcagttcagatctggaagagtggtgcccaccagtgcctgagaaaagccacttggttgggtcaagctccagtggtgcgtgcatggtggctccagccccaagggacacaccctcccccacttcttcttatggacagcagtccacagctactcttaccccctcacctcctgatcctccccaaccccctactgacatcccacatctccatcagatgcccaggagagtacccctcgggccaagttctcctctcagcgtatcccagcccgctctgagtagccatgacggacggcctgttggcctgggtgctggccccgtactctcctatcacgctagccccagtcctgtccctagtacagccagcagtgcaccggggagaacccgtcaggtaactggagagatgactcccccactccatggacaccgtgctcgaatccggaagaaacccaaggctcttccctacagaagggagcacagtcccggggacttgcccccaccacccttgccaccaccagaggaagagacaagctggcccttgggtctgcgggcagcaggcagcatgtcttccctagagcgagagcgcagtggggagaggagagtggtgcaggcagtgcctctaggggcccaacctctaggggcccaacgtgggccccacccagatggtaaggagagccagggcagagggaggggactggaggcttgcagaagtcccaatagtccccagcttccagtggattcatgcatctggtcaacattgaaattgtctcttgtctctttcattccctctaagtaaaagttctcagagtctccacaatccccccccccccttccaggactgaagccaaggatgaggaaaaagtagtgtctgggtgctctgtcctgtcctccctttcctaatctctgtgctcaggagcaccccaaatgtttcttaacccatgtcatgtcaaggtcatgtgttaggccttcaacctgccggtgcccatccctcagaaattacccagagctgggagagtttacagggtgccagtggacaagtggtgacagtctgcttcctcctgtgggcccagctgcacttctgggttgtgctgcggaagaggcctggcttccatacggcagaccaagcttcctgagccatggccagggcaccagcacctgctctaccgctggtagcaattcttctaggggttccaacagctctcgaggttctcggggctctcggggccctggacgcagccgaagtcgaagccggagccagagccagagccagaggccaggacggaatcgccgagaggaaccaagatgacccttcacgaagcaatgagcttattgaaggctccacagtgcaagaatatgaaccccttccctggtcaaccgatgtgggccaagaggagcaaggatgggcagactttcctcccagcaatgatgcttgtgactcactgaagcacactgtctacaacagttttagttgtcttgggaatcagagaactagctctttactttccatctcgttctgactgagac

SEQ ID NO: 107 - protein, 1358 aa, Mus musculus
GVTRAYRAGGLVGRCDVDDSLAKEAWEMSEAEGSLTLQSKPGLPPVPGYLELPSSPGSRVGPEDAMPRIVEQPPDLVVSRGEPATLPCRAEGRPRPNIEWYKNGARVATAREDPRAHRLLLPSGALFFPRIVHGRRSRPDEGVYTCVARNYLGAAASRNASLEVAVLRDDFRQSPGNVVVAVGEPAVMECVPPKGHPEPLVTWKKGKIKLKEEEGRITIRGGKLMMSHTFKSDAGMYMCVNMAGERESGAAELVVLERPSFLRRPINQVVLADAPVNFLCEVQGDPQPNLHWRKDDGELPAGRYEIRSDHSLWIDQVSSEDEGTYTCVAENSVGRAEASGSLSVHVPPQFVTKPQNQTVAPGANVSFQCETKGNPPPAIFWQKEGSQVLLFPSQSLQPMGRLLVSPRGQLNITEVKIGDGGYYVCQAVSVAGSILAKALLEIKGASIDGLPPIILQGPANQTLVLGSSVWLPCRVIGNPQPNIQWKKDERWLQGDDSQFNLMDNGTLHIASIQEMDMGFYSCVAKSSIGEATWNSWLRKQEDWGDGPATGPSNPPGPPSQPIVTEVTANSITLTWKPNPQSGATATSYVIEAFSQAAGNTWRTVADGVQLETYTISGLQPNTIYLFLVRAVGAWGLSEPSPVSEPVQTQDSSLSRPAEDPWKGQRGLAEVAVRMQEPTVLGPRTLQVSWTVDGPVQLVQGFRVSWRIAGLDQGSWTMLDLQSPHKQSTVLRGLPPGAQIQIKVQVQGQEGLGAESPFVTRSIPEEAPSGPPQGVAVGGDRNSSVTVSWEPPLPSQRNGVITEYQIWCLGNESRFHLNRSAAGWARSVTFSGLLPGQIYRALVAAATSAGVGVASAPVLVQLPFPPAAEPGPEVSEGLAERLAKVLRKPAFLAGSSAACGALLLGFCAALYRRQKQRKELSHYTASFAYTPAVSFPHSEGLSGSSSRPPMGLGPAAYPWLADSWPHPPRSPSAQEPRGSCCPSNPDPDDRYYNEAGISLYLAQTRANASGEGPVYSTIDPVGEELQTFHGGFPQHSSGDPSTWSQYAPPEWSEGDSGRGQGKLLGKPVQMPSLSWPEALPPPPPSCELSCPEGPEEELKGSSDLEEWCPPVPEKSHLVGSSSSGACMVAPAPRDTPSPTSSYGQQSTATLTPSPPDPPQPPTDIPHLHQMPRRVPLGPSSPLSVSQPALSSHDGRPVGLGAGPVLSYHDSPVPSTASSAPGRTRQVTGEMTPPLHGHRARIRKKPKALPYRREHSPGDLPPPPLPPPEEETSWPLGLRAAGSMSSLERERSGERRVVQAVPLGAQPLGAQRGPHPDGKESQGRGRGLEACRSPNSPQLPVDSCIWSTLKLSLVSFIPSK

SEQ ID NO: 108 - DNA, 100608 bp, Homo sapiens
ctatgtaatataatttcaccagaatatctgggacagatgttgcaaattaatgtttctggagtttcaataggttcagtctaaaagaacacaatgaatgaaaaaatcttgatctcactgtattatcttctagtcctcttttatttaactgtaggttatggcccattagtgggttgtacaattaattttagcaagttgtgaccacctttctaaacacaagtaggagatgaagagataacgtgtaagggaccaagaagtgaactattctggtgaagaggacccagggacagtgaaagggggctagggacaaaaggtgaatgggagctggtttcaggttggaagaatgggtgcatgtgagggacatttggagaatgccatcattgaccatcaatggggtcacaacaagcaaacctggagtatccttggtctactccatgccctcctagaactgtccctgtggctggagggtctccaggagagagactctggcccctacagctgctccgtgaatgtgcaagacaaacaaggcatcattacgggctacatcatcaaaaccttagaactcagtgtacagggtgagtgagaagcacagacttccggacccctccccacctgcactgggaggtcaggcgagtcactctcctaaatggctgagggcaagagttggagaagggataaatgaaacgacagaagggtgcagacagaagggtcaccaatgtgaccctgagctgccagtctccgaggagtaagcccgctgcccaatatcagtgggatcggcagcttccatccttccagactttctttgcaccagcatttggtgagggcatttctggagacaggcaaggctgtggctggggaaggggaaagatgagaggtaccacagagactggggtgaaaaggggagccaatgctgacaagcactggggaggaggaggatgtggggcagagaaagatcccccgccaggggcaggtattgtgttaggtgcattcactgtgtatactgttatgaaagaggctctacagctggagtgtctgccttcaattagaacagaacatatcagagtatattacatgtagttcagtatagtgtcattatgtggattaagttaatatttacaaagcacttagaatagtgcatggcacatagaaaatactatgtgttggctataatcactgttttgtgaaatctgtttcagttatacatatatgtcatgaaactactaggtcccagggtaaaatatatttcttcttcctgtgagttgtggtcaaaaaaagatgcactgttttggttttactttccagtatacaaattaagaaatgagatatgtaatggatatttgcgcaactgcaattcaacaccataaaaaagttgttactcatcacaacatataaatgacctggaattggtatgttcactataatgtcatcccaaaactactggctccaccattctacgtgattatgacaccactaaggcatcatttacggctcccacatcactctttcaccacatgccatgcactactggcaaattattcttcaattaaaaagcatgactttttaaacagctgaacactgtttggatgcttccagttttgcattctttggtaagtatatctcattatatttgcagttggcactattctaggttatgctgcctctgagcttttacactaactattcatctacctttgagtccaccttcacccttcaggatccaccttttgaaagcctaggatgtgtgtgctcctgtagcaccataagcataacattaacatgacacacaagaccttgttcacaatattgtaattggttccttagtaatctgactcctttattacaagatggacatcttgaaggtgatggtatactaccgtaactctcagacctactgcagtaggcactatctgttgatgaataatgaaaaaaataaagaccttatttcagaccttagcatttaaagaaatcttgtgatgaatctgtcagttgaatctgatgacagggaatgagcaaaatatctaaatcccctccccccctccagatacctgaactttagccaaaagttaagctccacacttttcccctgtaacctttccctgtttccctctggctttctaatggcaagggaattcaggagcccagcaccactacatcagccaagaaagatatcaaaaagatactgagttctaaagcagcagtctttaactggggtagtctcctttaataattgatggaggcaacttgaaaccttagggattcctgtcattccccctcttatttatattgtttaagttatcaatcctggcccctgaatttagaataacaaaaacaatataggccagtgatactgtttcttttaaatgtaacttgaatatttcctaaacagcaaaaatttcaagagacagttgataaaactcacaaataatgatttaatgtgtatttttcagattcagtttgttattcagtacattttatcgccaactctcatcatattcatctcataccagacttaacattttctatgtcctgctaacctcgtataaatttccaaacacatcatgaaaaattttaatgtcagcttaaaaatcttccagaggatacatgggtttcaaagccttttgggagtacacaagcaaaaagtctgaacacccattattcaaaagctgttctggccaacaaaacagtcactagccacaggtgactatttaaatgtaaattagataaaattaaaaattcaattttgcagtcacgctagccacatttcaggtcctcaagagccacctgtggctagtaatgccgtactggacagtgcaaattcagaacacttccatcatcacaataaattctattggacagggctgtcctagggaacctagaatatgcactgtttgccccagtgagttgaagttataagacttttattcctggcaccacctcctggaatggcaggccattttttttttttacttttatcaagattcctcctacacaggggtaaagtgacagaaaggtcaagaaggaactttgagctccccctagaggtttgagtgtgtggccaggagaatccttttacaaagatgaatttaatactgtgaataacaactttttacctgaaactgttcaatatggtagccactactcacatatgcctatttataacttaaaactgaattaattaaatataatttaaaatttctgtttctcaggcacaatgccacacattttaagggctgaacagacacatgtgaccagtggctatcatactgaactgaggtagatagagaatatttccatcatcacaaaattttatggaacagtactatttgtactacatgctttctaaattattttttcctttaacatgtcctcttaatgaagtaaccagaatatttaactccacccttcactgtatttccaaaatgccagaaaataaacccagaattctactcattcagttttaacatgtgcttcttagctcctttccttctaaaactgaaatcttaaatataagtgtatgattggtagtcaaagatggtctattcttagaggatacacatcaagcatctgtcaaattcataagcagataagcaaactggaaggcacaagatttcaggtaacattgggatggtaacaacagagactaaatatataaaaaataacaggaaataaatctaaacctatttgagtagcttatcatatttcttagaaatctttcaatgagaagatagaagaaatgtcttgtctgcaaacgccaaagagaagtcctcagagatgggcagagtctattaaaatgcttatcagggacaatgagagctttttgctccaagttagttatctttgccctgttggttcttataaataattgcaaggcttcagagctaaaaatgaaagaccaaaatatactatatggtgattttcctgttagagtacaaaattttgttccaaagatgatgacaattactgatgaataaatctaagcaatgtcccccagaaaattaatcattttgttctctgggcagaagactcttttatcttttatttattatttatttattttgagacagggtctcactctgtcacccaaagctgaagttcagtggctcaatctcagctcactgcaaactccacctcccaacctcaagcgatcctcccgcttcagcctcctgaggagctgtaactacaagtgtgtgccaccacgcccggctaattttttgtatttttggtagagacaggtgtcaccatgttgtccacgctggtctccaactcctgagctcacgtgatatgcccgcctcagcctcccaaagtattgcgattacaggcatgaaccaccatgcccggcctcttttaccatttttaaatttgtctgatgagcgaccagcactgattcagaaaaggcaagtcttttaggtcacattcaatcaccttgcatttcatcttgaggcacagctagaagtacacatctgtttcaaagacataaagccaactctcaagaggcaaatttttggagaacacccaaaaatatgggacttgagaatgagttttgcagtgcatcagattaactgactgaagtgtgaatgcagcatctggctcagagtgaatgctttcatgaattccaagtctagataggtctttcaactactacagtatggccagcgatgagactggtcactcctttgaagtcatcacacttatagtctgctttaggcaaataacactaaatcaagtaccgccttgcattccatcccttgtgttgtcttgaccagctttttaactcattgatgtatgtacacaagcttcaattggattttatgctcttggactacaggagtgtatattatacttttatttttatttttatttttaaaactacagttcttttattcatcctaacacctagcagacagccctccacatagtaagcacttaagtatttggtgactggagatatgaaaaggcctacagtaaaagagaaaaatcatgcaatcactagataaaaaactacctagatttgtgtatctgactccaaaattgggctggaattgttagtagacaaattttcttctggcaaacaaacaaaaatgcaacaaaacttcaagataaacaatctatgtagtaaggcagtgtcaaacacatccgttttacccaaacgacagaacaaataccaataagatgacagacatcaaaatcaaactttgcagcaataaacaaattttcatatctgactgtaaattaaaatcttgtgtgcttagaaacatgttcatttagacagtattaaaaagtaggatgttagtctcaaaatccaagagttaaattattaattcaatttcaatacttataattttagtatttttactgtatagataagaggaccaaggcacagtccaaagaaggtaagtgacatgctttaaggtgattcaggaaggtggtcagaaaagggtgcaataaggctcagctttctgatcctttatacaatgtgaggaaggctgctaatcagaaattatctgactaaaggaaggtttgcatggaaaaattaaagttgctatatagctcttccttttaaagttagaagaaattatttactgggttttcatagttgaattctttttttttaagagaccaggtctcactatgttgcccaagctggagtacagtggctatttacaggtgctatgatcatggcacactgcagcctcaaattcatgagctcaagcgatcctcccacctcaccctctaaagtagctgggacaacagggaagcgctactgtacccggctcataattgaatttttgacaggaatttcaaatatattagcccagaaatgtaattgactcacacatattccttctctgtgagcctctgacattgagttcacatgtactttagtctgcgtaagaagttcctccttttccttttccacatcttactactttgcttctattttgtaaaatctaaagcaaaaagtattactaagtttctttttgtagttctcatcaacacaaagtgaaagagatttttgaactacttgttttaaatctgcatttctgaaactgggatctaatgacttcttttcagaggtttgagattctctgagattttaagatagcagttttattttcataagcataatctgagttacttgaacatccacttcataattgtgtaggaatatgatttcagtgaccacatttgcttctgtgctgaagattacattcacactaaatctccttaaatgcagtattcttcagactgggttccaaagtctgttttttcgttaaacagcagtattattgaataatactgctgcagatttttatattttccaatattctctttctagactttatttggtgaattaattaaataaggccggatgtggtggctctcgcctataatcccagcactttgggaggccaaggcaggcggatcgcttgattctaggagtttgagaccagtctaggcaacacagtgagaccctgcttctaaaaaaacaaaaatacaaaatttaaaaattagctgggcgtggtagtaaatgcctgtagtcctagctactcaggaagctgaggtgggagcatcacttaggtccaggagttcaaggctgcagtgagctatgatcacgttactgcactccagcttaggcaacagagcaaaaccctgcctccattaaaaataaacataaaacaaattaaaaaaaatgtagtgtctactatatgctagtacagcagtgagtaagagagaccagaacctgtccttagagagcttatcattctggcaggaacactcaacattactaatgaaaaagtctgggttctttgattgaaatcacataaagagtagagcactttaaaacacaaaacagttatctgccctccttgttaacagctactatggatcagagaacccatactcatcagcacattcccaaaataccctaagagcttgaggtcaacttggttttacctgtctggacacaggtaaaccaatcctcttctaaaaattattcaaataaatctccttttcttgctttaagttatccttctcataactggacaatgaaacaacccaattagatactccctggttgagaaacaattttatggagagatttatattcagtgaggttttgacaacacactttttctgcgtgattgggaagtttctacagacagaaatcaatcaagctgaaacagtttaaaatgcctaaaatgcacttctaaactcaagaagaggtcatggatagacgctagccaagacagtacaaaaagtctcccaaaaatttaaccttggctgggcacggtggctcacgcctgtaatcctagtgctttgggagactgaggcaggacagcttgagaccagggagctaaaaccagcctgagcaacgtagaagaccctgtctcttaaaaaaaaaaaaaaaaaaaaaaaaaatttaatgagccaggtgtggtggggcatgcctgcagtcctagctactggggaggattgtttgagcccaggagttcttcaggttgggcaagagagggagatcctctctctaaatataaataaataaaaattaaaatttaaccttaatgacgttgaatagaacaaatgagattcagagaagagtagctttgtcctattagctactactttaatgtctttgttaaaaaaagagaaagcttaagaagtcccaaagataaatgttatcaaatacactaatttaaatttgtaatggagtaattaatgggtggcaaattccttgaacaatagtaggttttaaatatcttagtttgtggacccagttttctaagcaacaacatccccaaagaaatactactggagccaagacctggagaactttggtgcaatttccctcctttagcttactctaactcatgattgcgcctattagactttattattgctctttagtgtgatcattcttattttataattgttcttggtggtttttatcccccctcaagaagttcccagaaaaagtgccagctgtatcagaaaagaagtgcacagataataggataagtagttcagtaaaaactgggagaatcctatcacaatctttttagcagccactacgatgaggaaatgagcttaactaaaatacaactccttatctgccaataatacaaatatgaaagcctagagtcagttctagtagcaaaatcttaacctggctaagatttctagcccaaattaagcctctgcatttaaacatgcaggtacacaaggacggccagatgcacactgagagttctacttgtcaccacatccggcacagaaactgaagcagggaaaaactggctttcctgaaggagcttcctaagaaaccgcagggcctcaagccaatctaactctggaggcatcgacaatccaaattccagaccaactcttggccaagctaacttttatggtgtacactaactccgcggtaacaatacacaatctggctacaatcaagcctttccaattctccaaagcatctctagtcttactcgtccttcgtagctcaagatagaagcaaagcgactgacacaaaggccagtcgtcccaaggcgctttttctatggctccgctacggccacttattaactattcctaaactaggggctcaatgccccccccttctgcccttcctcaatcctgccccggccggtaagcctctgcctgggagcccctccgcctggaacaaagcgaggggccccggcggtgggggcaagaggcgccagcggcacggggactgccgcacggcgcacaatgagaaactaccaacttcagagcgcaggaacatcctcaattggcaagaaagaggggcggcggcaggcacgcccaacttcaaactcaggaaacctacgggctggcggccatctgggaaaaagcccccttcccagggagagaagaaaaaggcggaggagatgcgaatcgcccaccgggccccggaggagagccctgccctcagaccggcccccgcccccgaggcccgcttccccgccttctctctgcctctggttcgctgccccaggccgggcggccggttaccttgatgcgctcccggcactgggacggggtccgctcgtagcccagctcggccagggcccgggacacgcgctcgtacatggctggcccgggggccttgctgccgaacaccgtgccggctccctccagctgctggtaccgcgcctccaccagccgctcgttgccccacactgcgatgagcgcgttcgtctcggctggcgtccacgacatgccccggcaggcggcggcggcggctgccgcagccccgccaccgccgccaccaggggagaaggagaccgaggacgaggcggcgctgcggccccccagccccagcccgagacccccggacgccgctgcccccgagcccgccgcactgcccggcccgagcggggaggcaccccgaggcgtggaagggtcggacagcgatggatttccgtcgctcaggccaccaggagaagccggggaaagcacctccatcttcggaatttttagcggcgagttggcgggcagctccgagccacagggcgcagccatcttccaagcggccgccgctgcaccgcccggaagtgacgcgcccgcgcatccggccaccgcggtctccggggctgccctcgggcctggctcgcccgcgggcggatggctccgggtctctgctgctgaggatgtggctgccgggcggaggtcgtccactcccctgggcctttctccgcgagccctcccacgccgcccgctcctctcccggggcgaagggcggggacgaggcgcgccgaagccccgagctgaagagaagggtgggggcatgagggcgctggagtgaggaacagattggagccttcccacttcctctccaatctcagcccccgggaggaggggtgaggccctcgagggggcccggagttaaggaggaatagaccgtttctctctctcctgtctcccccgcctctgcccgtcttccctctaagccggcctctaggtgcagaggctgacgtccaggatggggaccggggaagcctctggagggtatatccgggaaggcaccaaggctgaagtgagagcggttctggggaaggctttaaaaagcagatatggaccagggtagagttcgtacgctgtagcttttcaagaacaccgatctcattaattaaagaacagcaactatttaattccagttataaactattgttttccagttagtctgggtaggtgtggccgtttgtagaatagttagattacattagtctattgcgttggtacagttgtctatagcttgagcatataaaaactcctgagcccagcagaaaagttactttccaataccagtctccatcctccgtgctttggaagttgcatcgttttccggtttttcgtactcaaagaacactgtcaattatgacagctctgtgacctctggtaatgaattagtgtattagtcactcctgaaacgttccttaaagtgctggaacttaacagtagcacagcacatccagtacacagctgtaccgtatttccatatttttcaaagctgaaaatcttaattggatatcttggatcattaacttaaaacctcagcggatttttctttcaaagcagacataactgaggatgctgaccaatgaatgcaaataaactatgcaatattttttaaaataacaaatgtatgttagttttttttaagctgaggtcaactatgttttggggggtatgtgcttttttaaattattgttttatttcaatcgatttttgggggtaacaggtggcgtttggttacatgaataaggtttttagtggtgatttctgagattttggtgcgtccgagcaatgtacactgtatccaatgtgtagtcttttgtccctcattagccttccccttacccctgagctcccgagtccccaaagtccaatgtatcattcttattgaagacagctaaatttttaactctgagactcactggagagaatgactggttgtctttgggtgttactgaaaagccaaaggattaagcaatagggataaagtagaggaggagataattgttctcgtatgtcatatgaaaatgctaaccatagtttgtaagctaacagaagaagcctgaggaagttcccgaatttatgatatcctcttcccttttttccaaagaaagatgcagtctagcacctcagttaagaatatggactctaaagtcagactgccaggcttcaaattccagttctgcgacctcagcaaagttacttaaccaagctctcagtgccttgttttcttcatctgtaaaatgaggatgacgtcacagcattgttgagagaattaatacaggtaaagtccttagaacggtgcctggttcacagtaaacattgtgtgaggactgtaaaagaatctgaaacatctatcaaaacaaaattaactctcattcagcccagtgataaatgttttaatgtcataaggtatttggtgtgtatgaaagggagagttgtgcctaaatcatatactaaatcagagattccaaagaggggtgtgtgtgtgtgtgtgtgtgtgtgtgtgtgtgtgtgggagacagggtctcactctgtcactgaggctggagtgcagtggtgtgatctcagctcactgcaacctctggtcccaggctcaagcgatcctcccacctcagccttccaagtagctgggaccacaggtatgtgccaccactcccggctaatttatgtattttttgtagagatggggtttcaccatgttgcctaggctggtctcaaactcctgggctcaagtgatcctccacctttgcctcccaaagtgctgggattacaggcatgagccactgcacccagccctccaaagagtttttaaattaccactttaaccttctgtcattgtcccacaagtctgaaaaacaacaacaacaaaaacccctcctcctattatcatgggatcctcgggatgtggctttgccagccagaaatctctgtggctggtggtgcctttgcccaagttttgcttgggcccactaggttccttctgcccactcagcctggcaggctgcactcagctcatgctaccagcccagatcccacacctgccaagggtaagccaggcacagagcagcaaggggtgcatgagcgagcaagtgtggggtctggccactgcccacagccaggcacatcagctatggcaggttgggcagctccaggagccagcatgggcactggctccctgtgaggttgcggctggaccaggcataccacgagcagcttctgctgatggtaccagggaatgtggtggctcccagaagcttggcgacaccaggaactgcagagtcccaaagagggtgtaagagccctggttcggggagctcctaggtctggactccccaaagggccacaggcaggagaatcgcttgaatctgggaggcagaggctgcggtgatccgagatggcaccattgtactccagcctgggcaacaagagcgaaactccgtctccaaacaaacaaacaaaacaaaaacaagtgtccctatatgcatgggtgtgtttctgggctcttctattacattcatctgtttgtctatccatttttctatttgtgttgcttgtaataatatcacactgctttaattactgtgagtttatagtaagtcttatgtcgaatacagcaagtgcctcctcaccctcttgcttttcctcctcctcttccaagagtagcttgctattcttaatcttttgcattctcctatacattttagaattcatttgtcaaattctacagaaaaaaactgcggttattttgaatggtattgcattgaatctgtggaccaatttgagaactgacatttgtacagtaatcacccgtagagtccttggaaatggtataaacctttagtctctcaataaaattacgttatttacttcataaaggtcttacacatttttgttcagtttgttcctaggtagttgattttttaaaatgtttttgtaagtggtatcatttttaaattttattttctattttttttcttttgagacagggtcttgccctgtcacccaggctggagtgcagtggtgtaaacatggctcactgcagcctcaacctccggggctcaagcaaacctcctgctgcaacctcccaagtagctgggtctacaggcatgcaccaacacatctggctaatttctaatttttttgctggtatataaaaatactaattgattatcttattttgtatctagtaatcctgatggagcagttgattaaaattgtatatcattgcacgtcattctctttttaaaaatccaagcctagtgagaccctgtctctacaaaaagtttttttttttttaattagctgggcatggtggtgcacatctgtacttgcaactactcggtaggctgaggtgggaggattgcttgagcctgggaggttgaagctgcagtgagccatgatcgagccagtacactccagcttgggtgacagagcaagaccctgtttcaaaaacaaacaaaaaaatccaccaatgactttcccttggaatgatataatccaaactctttgccatgcctatggtggttttaaaacatgtctgcacattgtttgacattctcccaggaagaaattaatcgagtctatatctcctccccttgaatgtgggtgggtcttggtgactaccttgataaaccgaatgcgatacaagtgacactgtgactttcaaggctagatttgaaaataccctgcagcttctggcagtttctcttgagatacttgctcagaagcatttcatccaccatgtaagaagttaggctatcctaagtgtacacggagagaccacaaagagaacgagaaagatagccagtgaaccagaaagattccagcctccagttggttttctgcctaatccaggctccagacttgtgaatggagaagtgttgaggtgaccccagctccagccaccagctgacgacaaccataccggagatcctgagagctgcctagctgaccccaggcaccccccagacttgtgagcaaaatgaattattgttgtatgttctaacccactgaattctggggtatttgtacgtagcaatgggtatttggaacaacaatctgtaaggccctttttactctgagcttaacctactgtgcaaacttcatctaccacctcaaatacgccccagccaccctgacctcatctgccccatcaagcgagccaaacttatttctgttttggagcatttggagttgtcatatctccttatcttagaacactcttatcttagctcttccagtgacaatccccttcttgtaattcatctcctcaaatgtcacctccccagagaggcctgttacctttttgtcaacagcacttattttcagaaaacacttgtttatgcatattaatttttttcatgtatttattgtctgcattttctttctagcatgtaagctgtttgaagccgaggactttgtctgttttgttcactcccaatagattcagcacttagaagaatgccaggcaggctttccccaccaaccaagatggaataacagggaaaagacatacccttctatcttcaataattggaaacccagacaaagtttatgaaacgctggttttcaagacataggacatcagacaatcaaggacagtaaacactgagatgggaaacaaacaaggtgagtactgcaattgcccaacattactagctggaaagagtttcccgaccatggcagagggaggaggatcctttgaggttctgtggtgtccctgagttgaggagacaaagttgaaattccagagtggtcaaggcagctggagtttgtagagcagagtaccagaaagaaaatagatgcacagagagaacctcagagatctgcaaaagatctcagctcttcagctgtgcacctatcagtacatgcatgtgacaaagcaccccaaggccaggggaagaatcacctgaaagtatgaagagaagaatacttggagcatatacaaaccaggaataatttcagttctcaccagccaaattggaagaccccatagataacaggcattaggtagagcaggggtccccaacctccaggggcactgaccagtactgttcatggcctgttaggaactgggctgcacagcaggaggtgagcggcaggctagccagcaaaccttcatctgtatttatagctcccatcacttgcattactccccatcactccccatcacttgcattaccacctgagctccacctcctctcagatcagcagcagcattagattctcataggagtgtgaaccctactgtgaactgcacatgcaagggatctaggttgtgcactgtttatgagaatctaatgcctgatgatctgaggtgcagctgaggcagcatagctaggaggtaggtattttgttgctggggactcatatcaaaaccctatcagtgagtggcaagtgacaattaagctgcatctggtggcagactttatagaggcaagtgagtcaatgtatttcaattgcacagctctatctggtggcaagttttaagtcagaatctgacacttaatttagtctgtgcatggcctgcccattattttatttaccacttctgtctgtgcctctttgctgcactgaacacttgtctcagtcacagttttggtaagcccacaagctaaccctagctaaaatgagtaaaaagcaaacgacactggagagcttctttgaaaagtcagagagacccaatgatgagacagcagaagactcttaagactgccaacaaaaagaaagctgcacttaaaagaaaataccagactgggcgtggtggctcacacctgtaatcctagcactttgggaggctgaagcaggtggatcccttgaggccaggagtttgagaccagccaagccaacatggtgaaacccatgtttctaaaaaaaaaaaaaaaaaaaattagccgggaatggtggtgcgtgcctgtaatctgagctactcaggaggctgaggcaggagaatctcttgaacccaggaggcagaggttgcagtgagctgagactgtgccactgcactccactccagcctgggtgccagaccaagactctgtctcagaaaaaaaaaaaagaaaatgccaaaagttctacttaagttatgggttaattgcaacaggtgattcacattctctaagcccactttgtatattatgtgctgacccactattcaaggaagccatgaaaacttcaaaactgcttcaccacctggagaccaagcaccctgcattaaaagacaagcctttggagtttttctaaagaaaaaacatgaacacagagaacagaagtaattattgaaggccactacttcattaagtgtgtctgtactgagagcatcgttcctagtggctaaccacgttattaggctaagaagccctttagtattggtgaagagttgatcctgcctgctgctaaggacatttgtcatgaacttttaggagaggctgctgttcaaaaggtggcacatgttcctctttcagctaacaccataactagaagaatggatgaaatagcagagaatattgaggcacaattgttagagaggattaatgagtcaccgtgctacacaatccacaaaagggttttgtcccagaaatagactcatacatatatgatcagtgattttcaacagtggtacaaatgcaagtcagcgcagaaaaaataatctcttcaacaaatggtgcaggaacaattggatatccataaaatgaactcggatccacgctttgcaccatatgcaaaaattgactcaaaataggtataggtcctagacctaaatgtaacaacctgaaactctaaaatttctcaggaaaaaaatgggataaaatctttgtggtcttggattaggcaaagatattttcttgtgtttgtgggtaaagaaacctttaatgagggttcaaggtgtaagaggaggaccttgtagagagccagcgcttagccccagcctcctcatatgcacatggctctgtagaggttctccagacagtgctgctgctgctgtttcgagccttatctcctctgtgctcctcacaagtgtcgttaacagcgggcagctcctggcagcacaagggacagggatttgtcttgcttagccggggcaaaatgcagttagaatggaaaagctaatggcaaggcatcccaacaacagcctcctcctcctcaagcacatggggcacttgtgtgtgcctctcagcctgagagctcctgatgactgtcctggggaggttcccaaccacactgtcttggcagctggtggaggcaggtggtgattccaatttactgccatccccgagtcttcaaaatccatcctattgaaaagtgatctggtgagctccagcagcatgtgggttagggtctcctgcttggggttcaagagcttgcagtcctgttcattgaaataggctgtcatggctgctcagctctctgacatatctctcagactggcaaagatattaggtctgataccaaaagtacaatccatagaagaaaaaggatggatacattggacttcattaaaattaagaatgttttctccttgaaaaataatgttaagagaataagaagataagccacaaactcggaaaaaaagtaattgtaaattacatatctgataaagtacttgtacccaaaatatgcacaagaatctcaaaactcaataataagaaaacaatccaatttaagaaattattttaacatacattttacaaaagaggatatatagatagcaaataagcccacaaaaagatattgaatattattgaccattgggaaaatgcaaattaaaacaaaatgagataccattacacacctattagaatgtctaatattgagaagactaatcatactaactgatgaggatttggagcaactggaactctcaaaccctgctgatagataaatgcacaaccactttggaacagtttggtagttttttaaaaagttaaacatacatctgccttatgccccagccatacaatttttagacatttctcaaggaaaatgaaagcatatgttcattcagagatacacatgcatattcattgcagctttatttgtaacagccaaaaactggaaacagcccaaatgtccagcaacaaaagaatggataaacaaattgtggtatatttactacctagcagttgaaagaaataaacctctgacacacacaagctggattaaaaaagaagaggaaatgaattattgatacatataataaagattactctcaaaataattatggtaagtcaaagaagtcagaccatgctccctaagagtatatacttcatgattcaatttctgtacaattctataaaatgcaaattaatatatgataacaaaaagtgattgcctggaaatggtgagaggacagaggggccagaatcagccaggattacaaagatgcacaaggaaacttttgagggtggtggatatcttgagtgtggtgatagttttacagttgtatgcctatgttagaagctatcaaattgtacactttaagtatgtacactttgttgtatattaattatgccttaataaagttattataaaaagtagttccaggcaatactagacactcaataaacatttgtaaactagtcgttgactttcttggactgtgacttgttagcagttagggattgattattctgtacatgtttatgtaatacctggcaaaataccatgctggagtaagtgctcaataaatgctattttaagaatgttatcagtcaagcctggtggcttatgcctgtaatcccagcactttgggaggccgaggtgggtggatcacctgaggtcaggagtttgagaccagcctggccaacatggtgaaaccctgtctctactaaaaatacaaaaaattagctgggcatggtagcacatgcctgtaatcccagctacttgggaggctgaggtaagagaatcacttgaacccgggaggtggaggtcgcagtgaactgagatagcaccattgcactccagcctggtaaacgagcaaaactgcatctcaaaaaaaaaaaaaaaaaagaatgttatcatctgttacatatccatcaaattcatgtcatttaagtgacactaaagataatatattttttctgacaaaatgtttaacttcattagcaatttaaaaatacaaattaaaataatgaaatactgtttttaacctttcagtttgcaaataattttaaatgatagaataagcatgttattttatatttggaagaacaaaagaagccatttccatttctaaagcatgtgatggctgggcatggtgactcacgcctgtaatcccagcactttgggaggcggaggtgggtggatcacttgaggtcaggagttcaaaaccagcctggctaacatggtgaaaccccatctctacaggcatggtggcgtgcacctgtaatcccagctacttgggaaggtgagacacgagaatcacttgaacccaaggggtcagaagttgtagtagccttgatgccaccactgcagagcagcctgggcaacagagcaagactccatctcaataaataaataaatagagcattttatcgtacctacttgacaagagattgggaaaataggtgctctctctcactctactaataagatgtaaactgggagaaattttctgttggacaattttaataaatatcaaaagcttcaacaacatgaaagccctttgatccaactgtcccacttctagaaatgtatgctaagaaaacaagactgcacacaaagatttagtcactagattgttcagcacgatactgttgatgatgtcaaaaattagaattgacctacaaagccagcagtaagagactggttaataaacactgctgtattcattccatgaaatactattctgacataaaaaatggtatagtaaatgaactaacttagttcaaaataacaggtttgtttaagccagttgtagtctgtagtctcagctattcgggaggccagactgggcaacgtagtgagaccatgttcctaaataataataataataataataataataataataataataggcttgcttttttttgagacggagtctcgctctgttgctcagactggagtgcagtggcactatctcggctcactgcaacctctgcctcctgggttcaagcgattctcctgcctcagcctcctgagttgctgggattacaggcttgcgccaccaccacgcccggctaattttttgtatttttagtagaggcgaggtttcaccctgttggtcaggctgttcttgaactcctgacctcgtgatccacccacctcggcctcccaaagtgctgggattacaagcatgagccaccacgcccagccaataataggcttgttaaaagaatgaaaagacaagccacagactgggagaaaatatatgcaaaatacaaatctgataaaggacttgcatctaaaatacacaatgaactcttaaaactcaacaataagaattacaaataattcaatttcctaatataagcaaaagatctatacaaagatgataaacagatgaaaactatgaacatggaaagatgtcattagggattggtatactgaaacaacaatgaattaccactatacgcctattaaaatgagtaaaatgcaaaacattttactcattttgcatttgacaacacccaacgctgacaacacccaacgctttacattttactcattttgcactgacaacacccaatgctggcgaggatgtggagcaacaggagctctcattcatggctggtagaaatgcaaaatgtacagtcacaaagctaacatggtcttaccacgtgatccagcaatagtgcttatgtccacacaaaaacttgaacatgaattttcaaaacaactttactcgtagttaccaaaaccagaaaggaaggaagatgtcccttaatagaagagtggataaacaaactgtggtatactcacacaatggaatagtatttggtaaaaagaaatgaactaacaagccgtgagaaaacatgagagaaacttaaatacatattcctaagtgagagaagccagtctgaaagactatgtttcctgctagatgacattccggaagaggtaaaactataaggacagtaaaaagaccagtggttaccatgggggaggaggagagggattaagggatagagcacgggaattttaggacagtaaaactcttctgtatgatactgtaatggcggatatgtaacattatgcatttgttaaaccccatagcatagaactatacaacccaaaaagtgaaccctaatgtaaatgatggatcttagttaatactaatgtatcaatattagttcatcaattgtaacaaaggtactatacactaaagcaagatgttaataataggggaaactgtggggtgccgggtggggggtgtcggggagggactctactgctgctcaatttttctatgaattcaaaactgctctaagaaataaagcttattaaaatgtttttttaaatagccctacatttgttaattcgaaaaagggctgaaacaaatatgcaactggtttagtactggctagactgaatgctggttttttgttttgttgttgtttgtctttgttttcttaccgagaaagaagtgatggtcttgtgatttttaagaaaggaaaatcagttgttcaaaaaagaagtattggaagaaatgatgcaatagtgtttcctcccttccatggtgcagcccaccctgggccactgtaacactgaaggtagtctgtgtcacatttgttgcccagtggggacataatgcctacctcatgggaaagaatgaggcataaataaggtaattcatgaagggtactttgcatggagcctggtactgctaaacacaatgaaagatcactgatgctgtttcctctcatctgcatggaagggctcccatccccaaacccactcctatctaacactgacagccttgtcacactatataacttggaaccaccagtagcaatctcatcatgcccttttacccattgaagagactcaccatgagaagcccaagaatctgaggacactctaaatgttctggaatttagtaaccaagagactctgtaaattctcttttccaactctgttactcaccccttccaaaatcctctggtattcagggtaggcgattaaaaaaaaaaaaatccctatgtcctcaatctcttatctgatcattctttacactttctggctcttactcaaacttggctgtctcatttccccctcagcccttgtaagtgagggctattacttctcagctcactggttccttcctttctttgtagtatccatttggcaaaaccacaatcctgtttaaatccagctgtctccctatgtcacacctgcaccatgtaactgcttatggctagaaaaaacccacaaaactatgccaactggtcttcctttcaattagatgtgaccacagatttcaagtgagctcttaatgtggctcagcaaccatttcgtttctcgtattaattcattctctcactctcctatagaactatgttatgcctttggccacctcaaactgaaaatctctttctccaatcttcgttcttagctcatcgtctttcttcctgtttcactgaaaaagaaatggaaaggattagaatcaaagctcccaacacatttacttacctacatggtgtacctctagttagtgctaattagtctgtacttttagctaagatcaatgcctctgcctaagcactaaatgctatcatctctacctacaaggacattgttccagaaagtttctcttctaactccttcagcagcagttgttttccccttgtattggatcattcttatcagtatatcatgctttcattatttttgtctcattaaaaaaaatctcaaaacctaccctcttcctccagctactgtccaatttctctccctttaaaaagagatagagcacagccaggcacggtggctcatgcctgtaatcccagcactttgggaggccaaggctggaggatcacctgaggtcaggagttggagaccagcctggccaacatggcgaaaccccgtctctactaaaaatacaaaaatgagctgggcgtggtggcacgtgcctgtaatcctagctacttggtaggctgaggcaggagaattgcttgaacctgagaagcggaggttgcagtgagccaagatttgtgccactgcactccagcctgggcgacagagtgagactccatctaaagaaaaaaaaagatatagctactttattaaattttttaatattttattttttctttattaaaccatataattggccaacttaaagtgtacattttgatgatttttaataccttcacagagttatgcaaccatcaccgtgatcaactttagaatattttcatcatcacccaaagaaatgccatacccattagctatcactccccatttcctcccaccaccccagccttaagcaacaactaatacatttgctcttcctataaatttgtcaatcctgaatgtttaatgtgaatggaatcatataatatgttggttattgtgactggcttcttttatttagcttaacgttttcaaggatcatccatattgtagcataaattagtaattcatccttttttattgccaacgaatactccattgtatggacaaaccacattttatctgttcatcagttgatggccatttgggttgtttcttctttttggctattatgaataatattgctatgcatattcatgtagaagaaaaattttttgagactctgttgcccatgctggagttcagtggcatggtcatagctcactgcaaccaaccaactcctaggctcaagctatcctcccacctcagtctcctgagtagccaagactacaggcacaggctaccacacccagctaatttttaaatttttttgtagaaacagggtctcattatgttgtccaggctggtctcaaactcctggcctcaagagattctcccaccccagcctccctgagttgctggaattacaggggtgagccaccatgcctggctgtctttcactttcttgataacatcacttgaagcataagttttaaattttgatgagtcacctaattatttaatttgtcatttgtgcctttgctgtcaaatcttagaagtctatgactaacccaaagtcacaaagacttactcctatattttctttgaagactttgagaattttagctcttacacttaggtttataattcattttgggttaatatttgtgtacggtatgagggagagatccaactttctttttctttttctttttttttttttttttgcatttggatatccagttgatccatcactgttcatgaaaaggactattcttactcaattgaattgacccccttgtcaattcattgtaaacgtgaggatttacttctagactctcatctggtccatcaatatatatctatccctatgccagtactacactatcttcattactatagctttatagtaagttttaaaattatgaagaatgagttatccaactttgctctttttcaagactgttttggctattctgggtcccttgcatttccatagatattttagcatcagcttattaatttgtgcaaaaaaaaaaaagccaaaagctaggatattgatgggattgcattgaatctgtagatcagtttgtagaaggggagtactgacatctgctatggtttgaatatgtgtgtttcctaaaattcatataatagaacctaagatccaatgtgattacatcaagaggttgatggccgggcatggtggctcacgcctgtaatcccagcactttgggaggccaaggcgggtggatcatctgaggtcaagagttccagaccaggctggccaacatagtgaaacctcatctctactaatagtaccagaaaaattagccaggcatggtggtgggctcctgtaaccccagctacttgggaggctgaggcaggagaattgcttgaacccaggaggtggaggttgcagtgagttgagattgcaccattgcatcattccagcctgggcaacgagagtgaaactctgtctaaaaaaaaaaaaaaaagaaagaaaagaaaagaaaaggaaaaaaaaggccgggcgcagtgactcacacctgtaatgctagcactttgggaggccgaagtgggtggatttcctgagctcaggagttcgagaccagcctgggcaacatggtgaaaccccgtctctactgaaatacaaagaattggccaggcgcggtggctcacgcctataatcccagcactttgggaggccaaggagggcggatcacaaggtcaagagatcgagaccatcatggccaacatggtgaaaccccatctctactaaaaatacaaaaattagctaggcgttgtggcgcacacccgtagtcccagctactcaggaggctgagacaggagaatcacttgaacccaggaggcagaggttgcagtgagccgagatcacgccactgcactccagcctggtgacagagtgagactctatctcaaaaaataaataaataaaataaaataaaatacaaaaaattagccaggtgtggcagcatgcacctgtagtcccagctgctgtggagtctgaggcaggagaatttcttgaacccaggaggcagaggttgcagtgagccaagatcgcaccactgcactccagtctgggaaacagagcgagactccgtctctaaacaaacaaacggacaaacaaaaacaaacaaacaaaagaggtggacgtggagtcctgataagtaagcaacaatgaggaaagggccccaggttggggagagtaattgttctgagaaatggctaactgcaaacaacccactggtacaacattctgttcccaaatatcttgctccacatatagccctggcagcacgaccttatctgcacaccttatccacatgtagtcccctccagcacgaccctttaaaactgcctcttggcggatagccccttctctgctgtgctgcccattgcactctttcaatgtatcttcatgctttctctaataaatctgccttcctttactcacaactgtcttggtaaattcttttatcaccttggattccagccccagccagccgcaacccgtgatattttggtggcccatatggggaactctccccttctcccccttcaaccccaacctcttggcaaacagtgttggggcctggagacaactgacagtcctagccggggccactccctggcagagcagaaggtcctggtggaaagacatttgaccgctgcccagttggatgagagtttagagtttacttttcttttcagtcttctagctgacaatctctagtatccctctggcaagtgatggcaactggccagggcaactccctggtgtagcctaaagtccagggggtgaacaggtttggctgccttgcctgaaagggaggaaggctctctcctatcctttctggtcagaagtcccctatccctatgcggggcataattggtggtggcagcttgaccaggatgaatccacacatgttttggggaactcaaaccccctctttctcaccctaaattcttccatgaagacagccaccagccagctccagacatgttaagccaggtgagcgctgggatggtgagttttctttcaccatcacccaaacagcactgggatggtgagttttctttcagtcttttcccctcgtacctggattgagcactcagtctaatttgtacctgcactgacctggggttgctcatccagtgttcatctaacacgaggccctagtgccaggagaccctttgcagtaggggggctgcccctttggaaagtgcacctcagagtccttcagtgaacgtgaggggagcccttttccctcagtgagatgcccccaagaaaactgtggttcgtgtccccagcagagattctttcctggacccacgatgggacaaagcccttccattccctcagactcacccctgggctgcattttaaagcattgggataaatttgacccgcagactctcaaaaagaaacatctaattttctcatgtaataacaaaatggccactttataaatttccagaccaggaggcttggcctctgggtggaactcttgtctccaatactgttttacagcttgacctcttctgacataatttctctacgtggtctcaagttctttatgtccaggctttcctgactgtctctcgggatcccaatctctgccgaacctgtcagatatgcctggccaaattctctggccccactgactcttctgacattctaaaccacccttcctttactctcttccattctgtccaacccggtggactgatggaggccacacatgcttcccctgaaaaaccacttttatgttcaattacacttactccatctgctccttctccctcaccttccccgacatctcaacctcggatgtcatttttcggtgcctcctcattatgaggagcccttctccttcctttcagcatttgcatctcaacttactagtcaagtttgtgtcttctagaattcagctgtttcaccttcaaatgctgcaaacagtatatcggtctgttcccaaagatgtctgccaccttctctgctgtgctgcctgctgcactcttgtaatgtatcttcatactttctctaaaaaatctgccttcctttttttttttttttgagatggagtcttgctctgtcgcccaggctggagtgcagtggcacaatctcagctcactgcaacctctgccttctggtttcaagcgattctcctgcctcagcctcccaagtagctgggattacaggcatgcgccaccatgcctggctaatttttgtatttttagtagagacagggtttcaccatgttggccaggctggtctcaaactcctgacctcatgatccacctgccttcacctcccaaagtgctgggattacaggagtaagccaccgtgcctggcccaaaatctgctttcctttacccacaactgtctaggtaaattctattatcacctgtgacaccagccctagccagtcttaacctgcaacactggagcctttaggaggtcattaagtcacaaaagcagtgggattagtacccctatacaaaggctggagggaactactagattcttttgcctttccacctttgccatgtgaggacagagcagtcactctctctgtcttgtgaggatgcagcaacaaggcaccatcttggaagcagacagcagccctcatgagacaccgaacctgctggtgtcttgatcttgaatttccccaccctccagaactgtaagaaataaatgtatattctaattgcccagtctgtggtatttgcttatagcagcacatacagactaagataccatcttaacaatattaagtcttcctatcagtgaacataaaatatcttttgatatatggaggtcttcttaattccttttaataatgtatgtggcaatcttgaacttcatttgtcaaatatattcttaagtatttgattctttttgatgttactctaaatggaattattgtcttaatttcactttcagattgttcattgctagtgtatggaaatactattgatgtgtgtaattgatcttgtagcctgtgacctagttgaacttgtttattaatgctaatattttcagtgaattccttatgattttctatatacaagatcatgccatctaagaaatagagagagttttattatttctttccaatctggttattctttacttcactgcactgcttaaattcccggactagatcctagaatacaatgttgaatagcagtggcaagagcagatatccttgtcttatttctgatcttagagagaaagcattcagtattttgccattaagaatgatgtcagctgtggattttgttagtagatgtcctttatcaggtttaggaatttccctactatgcctagtttgctgcgtatttttattgctaagggacattggggtgttggtttttcaaatgctttttcaacctctattaagatgatcatgtgatttttgtcctcttttctattaatattgtatagtggatggattacattaaatgactttcatatgttaaaacgaccttgcatttttgggataaattccacttggtcatggcatataatcccttttatatgttgctggattcagcttgctagtattttgttgaggatttttacatctctatttgcactcaactgttaggttccactaattgccaacaaattgctctactgtcttatgctataacctggggtgtaaattgctcggtaatctaatccactaaatttgggcccctttgcaggggtagttttgaaagacactctttgaggtttgtcttgaccccaggaaggctgttctttgctgtcttttcccctggttctctctggtacactagtcagcctacagtttagcttattgttctcatagagctaccagccttcttttaatagcttaccaccagcatcttcgttgttttgaaaaagtgcccctaggcttgaacttccctacacttggttccaaataaagtcagttcccttggggaaagcataggtgctctttgctcttatggcctacttttcttctgtgcaaaatctcggtactactgcttccaagttggtggcagggacagtggcctgcttgtttcagagtgacctgcagggcacgtcatggaggtggtcagcctctggtctttttgtctcgcctttcctcatgtggaacctctgccctctgagtgaactagggttagggcgattggggccccagtattactataaccacccaaggggttcttcctgctggcagcataaagaccacagcggccaggtgcagtggctcatgcctgtaatcccaacactttgggaggccaaggcgggtggatcatgaggtcaggagatagagaccatcctggccaacatggtgaaaccccatctgtactaaaaatacaaaaattagccgggcatggtggcgcacgcctgtagtcccagttactcaggaggctgaggcaggagaatcacttgaacccaggaggtggaggttgcagtgggccgagatcgtgccactgcactccagcctgggtgacagagcaagactctgtctcaaaaaaaaaaaaaaaaaaaaaaagaccacggcattgcagtaaagaaaaagtttagtagacacaaggtcagccacaccacctgggagaaggagtttgtgctcaaataatctcatccaaaactggtaggttaggggtttttcagaagcagtttaggggaaaggggtgggggtggctaggcttgctgctgaattattgggccgcagatgaaatcaaggggattgaagccatcctcctgtgggctgaattacttctgggtggggctgcaggaatggggttggtgggtccaggtcgagccatgggtgttaaacatgtgaaaaacctgaaaagatattccaaaaggccaacctacaatagtggtgttatctgcaggcataattggggaagttgcatatcttataacctctggagtaatggctggcaatcgcttctgtctgccccttagcaggatttaggctcctccctgcagcctgatggcctcccatgagctttataaaagctgctgagttttgggcaatgcctattatcatctaaacaataccctaaatgttttccaaagttagctccacccaatagcccaggaatggttaatggatagacaagatccagggtgggctagctcagatctctttcactctcatgattttctcattgataaaatttttgcaaaggcggtttcattattggcttgctactcctggatagagcctctgacctaaaatgggatctggatgaagaaagagagttcctaacctcttgggagcacctccctggaatttagcctctgcaacatagagtttgggggtatgagaaatgcccctaacagggagatagcacagtgcttggctgggagccctgtcttcatggctgcagctacccagagtggagcatctatgctgctgagctgggggaagtgggcaagagagggagcagatagtagcttaagtgccacagactcttcctgttcttaccaagatttagtagagtttcttgaataaatgtttcttcatttactgcatgcccttaggacaatttccagggactttaaaaggttgttatttttaaaaataatttcaccagttacagttgttttgttggggagagggtctttgagctcctcacattgagacagccgagtataaaggggtcaccagagaacctccaactgatctgggcactggcaggagtgctcactggggtggagccttgggaagttcactcagtttgcagagggaaggagcctggcctctcctgttctgggtggaacctgggattcaatctgtgaggtgggaagactactagcaggacacttgctctgccaagtccctgtttccttttttttccttttcacccaataaaccctgcccttctcacccttcaaaatgtctgtgagcctaatatatttcatggtcgtgtgacaaggaccccgtttttacctgaactaaggagaaagtcctacaacaacattgcctttccagaaatgattattcttctcttttaaccaaaacttcttgaaagcctgattagtactttatgctcaattcctgtctcctccccacccgcaaattcttttttgagtcaacaccgcccatcaggctttaaccctccatgaaccctagtgctcccatcaaggtcaccaatgccttccacatggctaaatccaatagtcaagtctcattttcatcttatctgaccagccagcagtatttgacatgcgtggtctcacctttctctttgacacactgtcttcactttgttttcaggacactatgctctcctagttcctagctttacttctatcaatatatcattttacttcttagtctcctttgctggtgcctcagaacctgtccttcgatctcttctttttaactacatttatttcaaccaaaagagtcaaactctgtaaaatatttgaagagatttattctgagccaaatatgcataaccatggcccatgacacagctctgaagaagtcctgagaacacgtgtccaacatagttggggtacagtttggtttcatgtattttagggaaacgtgaaactgcaataaaatatgtttaagaaatacattggtttggtccagaaaggcaggacaacttaaagctgggtagggtggcaggagtcggggggatgttgggtgggggatctttcaggttataggtagatttaaaattttctggttgacaactggttgagtttatctaaagacctgggatcaatagaaaggaaatgtctgggttgcaataagaggtagtggagactgaagtttaatcgtgcagataaaccctccaggtagcaggctgcagacagaatagattataaatgctttttatcagactcaaaggtcagtattgatattaatgtcgaagaggtataatgaggcatgtccggcccccactttccatcatgtcctgaaccagtctctctggttaagttttaagaatgccctggctgaggggaaagtccattcagatggttgagaggccttagaattttatttttggtttacacttacttccttgatgatcttgtaactgagcagcttggcttcaaattgcatgttaaaactttgtttcctttcctcctttctccccaatctgaagatataactttgagacaaactgcatatgtgtttcctttcatcttgaaatacagccttgaaatgcgctgtgattctccactcccttccctttcccattttatgttcccatgctttatgcacctttgtttacccagatgcttgttaaacacacaccatactcacttatctggccatatatttgtttaaaagcttcaggggagggatcctgatgttacagtaggtagtcagacagacatgagcggcgttggggagacccaccccaccagccacaacaggaatgtctaggcgaccatcatgtgatggtcaggtggttgtcacactgtctgtctcactgtcacactgcctggagccagggaaaggcagtctcccaatagatagaaagacctggaaacattgccattccaggttaacttgctgagaagctgaccagcttcctgataagatctcaggagttgggcaagtaggctcaagcctgctcactaagaggcaaaatggcagagtttaactggtgtatgactttgttataggaacactcaactggtaagggaagaatgcctcaagtgagcacgtgcacaacttcagtaaacatactgtgcatgtggcccctcccagctgctggcaggccaccgcacacacggaatgccaatgtataaaaccccaggtcaaaggttaaaccatgcacttgatctctcaagtcgcccacttggccctcttctgagtgtacttcctttcattcctactctaatagttttaaataaactttcactctggatctaagacttgctttggtctctcactctgccttatgcctcttggttgaattctttcttctgaggaggcaaacattgaggttgctgtagacccctatggatttgccaccactaacatggatattgtattagttagggttctctaaaggtcagaaataataggatgtatgtatatatgaaggggagtttattaggagaattggctcacatgatcacaaggtgaagtcccacagtagactgtctgtaagctgaggaggaaggaagccagtccaagtcccaaagcctcaaaagtagggaagctaacagtgtaaccttcagtatggggctgaaggcctgagaccctggcaaatcactggtataagtccaagggtgcaaaagctgaagaacttagagcatccaacacaggagaaagatgaaggccggaacactcagcaagtctctctcactccatgttcttctgcctgctttattctagtcatgctggcagctgattagatggtgcctacccagattgaaggtgggtctaactctcccagtccactgactcaaatgttaacctcctttggcaacaccctcacagacacactcaggaacaatactttgcatccttcaatccaatcaagttgacactcaatattaaccatcacaagtccaccccttgccaacttgaacccatacacatctcctgaaattatacataatcttcaaataaagacaataataaggtcataattatgcctaacataatacagctatccttcatacaactggaagtgcactaatccttaacctaaatgctattacataaagttaacaacacttaaatgatgacatgaagtccataaatctatgtcacatgataaaagaaaaagaaaggaaataaaatgaagatattttcttagtacaagtatatacatgtgcaaatatgttcttaaaatgaggaggctatactcatgacaattacagtcctcatttctgcaactggtcacatggtcgtagctggtattgatgactaccttcttctatttccctttctgtattccctttgctttcagcaagcaccttagcaggttgtagttttttacacagtggagtgacccaaaccttcactcctgagggtctgggtcatttgtagtcctgcctggattgggttgttgtagtttcccattgaccttaatcacagggtgtgataatactaagagacgccctaatggatctcttgtattccatgcatattcttccttacctccaatgtagagtagtagactgatttcatctgacagtctaggtcaatcaccccagccaacactgtaacttacttcttagtctgttgacttagaggtaagagaagcccaaagtggccaggtggcagtcttaacttccagtttaatggactcgttgctgtgtctcctggtggcagcattcctccctctggaataaagacctctaggccagcagaatgtaatgtcacgggaacaggaaggaaaaaattttgctagggtcactaggagtgatggtgagtgatgccacttccatttccaccccttgattcctggacccatgaatcctggctatgggggaaacggtaccatatattggactgtgattcagagtatacatagccttctggagaactttgccccacccctgcaaagtactgtcacttcattggcattgtaattgtgacttcaaaaggcctttccctcattctgtcaatgcagctgctttgggatgatggagaatacagtaagaccagtgaattccatgagcatgagcccactgccacgcttctctagttgtaaagtgagtgccttggtcagaggcaatgctatgtggaattccatgacagtggataaggcattccgtgagtccacagatggtagtcttggcagaagcattgtgtgcaggataggcaaacccatatctggagtgtctgttctggtgaggacaaacctctgccctttccacgatggaaaaggtccaatataatcaacctgccaccaagtagcgggctgatcaccccagaaaatggtgccacatcgagggcacaagtctcccagttctcagtactcatccatatgctaattgcttccaaatttatatctccagaccaagcctctcttccaaactgcacacttatataatgtgccacctcctggacatctccacattgcctagcaggcttctcaaactgtttgcacaaaacagctcctggtcttcccctccaaacctgctccttcctgtcctcctcatcattccagctgctcagactaaaaaccatggagttgtcattgtctctttctcactctatgtccaatatgtcagcaaattctgggggctctaccttcaaaatttattctaaattggatttcttacagcatccactgctgtttcaagtcaccattaccattatcactccacccccaccctttttttttcttttttttttgagatggagtctcactctgtcacccaggctggagtgcagtggcctgatattggcacactgcaacctctgcctcccaggttcaagtgattcttgtgccttagcctctgagtagctgggattacaggcatgccccaccatcacactcagctaatttttgtatttttagtagagatggggtttcaccatgttggcccactggccttgaattaactaacctcaggtgatccacttgccttggcctcccaaagtgttgggattacaggcatgagccaccacctctggccaccattatctcttgattagattattttgagagccaactaagagatctttctgcttctaccccttcccccatcttcagtctactatcacccaaacaatcagaataatccagttgcctctctgacctcatctcctattgttgcctcccttgctctagccaccctggcctgcttgttgattctagagtatataaagcacacgtttgcctcagaccctggcacttgctattccctctgcccagaacaccctttccccaaatatccacatggttcactccctcatcaggacctctgttaagtatatcttcccctctggcctgaaattctgcaattagagaatcatccccatgtgctttacaaaaatttctttttcaaaatcaaatatacctgaaagggagaacacactaaatctgttatcagacattaatagcctaacattaagagtttactatattgggtcaggcatggtggctcacgcctgtaatcccagcagtttgggaggctgagatgggtggatcacctgaggtcaggagttcgagaccagcctggctaacatggtgaaaccccatctctactaaaaatacaaaaattagccaggcatggtgatgggcacctgtaatcccagctactagggaggctgaggcaggagaatcacttgaacctgggaggcagaggttgcagtgagttgagatcatgccactgcactccagcctgggcgacagagcaagactctgtctcaaaaaaaaaaaaaaaaaaaaaaaaaaaagaaataaaaaagagttcactatattgttttttcatgcagataactagacagtagggtgaaaatggtaacctagtaaattttgaacggtgctctccccagcaagggctaagagtataaaagcaggagcggaggacctgggcacagtgaacaaagtgcacggggcacaaggaaggcaattgggttactggaaatatcagaaaaggaaggtggagaggacatgaaaaacactctgtcccttccaagactttgtacaagatcacattagcatagggaaaatgaaggggaccttccatgggaggtatatatatgccccagtcctttaaggaaaaaagatacaactcagaaatggaccaaaacctatcaaaagtacatgggattggccacacaagttgtgaaaggcaagtgtcggctgtttttttatgctactatgtaagaaaactacattttattttatttatttatttatttatttatttatttatttatttatttatctatctacttttgagatggagtctcgctctgtcacccaggctggagtgcagtggcgcgatctcggctcactgcaagctccgcctcccgggttcacgccattctcctgcctcagcctcccaagtagctgggactacaggcacctgccaccacacccggctaattttttgtatttttggtagagacggggtttcaccgtgttagctaggatggtctcaatctcctgaccttgtgatccgcccacctcggccttccaaagtgctggaattacaggcgtgagccaccacacccggccttatttttatttttatttttatttttttgagacagagtctcactccgtcacccaggccggaatgcagtggcatgatctcggctcacagcaatctctgcctcccaggttcaagcgatgcttgtgtctcagtctctgaagtattatagctgggactatgggtgcactaccacaccgggctaatttttgtagaaaaatacattttaaattaagatttaaaaacaaaaacaaagaaaaactactggtatttgtgtagtgaagaattaccactatgcaaagaaaagtctgagctttgtttctgcttctggaagtttccctcgaatcccttgaaatttcctgagttacaggagtgaaatcagcctgacctccagggagggaaggtggtgggaaattgtgtttagccaattccagccaccctcaattatacccatgtaataattgagttattatctactgaagcctcaatagagagtctggacaccaaaactaggatgagctttttgggttgccacacattcctgaggatgctcttagctctggatactgccatatgtgtctctttctttggcttgttctaatttgtatcctgtcattataataaaactataattgtcagccccaagttctgtgagtcgttctagaaaattattgaacctgagtaatcatgggaacctcctattttgtagcgagctggtctgaagtaagtaaactttgcatacaatgagtgaaattggccatattttatttaattaagctactatattctcctcatactgatggcctttcctgggggaagagagaatttgttgacctcagcaagaccaaaattggttatttaaggaaaatttagtccagagtctagagagagcctgtcccagaattggtatccagatagcccactcctaacatatgctagttcttgagtgcacggaaagataacaagccaataaaataaatagaaaatggcaaacttatgaatagccagttttgagaaaaaatatgtaattggctcttaattaaacaaaagatgcccaatctcactcataacatgagaaagacaacttaaaactacagggagatgccattcttacctgtcatatgggcagaggaaaaactctgtattctggataacacaccatgttgtgagatctggggaaacctcatctggcacgcccatacattggcagtaaaattcaaaattggtacagcctctgtgaagggtgacttggcaatacatcacaaaattgcaaatacatatttgcatttgaatcagcaagttcacgtttaggaatttattctatagatctatccatgttttagtgaaaagatgtctgatgcaaattgaaaaacactgttccattattttacaactcttttcataaagagttgggtcaatttccccactccgtgaatgtggagaggccctgtgtcttgctttgaccaataaagtgtggcagaagtgatgttgttctagagcctaaccttaggaggcttgtagcttccactctacttctcttggaattctgcccttagaccagttggtggttagaggctggaaaagcaccaagtaagctgtgagcagaggctggagaaatggcaaaccaacagctgctagagctggaaaggcagtgagaaaacagtcactgcaggcggaagaaagggcaactagagctggaaaggcagtgagaaaacagtcactgcaggctgaagaaagggcaacttgtgttatgtcgtcattggaataattggcaaaatgttttctgaggaaacttaaaagataaaaaaaaacgtacctaataacattttaaaaacatgattaaggagatctccaggcagaatgttgaaagtgccacttggcttctcctcggtatgataacatgcaagaaaagagagatgagcaaaggaaggaaccattcagcttataagcaaagtttagaggatttacagaagcccagggatttgctagtttggaaaacataactgtctcttgtcctctgttttcccagctggtaaaaattagtctaagttggccagccgtggtggctcatgcctgtaatggcagtgctttgggaggctgaggcaggaaggttgcctgaggccaggagtttgagacaagactgggcaacatagggagacaccatttccaaaaaaaaaaaaaaaaaaaaaaaaaaaagtcagtggtggtgtgtacctgtagtcccaactactcgggaggctgaggcaggaggattgcatgagcccaggcgtttgaggctacagtgagccatgactgagccactgcattccagcctgggcaacagagcaagacctggacttcctgaaagttaaagccaaaaaccacatcaagggtatggttgtaagaacccctgtgaaaacctatgaatgatttaaggcaatgtctgaaggaaccttgcagtcacggcttctgagaatcttaaaggccttttccaagagcagcctcaaaatatttcctgaaagaccttgcttctcttgatatttaccccagaactccatgcagtttccctattttaatacattatgtcaattatatcaccagaggtgagaaaataaaacccaaaatgactcagggcctcccatatcagtgaaatttttaggggtccatttgtctggggtatgccaagacatcccagggtgaggacaagttcttgtaccttgcttttcttccacttaggggtatggtactgctgggattttggattttggagacagcaacacacctctttgaatactgctcccacgcatgtattgggtgactcagaaggctacggattttgagggaggcccagagcaagactacacttcgcagcaggttctagctgcagtttaagcggcctttctgcttgggccatgtgcctggtaattccatggtgctagagatgcttgttgcaggcatgtaggccacacagagtctcttgcaagctctgttaggaaagctgcagtattggcctctagggttctgtggcaaggccgtgcctgcaacagttaatgctcccagaagtggatcttaacaaacgatggatagagggttggtagatacatatcccaacttccttgcccctcaggtaggaaaactctgaggtgcatcctaagccatctgtcccagagttccctgaaggaattaagccccagctatccacaatttaccctgtattggcttctttcccttctcagacctttattttcctattggtgatcttccccagagaaacttcttgcactcaaaagcttgtctcagtgtccgtctctggaaggatccaactcaattgaccaacaattagagaaaggcaaaggatcttggtcatcttttaatcctgctcaaaacacagctttttcccagaaaagaaagtcctatgctgcaatatcctggatttggtggttcaatgagatttctcctttttctttctttctttctttctctctttctttctctctctctctttctttcctttctttcttcctttcttcctttttctttctctctctcttcttttcctttcctttccttcttttctgcctcccttcctttcttcctttccttccttcctttcatcccttcctctccactcccccttctctctttctcaccctctttctttcttttgatggggtcttgctctgtcaccaggctgaagtgcaatggtgcgatcatggcttattgcggactggaatttctgggctcaagtgatcctcctgcctcagcctcctgagtaagtgggactatagccatgcgctgccatacctggctaattaaaaaaaaaattaaagagactgggtctctccctctgtgttgctcaggttggtctcaatctcctagcctcaagcaatcctcctgcttcagtctcctgaagtgttgagattacaggtgctagccactgtgcttagctatcaatgagttttcggttgtatttgcacatgcatactaaagaggcaagaaaaaaaaaactgaagataccagctatgcgtcctccaattctaactccagcagataccagctgtgcatcctccaattcaattctaacaccttccacctggagacaggctcagtcacatcccacaggctgcgggctcagtcccacaaggctgccccacttcaaacgccagtcataaccacaggctgtaacctgtgcttctgaccaagcaactataaattgaggttttcagggccctcaccttgggtttgattaatttgctagagtgactcatagacctcagggaaacactttacttacacttacccatttattacaaggatgttacaaaggacacagatcaagagccagctggaagagatgcacagggaaggggtgcggagctcccatgccctctccagggcaccaccctccaggcacctccatgtgttcagctatctggaagctccccagactctgtccttttgggttttcatggaagcttcattatgtaggcatgaataattatatcattgaccactggtgaccaacccaaacttcagatcctttcccttccccagaggttggagggtggggctgaaagtcccagccctctaatcatggctgggccaccatttacctcattagcatacaaaagactcctgttgctttagagattccaagggtttgggaagctatatgtcaggagacaggagaagaccaaatatatatttcacagtatcacacacacatactctcttgatcacaggtgaagttttgcccaaagcaacagaagtgaagcaagcttctattctcacagaggtttgggtccggtagatactaataacttctattctctgatgcattgtagtagggcagacattaagcatttcatgtgcattttttttttctttttgagacagggtctcactctatctcccaggctggagtgcagtggcactaacacagctcactgtagcctcaatctgcagggcttaagcgatcctcccacctcagcctcctgaatagctgggattacaggcatgcactaccatgaccagcatatttgtattttttgtagagacgggttgttactatgttgctcaggctagtcttgaactcctgacctcagcctcccaagtagctaggaatacaggcacatgccaccacagccagcatatttttgtattttttgtagagacagcttactgccatgttgcttaggctgatcttgaactcctgagctcaagggctccacaggccttggcttcccaaagtgcaaggactaaggtgcaactgccacacccagcctttcatatgtattatcttatttaagcttcactttacaagtgagaagggcagccttggctcagagaagttaggtgacttgcagcaaatcacataattgctaagtgatggatctgagctttagccccaggactatctgaccttgggtctaaacttatactactgtatttttcgttaagtcagtcagagttctatcctttgacagaaagtataaccttcttttaaggcagaataagaccctctgcccaaccctgctctttctttctcctccgcactaagaagacagcgaatacagtagagggttttggactgggatagtggttgcagagaagatccggaactaaaaatatggaccaggggtagaaatggtggtgattccaccaaacttggaaacacttaacaagaccccataacatgcaagatatgcaagaaatggggtacattttctataccagtgccttaagtaaaaaaattccttgttaaacaaatgatttagagaagacagaaccaaatatatatatatagctgtgtgtgtattctaataaaggttgttaaagtcttaaagttagtggtgggagaaaacaataaaaaaatatgaaatctccctatgttaataaactaatttcaaataccaagggttggtttttggttgggtgagtctgtttttgccttgattaaaaagaagtgatttttttcttcagcctagttttcctggtatgaaaggcaagaaggaatgacattccataactgttatagaggtgaaaacagttttatttattggtggtcattaccggcctataaccagggcacaaccttcttggtaaacatttaccaagcattagtggaagatgattcactaacttttaaaactctccttcccttatatgcatattaataccacgatatctttagcttttaagtccatatatacaggcacaggtgcgaataaattcaaacatatcacttgtagtggtttacataagggcttgctagttcaaatggggttgttagttttgcatctcaaattagttcctgtcaacccagcaactaaagaaaattcctttgtgaaaaaagtttccaggcatgacccagtaattgttttaatggattttcaatgaagggtgaagtaccatgctatgtagcctgtgggcattccataaatatattttgactgattctgttaacaaactacatagaaaaaaccaaatacttactatccaatcctcttatattgtttcccataggctctgtctgttagtgtatttataagcatttaaagtgtataagggagctctggcagtgagagtgaattgcccaatgcagagaagcactctgggctggagggttttacttagtctaagattttctttttttttttttgtgagacggagtctggctctgccgtcaggctggagtgcagtggcatgatcttggctcactgcagcttccgcctcctgggttcaagcgattctcctgcctcagcctcccgaatagctgggagtacaggtgcatgtcaccacgcctggctaatttttgtatttttagtagagacagggtttcaccatgttggccaggatgttctcgatctcttgacctcgtgatccaccctcctcggcctcccaaagtgctgggattacaggcgtgagccactgtaccaggctacttagtctaagattttcagtgtgcacctgagatttgccctttccaaaatgaggaagaggcctgaagccgatcagctgaaagaagtactaagccctgcaggctgaaaaggtaatgtcccacctatgctggaggacctgatgttggtatagtcaattttctgtcttctatgtaaggtatagatctgctctgatcttgacattgtgaagaaagctactatactgtcagaatctgctgtaatatagccctgagatgagaaaggtgtgtagaacagaaatcttcactgcccttctcccaaaacattcattgacccctcctgtaagatatatatatatatataattattattttttctagacagagtctcgctctgttgcccaggctggagtgcagtggtgcagtcttggctcactacaatctcagccttccaggttcaaggttcccaggttcccaagcagattctcgtgtctcagcctcttgagaactggggctacaggcacacgccaccacacctggctaagttttatatttttagtagtgatggagttttgccatgttggccaggctggtcttgaactcttgatctaaggtgatccgccaaccttgacctcccaaagtgctgagattacagtcatgagccaccgcgcccgtcctgcattcttgctgtgtgtgtgtaacccttgctatagttatataatttaggttgaatttaatttatacgttgactatgatctgagggtcaagatcatttgggataaaggagagatcaactacatgtccgtatactgcaagttagaatttagttaagaaggccctgagtagattccagaattataataaagctttcatttttagtttgaggaaacttcaatatgggcgacagaacaaagaactcgggtggtaggaattaagttggtaggaattaagagggtgcctgccagacgggctggaagtgaaggaagccatgtgcctgcaaagctgtttagggctgccatgtgtttatgccctggcagaaacctctggttagaagttagatcgcttacatttttcttaagtaacccattttgttacatccatatgttttccctctttccagaaggaaaaaaaagtatcagcgagcccttcctcacggatcaggaagctcaagggattactcaagtacattggcggcagttacaaagatattttctttttttttttttttttttttgagacggggtctcgctctgttgcccggactggagtgcagtggcgcgatctcggctcactgcaaagctccgcctcccgggttcacgccattctcctgcctcagcctgccaagtagctgggactacaggcgcccgccacgacacccggctaattttttgtatttttagtagagacggggtttcaccgtgttagccaggatggtctcgatttcctgacctcgtgatccacccgcctcggcctcccaaagtgctgggattacaggcgtgagccaccgcggcctacaaagatattttcaagcattgttctccctaccccaaatttctgagtcatttaagtagagaaacagctcttttgccctggctcatatatgaaaaaagtagaattcaggccaggcttcaagtctagggatgattctcattaatgaggttaggtctgccacctggtggtgagaaataaaatgccacttgattttctcatctgatctgtccatataccacacttaaaaattccactttgcaaatccatccttaacctctgactcgggttgtgcttgccgccagccaaaagttcccaactgatgacaacggcaccgacaccttggggagaatttttaggcaaccatctggaactcattccctatgaacacatttgaagtgttttagaacactggtaggtggttctacaacacttcaaatgtgacttaaggtagattttaggagaacaaggttctcctaaagaggaaagatagcactaattcattcattagtacacaaactattgtgtaaaaaaaaactatgctcttcaatttgtaaacaaatgtgtaagacaatgccccgctccatcagtgacaaagagatgggagtggataaccaagttaggctgggaaaataagagtaattcttgcttcccgttgaaaggctgaggagagtgcagaatcatctgaagccattagggggagtgctaagtcttcagaacacacacacacacacacacacacacacacacactcgaatactagaatatgaattctggaatatgtccacaattatttggggatttggcctatggatccctcacagagggtgaagatacccaagtaccctggagagcttcagcttccagtaacctcctccagcactgaagacttcagctccttccttttttcacctgcccctattttcctttccttgtaggccagtactctcaaagtgtggcccccagtatcaccactgtcaccacctgggaaactttcagaaatgcaatatctctgcccgtaccccagatcaaaggaatcagaaactgtagggcagggttaataaggcctccaggtgattttcatgcaagctgtgaatctctagtccaggggtgtccaatctttcggcttccctgccacattggaagaagaattgtcttgggccacacataaaatacactagctaaaaaatttttttttttgcaaaaaacctcatcatgttttaagaacatatatgaatttgtgttgggccgcattcaaaggtgttctggtctgcatgcggcccatgggccgtgggttgcacaagcttgctctagtcttagggtgatcctctgggcacagaccagggagacttgtcggagtgggagctaaggggagaagcaatgggtcctagaagccaatctagttacccagtccagcccagagtgttagagggagcagagaacagccacaaagggaggtggcagaggtttttgccaactgagcaccagctttgtggacactgaccctccaatcacccttggtcacaagatcttcagatgggagactcagtcttcaattaaagcgacactagagaagaatccctacagtacccagagcaaataagataaatagggctgtgtccaccccacctgggtgcagctccagctcttttcactcccttccagatccgcggaaagcacccctgacacgcatatatttgtggatgggatacctggattgagagcgaactccatcaaccccccgagacactgcaccctgctccctcctctgctggaggaactgccactttctaaaggaaaatactatttaatgtgcagaattacagtacacacaatacttatagtatggcaagtattagtccttggtattttttccgccaccttttcccatctccccatcctgtatgcctgtgcctccttacctttctagcacaaaacaggcacttaaaaaatagtgcagaatgaacagctgaagcttgcttctactatcttccatatttttctctggctgctgtcaaaaagcgccagctcagagccagggtggccgactttgtcacagtctctgctggaaaacgacattttttagggggaaaatcataagccaatgcagacatgtccctgccccctattccttctccctgcacgtgggcacacaatgggcggccggcagaggtgggggagtgaggagcacaggctccgtgtgtccaaagtcccgggtcacctcggcctggaatccatctaactcagctgcaaaccagaagacgcggcctgggaggggcgtagagccctcccccacctccccgggctgggtgactgtcaggccgcatctgctccaaatttatggctcctcctcgggccgccgccggcctctccacggcctctttaccaactgcagccccagctgagacccctcccgcggggagggagggaacacgaagcgcggccggggctgggggcggggagcaggtgtgaagcggggtggcagcggcgcgcggtcaccctccaccgcgccgcggagacccggcgtcacccccacgcgcacacaatggcgcgggggccaggccgaggacggcccattagcggctgatggaggaggcgggagcccggcgggccgcctaatccccgcacgcggacacctgggtgggagcgcgggcgagtggagggcgcgcctgcacgcaggatcccgggctgggcaacggcctagaccgcctctcgccaaacctcccacgccagcgccagtccgacgaacaggagctggtccagcgaacaataaaaggccccggggctggggagggatggaagcgcccttggagcgcgcaggctacgggcgcccccggcagcgcccccgcgccttcccctcccgccccgcggccgctgattgcctattgtgcgtcccctctgcggccgcccgcgcgatgcactctgcgagctggccccttcgtttctaaatgagcagccagcgccgcagacacgtgccaagggaagggtagttcactgcgtggggcggggggacatgcaataagacaagagaccgcacggaaatagctccgtgcccgtctgctgcactgtccttctcacgtgccttcggacaaggggactttcactctctcccctcctctgccccaatcgctctgtctccctgagactgaccaccctcttctctaacccgaactccgcaggggagccttcagccttttattattatttttttcctgggtagtagatgtctttgccttggctgggctctggaatgctcaggtaaaaagtgggtctggccggatgcagtgtgtatcttcaacacggaggctagagaattggatagaggagcagcgctagtctgtgacagctccagacgccctgctccaagcaccccaatcctaagcaccccaatcctctggtatcttccgtcccagggaactctggctggtcgtcatggctttgtttaatgctcctctctgccacactaccgcgttccctgtgggatgggaacctctgggaaaggacctgacaagggaccagaaaaaggtttggggaatcaaagtctagtagtaaggggtcctaccactgatggtttggactcacgggcaatttacagttggatggaagctgaagtgtcatcagatttagaggccacagtctggcagcctgtggaccaaatccaggccaccaacacattttggtccataaagtgttttttaaactttccatcatgaataatagcatattgtggatcataaatatatataaattagtgagaatgctataataaacccccatagtcccaccacccagtttcagcacttaatctattcaaaggcaatcttccttcatctattctcccactctcctccagaatttgaagcaaatctcagaaatcctatcatttcttctttaagtactaaaaagtagtcctaaaagataagaattcttttaaatagcataataatatcaatatcacacctaaaacaataattccttgtcctcaaatatatagtcaatgttcaaacttccccaattgtcttatttttctttattgttcaaattgggatccaaatgaatctccacagtgcattctctcctttaatcggataatcccccagttaatctctttttttcctggaaatttatttgttaaataaaccagatcatttgttctgtagaattttccacagtctggattttgttaaatgtatccccatggtgccatttaacatgttcttctacctctacatttcctgtaaattggttgttagatatagaggcttgatcaattaatgctggattttttaaagaataattcatagaccatagtttaattcgatccaaagtaatgtctgcttgtcagtgatgaccattgtctagacccattatttcattagggattgccaagttgtgacattctagttctatgattcactcttcatttatgagcttgaatacttctctaaagagaatctgtcatcaatgatttgtttatgcagaggtacacgtcaaataggaaaggcaggataaatgcttgattctttcccttattatttatcaaaataatgaggtgattcctcagattcccctaatggtgaccaacgattttttttaaatcacttatgaacaaatggatttaaatatatctcatgtgtttcaaaccaagtatattttgattgggcattttaaaattagaagatgtcatattaaaaacattgacctctggcttccgttgtagaatatctggcaaccttgagtccttttccagcaagactagagcagactttggctgaggggcactgcctccttcagtaggcattcattcttgccttggcatgctttgatcttcttagaccctggaccccctgccctgcaggagtaagtctgtaaagcagatccaatccaagtctctcaccttatagatgagagagctgatgaagtagcttaccttcctgagactggaagacaagtctcctggctgcctaccaagacgagggtaaagcaaacagggaagaccagctggtttctgccttacctgcaagttgagctgagccagagacctgggaccacttcaagataaccttcctccccatttgcaaacacaccttgcagaggaaacttgggaatattccaaactccactccctcttttgcctcccacatccaatcagccacctagcctgctaattagcctcccttcctccattcctgtcctcctccaactcatcctcctcactcgcaatgaggttttccaaaacatatgtctaaccatgtcactctctggctttaaaatccgtcactaactgctcattgcctttaggttacatcgaagtcaacattagcacagcacacaaggctcctcatgtcctgggctctgccatggctagctccttacctcatgctgtctccttgtcacaactccgtcctccagctggacggaatagccacagggctctgtgcacacagttttgtctatgttatgtcctctctgtatttgctgtttactcctttaaacatccactgcttccctggctggcttccacttctagcttaagtcccactccaggctttgatcttaggaaaggccttcttggcaagccttgactgcattccatgtcctactccgcacttccacagcattctggctcactttaagatgaggaccttgccactgatgggtggttttgctctttgtttggtttgctttttcacttgtttccctcctggccggtgtggaagcttcctgatgcctgacaggggctatgtctgtatctccatctcctaaatcatgttcccaaccatgttcccaatgcacaaagtaggtgcaggccagtaaggatttggttagtcaatgaaattaaacaaaagagatgaaggtttgtggactgttttggagagaaagaggacccccttcccttgcagggaagggacttgatgcaaacgaccgcatggcagtaggctcgctgggcagatgcccaggagatattagggctgctggggctgaggtaatatcctgcgaggccagccgggtctgcagccctggctgggtcacgacccaggctctgcctggctcggacatcctcggacctgtgcatgcatgtgtgcgtttgtgtgtgcgcgcgcgtgtgtgtatgtgtgtgtgtgtgtgtgcgcgcgcacacacacacacacacacacacacacacacagcctcgccaaccccgcctcctcccgctgggaggataattaaagcgccaaacggcggagcgggcgggcagcgttcccgggggcgcatttcatcggggctgattaatgaggccggggagttaatgaggagaaagctaaacgcagggagctgagccgcggaaggcctctccgaggccctggagggggtcctccgaaggcatctcccgccctctctttctagcagcggcttagcgcaagccacatggtgccccaggctcctctcgccgcctcaagccaggggcgggggggaggaggggtcgccccaagtcataccggccgcactgaagtcggtctcctccgcttgtggctaacccggctaaacagcaaaagagcctgccttgccatctaaaacacaacaaaggacctcaggagaccgccactttcttcttctcctcagggaactttgggcatgggtcccagaccacctgcagattgcattccagatccgaattaaggatcagctctgccgtgccaaccgagtaaccttagacaagttacttagtcctttgagcctcagcttctgcgtctgtaagatgggctcacactccttacccgccctaaaaatggcttttagtgagtgccagacactactctaagcacttggcgtgtataatcttattgattcttcccaacagctctaggaagtaggctctgttattatcgtctttacttcagagataaggacattgaggcagagagcagggtcttaacttgcctgaggtcgcactgctacttgccaggactgacccagctaatacgcagtggagccggaagtgaacacacacaggctgatcccagaacctgtgccctatccttagcataaggctgtggtgctagttctcaaggcgggtgtgagcatcaaatcataccctcaaatccagagaggggctttgtttttgtttttgagacacagtctcactctgtcgcccaggctggagtgcagtggcacaatcttggctcactgcaatgtctgtctcccggattcaagtgattctctttcctcagcttcccaagtagctgggactacaggtggccaccaccacgcccagctaattttttgtatttttagtagagactgggtttcaccatgttggtcagggtggtcttcaattcctgacctcaagtgatctgcccgccttggcctcccaaagtgctgaggttacaggcatgagccactgtgcctggcccagagagggactttgtacactgtaaaatgctaagcaaatgtgagaagaagcaattattaatactattaatattaacttaccgggctctgtggcttgtgcctataatcccggctacttgggaggctgaggcaggatgatcacttgaggccaagagctcaagactcttgtgattcacattcattcccagttttgaacccagagtagagacaaggcagtgagggatggagccactgaacagagagagagagcaggcagggtgatggcttttccagcagtccgcatccttgtgtcctaactgcggcagtagagctgagagtgacctctgcctgacctcaggcagtgacccccacgccttcaacgcacgccctcaatgcacactcttctgtagtcaaaagacggacacaccaaatgttccccatctccctacaagtggcagaggagtagtagcctgaattttaagagagcatggtgcgaagggatgagggtgagtttggactcagataacccatgttaccatatgaatctgtcatctaccagctgtgtgagcctgggtgagttgcttatccactctgagcctcatcctgccggttgggaatggtagctgctctccctatgtcgcaggactgctgtgaaacggcaaacaggaagttctggatgtgaaaggacattgccactttttgtccttggttggagagtgcaggtcactaccctgggacatgccaggagtttctagcaatgggcaacagggcaaagagcctgagctctcccgtgaatgcccttcccctcccctagtaatctgattttgggatctacaactccatatcgctctccagtcgagaatgatttgagaccggaagccaatcagctcctaccaagtcttgatgagtttgaaatgagccaatttcctctggatgagtttcttctgctgaatcagggaaactgaggctgcccaggccaacctaaaacaaatcagtctccccccgcggaagtcagacacttccaccttcccaccagtctgactctaaagcccccagccctcagtaatgctttgcaccatccccccctccactgtgggggccaccagtactggcaaaagggggagcataaataattttctccaaaggagcttgtgtctagagaaaccaatatttaacatccccatttacattgaaagcgtgattctgattatgagatggtaatgagaggattaggcagaggagagggcccccctgcctgccgccccctcctgttcttccctccatcaccctgcatcgcacagggtcttattcctggaggaggacgtggggaaggggttggggcactcccactgggagagcatcagagatgccagagcagggcaggggtccttcaagaccccaagtgagagccccttattcatgtctggaatcaattagcctcagagggggtgacaggtgagatgcgagacacctgactctggtccttcccttgcctttcccctacactgcgcccctctgctcctggattctgcctggtattcccgacaggtgtgtttcttacatcgttctttgtttctgaggtggacagctgaagtcaaaaagtatgttgggagaacttttgcttggctcctggcttctctggctgaacctcaaatcccactcctctcccctaaattcctcgtctctctggaatggcatccttgtcctccttgccccaaaccctgttttttaaccaggcagcagtttatctctggcttttcctatggggcaagggatgggggatgaagagaacccaagggggtcaccatcctgaggccccgtttgttggtggacaattgcgctcagacgggataattcagtgtgtgattgtggtcacgccccctgccttttgtgcccctttcagagccaatctcccaggcccagatgggttaatccataatgcagacgagcaagtaactggctgtcagcccagcccccaggaccccctccctattagtgccactgccctaatgaagcccagcttggagagcccccttctcaatgaggtgccggccccaacccagcccggcacacatgtgtctccactgctctgcctgaagcctagttccctttagggaccccgagcccagcctccccggggtgacccagctgccagggctgtggaggcccggggggaggctgtgatggatgggagggagatagttaatagagcccaaaacacatgggccctgtctccaccctccacacacagacactttcacagcttccattgacagcatccctggtctttctgaaatagccccatggaatagtccccactcccatctccaacgtaaattgtgctgaaataggatttaaatggggattatgaagctgcttttctgaatactggcccaagtcattgctacacagccaacccccaaattctgccaacctcagtcctcttgtagattttgagcagaaatggctcaaggcaagttaaacaatgagctcgaccttcagcctttagtgtctcaatcaatatgtgactcttatgccaagagatattcttttccttatatcttggacttccatctctgctctctcttctcatccgcttttttattttattttatttttttgagacagagttttgctctgtcacctagtctggagtgcagtggtgcaatctctgctgactgcaacctctgcctcctgggtttaagtgattctcctccctcagcctcccaagtagctgggaatacaggtgcacaccactatgcccagctaatttttgtttgtttgttttttggtagagatggggtttcaccatgttgcccaggctggtctcaaactcctgacctcaagtgatccacctgtcttagcctcccaaaatgctgagactacaggcatgagccactgtgcccggcttctcttcctattcatttctgaaccaattatttagaggcaggaccagcccgacagatgaggcaggtgtctgtagagaagacctgctgtttgtgagagctgccttaccttgtcctaggcactgcccatcaggttctgagctccctgcctctggaaggattcaagacaaacctggacgacatctgtttaaaatatcatagaagagaggtttggggaggatgtttgcaaagaaaccacacttctctgattctctgcacttacttcctattcccacctctttgttccctctttcaccctaatacaaacaactggccttgctggctctggtgccaaaccaatggggggaaagagactctagcctctgcggccttgggctgtcctacgatgcccaaagaggcaggagtttggggcgctaaggagagctggccgtaatctgcctgcccaccttcctctacttcaccctttctaaatgataattgtatatttttccattattaattaggatgacaaaatatccaaaaatggaggaaagatggaaaagttgtatacattctctcacacctaattccactgttggttatactttggtttatttttcattccatctttttcataggcacattggaaatcatccagcataattgaaatatttactgaatatcttctatgtgccaggtacagtgcttatactttttccacctgaattataactctagacccatttctatttccttttccttttctaatgccagtgtaattgccttggaataggtatactgtcttatcatggaatatttggaagttttcacatttagagatacaggaccctgagatgatggaggttagaatctataccgggctccaaagtcacagtgagaaatctttttatgattaagaccatgaagaggaaaataaagccctcatcctgataagtggagggctcaggggttgaaggcaagtgactctgagaaaagtctagccccatttctgattacaggagggaacaacgctgggtggtgaaataccattcagaggttgctcctaggagatgctgaatatttatgagctatgcaatcaggacttaggaggtaaggcttaaagaataaacaggcagcaggatgggggtaggggagagagacatggaagagaagccgtaagaaatggaaagggacacacaaacagaaggaaggagagagggagtatttcccatgacttttcagaatggtgacttctctctatgcccataaaacctagatgcatctcattgtgtagatggggagtgaggttagagtgaggctggactttcccagggcagactctgcttctctgtgggaatccagggagatcttggagtcatctttactgccaggaattgagatccagaagtcagtgaaaaggagccccttacaggggctcagtgtgaggcagtggaggctaaagatgaatgtgaggcagtggaatgagggactttagggtcaagagatccctgcagatagtggagaaaggtccaatattcaatgaatacaaacaaatctaggaacgcacacaagcacatagaaacaaagcgataaagactcagtgatgtcaggtggaaaacctttcatatatgcatttaacacaaaagcatttccctctgaatggaaatcattagagacatgggaatattcctctttaattgaaaagtgggacatcctctgtaggatgtaggggatttgaagatctcaattggtcccttactttgtgaatttgatcctcacctacagagaaagagagagaaaaaatgggggcgaggggtggtggggaggagggatgcgggagagaaagggagagagaggagagagatgaagacagagagaaataaagaacagagtggatttctgactttctggagactgaaaaagtgtcaggaattaaagaaatggcaaatacagtaatccctatcaaaatactaatgacatgcttcatagaaataaaaaaaaaattctaaaacttttatagaaccacaaaagattttgaaaagccaaagcaatcctgagcaaaagaacagggccgggagcagtggctcatgtctgtaatctcagtgctttggaaggtcaaagctggagggtcacttgaggccaggaatttgagtttgagcccagcctgagcagcacagtgagacccccctctctacaaaaaagaaaaaaaaaacccaggcatggcggcacaagcctgtaatcctagccatttgagaggctgaggcgggaggatcccttgagcccaggagtttgaggctgcagtgatccataattgtgccaccgctctccagcctggatgacagggacccagattctaaaaacaacaacgaagctggaggcatcatactaccatattggacttcaaagtttaatacagaactatggtaactaaaacagcatggtactggcataaaaaaacagacacatagcccaatgaaacagcatagaaaactctgatataaatccatgtgtttataaccaacttattttctacaaaggtgcaaagaatatacaatggagaaaggacagttctttcaataaattatgctggggagactggatatctatatgcagaagaatgaaactaggtccctatctctcaccctacacaaaaatcaaatcaaaattgattaaagacctaaaactatgaaactaccggaagaaaactttggggaaatgctctaggatattggtctcagcaaagactttttgtgtaagacatcaaaagcgtggtcaaccgaagcaaaaatagacaactgggattacatcaaactaaaaagcttttgcacagcaaaggaaacaatcaacaaagtgaaaagacagcccacagaattggagaaaatatttgccaactagccagctgacaagagattactaaccagaatatatagttcaagatctcaatagaaaaagaaaaccaaataatctgattttcaaatgggcaaaagatctgaacagacacttctcaaaagaagacatacaaatggtcaatgggtatatgaaaaaattttcaacgtcactaatcatcagagaaacgcaaacccaaaccacaattcattatcatcttaccccagttaaaatggcttgtatcaaaaagacaagcaataacataccggtgaggatgtggagaaagcggaacactcgtacactgttggttggaatgcaaattagtacagctactatgaagaacagtatggaagttcctcacaaaacgaaaaataacactaccgtgtgtgtgcatgtgtgtgtgtgtgtatatattccaaaagaaaggaaagcaatatacaaacagatgcctgcactcccatgtttattgcagcactattcacaatagccaaaatacggaatcaacctaagtcgccaacagtggaagaatgaataaaggaaatgtggtacatatacacaatgggatattattcagccataaaaaagaaaaaaaccctgtcatttgcaacaacatgtagggaactggaggccgttatattaagtgaaataagccaagtacggaaagacaaatctcacatgttctcactgatttgtgggagctaaagaagttgatctcatgaagatacagagtggattggtggttaccagaggctgggaagtgggcaggaagtgaatgaaaggggaaaaaaaggatataaatagaaatatatttatgaccactgaactgtacacttaaaaatggtaaagatggtaaattatgtgtattttacctcagttaaaaaaataaacttctgccacacaaaaagagtttgaaattaaagctgaaattttttttttaaaaaaaaaggagagcaaaagagcaaacacaaagagtaccaggtttaatatggataggtgcgagggactaagggatttaggaaataaaaacagaacgacggaaaaagatccagaggtcttagtggactacactcagtaatataatagtaggagtcattctgttacaagaaacatacataaaagtagaatgtgtgtggaagggggagtagggggagtcttccttctgctatacctgctatacggatgcaggtctttcacagagatgtggtatacagtattgagtaagcatacaagtgtacagtcagcctgagtttaaatcctggatgttctatgtcacagccaagtaactttgggcaagttgtttagccactctgtgcctaagtctccttatctatataatgtggatattttttgtttctgttttctttttcttttctttcttttttttttttttgaaatggagtctcgctctgtcgcccaggctggagtgcagtggcctgatcttagctcactgcaacctccacctcccaggttcacgcaattttcttgcctcagcctctgaagtagctgggattacagctacttccatttttagtagagacgaggtttaaccatgttggccagactggtctcgaactcctgacctcaagagatctgcctaccttggcctcccaaagtgctgggattacaggagtaagccaccacgcctggccaaaatgtggataataattagtcctagtcttagagttatttggaaaattaaatgcatgttaaataaaatgtataggaggccattgatttggactgagctcctgcactagaaccaacagaccaaaccaaaatgcaattactcaggctgaagttccccaacaccagccaaaactaaggtcttcatctaactttccaagaaatcagtggggagagagagacaggtaatagccaaatccccaaccgaccagttttagcagatgtgataaggaagtcccctctgctttcacctttacaagaaaagttatgttgaaaagatcaatctgctttttaattttctgcttctgctttcctcagcccctttgtgtctataaatcaacctcctctgctcggctcatcagaagactcattctatcttatagaatgaggtgtcacccaattctagaacctcaaataaaagccagttaagatctttaaactatttgtttttggtaattttgtcttttgacatggatgaatacatgtacagcacttagaacagccctcacaatagcaacttcacactcatgttatatattaaaattcatatctttgttaatgttaaatgaacacctactataaaccacacattgtgttaggcaccagggataaaatacaaataagatacaatccctgcactctacggggaacttgaagcttatggggaaaatatacatgtaagcaagcaatcaaaacactgcttatcaagttatacaggagggaaataaaccaagtgttctgggaggaccatgcagtctgagtgggtcaggaaagagtcactagttagttaactgaagctggatgctagaataaaagcaattcagaaggtggagaatggagaggagatggcatttcaggaagagggagtagcaagagccgaggcatggaagtacaaagggtaccacacagtcaagaaaaaaagttggtttggtgctggaatatagacacccaaagaggggtcggttgcagtggctcacacttgtgattccagcactttggaaggcggaggctggtggatcacctgaagtcaggagtttgagaccagcctggacaacatggtggaaccccatctctactaaaaatacaaacatttgccggtcatggtgaggaatgcctgtagtcccagctacttgggagtttgaggcaggagaattgcttgcatcagggacgtgaaggttgcagtgagccgagatcgcgccactgcactccagcctgagtgaaagagtgagaccctgtcttaaaaaaaaaaaaaaatggccaaagggggtagagttggggtggggagtggtggagaagatcttggaaaggcagtcagcacccagactatggtgataacttgtgtgccacctgtgtgggtctatcctacaggacacaggaagaagcctttataatttttaagtaggcgagtgacatgatgagatctgaacattagagacaagcatgtagctcggtgtctggcacttagtaggtgcttaactacatgggagttgaacaaatatatagcaactccttgcagcatcagtgtagagggtggattgcagggagttaggaggctttcatgagaacctgaactaagacagtcacaatggagatgggcaggaggtaaagggttgatgaaatccttctcagaaattctggagtggcatgttcagtttggggttcagggcttaagaggggtatagagaagctagaaagagtaaaaaaaaaagatcctgtttacaattgtaacaccaaaatattatttattattattggaataaacaccaagaagtgatctagatctaaattatgaaaatttaaaaaatattaaagtctataagaacaaggtagctgttttatctttcataactgtgctattggacttagtgggattggcatcctccttgctcctcattgttaaatctgaaccattcccccttcaccctccctaaaaacttcccatctttgagtctaatgtcataagacactactatctgctgtctcagtgccactgactacctcctcctggggtcattgcacctcgttccctgcagagtttacctaacagctcactttcactctcaccaactcttcccctgctctaattcttgattatctcaaagcatactatgacaattcacctaatatccttgcttcttagttttgtgacctcctctcctcccacaatcttgttgtctactctaccttagccattcattcctgcagtaataccctagtaaactgtagtaaccagtaactgaacttctgtatgatgtcagtttcaggcattctcatttctagtcactatctcatatgttttccagttcacttcttttggtattccaattccaacaaatcttaggccacaccaagacaatccatctatctcaatttctttccattgatttaattttcttttcactgcagctcctgcaatttattgactcatggctctacttatctccttactcagtttagattcccatggtcaatcatcagaatcagtttcttgcttacatcttcaatttccttgcctgtctctcatgtctttgagcttgtctggctaaccgacaactttgggcgaatccaactttctacctattcttcacctgcatccaagcaactgaatgtacctgcagaaaaatgcaaaaccatgcacattggtctcacttttaatttatgatcactcacctgaagcagacctctaatgctgcttaagaatatctattttagagacaggatcttgctccatcacccagagcggagtgtagtggtgcagtgacagctcactgcatcctcgaactcctggactcaaatgatccttttggcttcagccacccgagtagctaggactacaggcacatgccaccatgcctaatgttttaattttttgtagaggtggggtttcagtgtgctgcccaggctggtctcaaactcctggcctcaagtgatcctcccaccttggcctcccaaagtgctggggttataggtgtgagccaccatgcccagccaattttactatatttctatagctgtaaactgtcctgctttccttcctgactctgtcagatattttcctctctgctcaaactttcatcacctcttcacctattcttactcctagctggtaattttgtttcctatttcatggagaatagagatgcaatcaggagagaactcccattggctcctagccccacatcttaccacctccttgtgtctgtgtccacaccctatcctttgtcccattactatggatgaaatatctgtgtcctggctcagtgactccattcagttatgctctagaccccatcatctctcctacccagggatattgttccagcaactctcccctctcttctctgtatcataggttttccctctcaatgacctaattttagtcagcacataaacatgaggttgtttctctcattttgttaaaattcctgactgcatttctttttcaactatctctttataaatctccttcccatttcaccaaaactctaacttctgtacttccatttactgttaagtccactccagtcagaatttgctttcaccaatctaccaaacatgcttttaacaaggtcaacagggacatccatgttactaaattcaatagtcaatcagtcttcatcttagctgtctcagtctgcgtgggctgctatcacaaaaatgccaaagactggttggccaaaacaacaaatatatattttacatggttatggaggctgggaagtcagattcaaggtgccagcagattcagtggtgaagacctgcttcctggtccatagacgctgtattctccatgtgccctcatgtggtagaagaggtgagagagctctctggggcctcttttataagggcactaatcccatatatgagggctccacccccatgacctaatcaacccccaaaggccacatctccaaataccatcactttgggggttaggagttcaacatctgaatttttaggagacactgacatccagtctgtaacactagttggtcttactccactttaccattggtcactccctcctccttcacttgctttctccttcttcactgagtttccaggataccacactctcccagattttattttatttctctggtcccttcttagtcgtctttattcttcctcctcaactccctaaattcaaaatgttttggtacccaaaggcccagtccttggacctgtcgatttttaaaatttcctttgatgatcttatctagttctgtggtttcatatgtcatttatatgatgaggatgctccaatttatatacctgtagccaagactactccctggaacttcagacatctctaacttaacatgtccccaaccgagttcctaatattacccattgaatctacaacgcctttagctttctccatctcactaaaattttgtcaattctattttcaaaatatatccagaatccaggtacttctcatttctacaggtgccaccctgatctgaaacaccaccatcacttacgtgtgtattgcaaaagcttgccaaagcttcccagctgcttcccctgcttcctcccttcaggtttctcttcagtctgttcttagcacagcagccagagaaactctattaaaataagtgaagttatgtcactcttccactcaaatctccctccacggaatcccatctcacccaaaataagctagagttattattatgtcatacaaggtcctacgtaattaccccagtcttgatgtctctcttattcaccctactccacctgttttttttttccttcaactcacttgttatgctcctgtctcagggcctttgcgttggctatttcatctatctgggacaactctttcttaaggtagccacgtggctaattctctcacttccttaaaggctttattcaaatgtcattttttcaatgaggcctcttctgggaaccccatttcaatgttagtttctcgtgccactaccatatacttctcatcacaatttaacttattatatatttaagttgtttatctttattattgcctgctaaattatagcaccattagaatgtaagctctatgagggaatttttgtttattttgataactgatgtattcccagcgccttaaaagagtgcttggtacagagtagatgttcaacaaataactttttttttttttttttttattgagacggagtgtctctctgttgcccagtctagagtgcagtggcgcgatgtcggctcactgcaaactccgcctcccgggttcacgccattctccagcctcagcctccggagtagcggggactacaggtgcccgccaccatgcctggcttattttttgtatttttagtagagatggggtttcaccgtgatggcccaggatggtgtcgatctcctaacctcgtgatccacccgcctcagcctcccaaagtgctggggttacaggcgtgagccactgcgcccagcaacttgttcttttatttatttatttatttttgagactgagtctctctctgttgcccaggcttcagttcagtgggggcgatcttggctcactgcaacctttgcctcctgggttcaagcgattctcctgcctcagcctcccgagtagctgggattacaagcatgcgccaccatgcccagctaattttttgtatttttagtagagacgggatttcaccatgctggcctggctggtctcgaactcctgacctcgtgatctgcccgcctcgacctcccaaagtgttaggattacaggtgtgagccacaatgcccagcctataatttgttcttgaaagaaagaatcaatattgtaaacatgtcaaatttcttaatctgtgaattcaatgtaactcaataaaaatatcaaaaataggccagcatggtggctcatgcctgtaattccagcattttgggagaccaaggtgggagaatcacctgaggttggaagtttgagaccagcccagccaacatggtgaaactctgtgtctactaaaaatacaaaaattagccggctgtcatggcaggcacctataatcccagctactcgggaggctgaggcaggagaattgcttgagcccgggaggtggaatttgcagtgagccaagattgggccactgcactccagcctggtgacagagcaagactctgtctcaaaaaaaaaaaaaaaaaaaaaaatatatatatatatatatatatatatatatacatattttttatatatatatatatttcctatagctttgcttattattattattattaaaattttaccttgcagctccagctcaaaggacctaaagcttaatagaaaaataattaaggacatctgaaaaaaaaataagactagccaaagaacatctaaacattaagagtaatgaagggaaactatcagatagtaaactatgttacagagctataataattgaacagttaagtacagtcacggggaataacatgcagatgaactaacagaacagattcctattcacatttaggaatatgaataggaattcagcatataggagaagtggttctgcagatcagtgaaggaatcagggacaactgcttatctaagaaacaactatatttttaccttactcttcataccagaataaattctaaatgcatccaagatctgtatgcaaaatatcaaagcttagaaattattagaagaaagtaaagattctatttttgtaatcttagcataaggaaagtctaagcatgaaacaaactgaaaagctatattgaaatacattaatacatttgactttgttttctaaaatctggtaaaatatttttcagtcaaaaattatatgacaaactgaggggaattttcaacatatacacatgagacaaataataaattttccccagtgacacaagagagcaaatcgtggaaaaaatgtgtaagtggccattaaacagatgaaaatgttctcaagttcactcagaattaactatatatgttacagtaattaaatacatatttcatttatttaattgtaaaaaataaaaacataatatttggtcatggtgagcagacagagactctcatacactgctgtgggactgtcaattgtggcaccatttgaagggcaatttgatgatatatatgaaaatttaaatgcggccgggctcggtggctcatgcctgtaatcccagcactttgggaggccaagggaggcggatcacttgaggtcaggagtttgagaccagcctggccaacatggtgaaataccatctctactaaaaatacaaaaattggctgggcatcagggcatactcctgtaatcccagctgctcaaaaggctgaagcagaagaatcgcctgaatctgggaggcagaggttgcagtcagtcgagattgagccactgcagcctgggcaacagagtgagactccacctcaaaaaaaaatgtatatatatatatatataaatgcacatacttcttgctatgtaactttaagcagttacttaagtaaagttactttacttgctgtgctttcttaggcataattttcttatctgaaaactggaaataatagtacccacctcgcagcgttcctatgagcattacatgagattatgcctgcaaagtgctcagatttttctcattcctggtagcttgcacatccagaactatgtctggcccacagtgggtacctggtgaacatctgctgaatgaagaaattaataaaaccactcaataaacattagctgttgttagttattatttgcctctataatttcactttttacaatttattctacagctagagatgtgtgtaaagatataggtgtagtatgtttattagtagcattgtttgtaaaacaaaaagccagaaacaacctaagcttccataaataggggactgattacaaatgtacaataatcctatgcaatggaatattagccagccagtaaagtaaaaaagatggagatacatgaactgatagaaagagatgccctaaaaatatcgatgggttaaaaaaggcaagttgcagaacagtacaaataatctgagacaaaggtctcactgtgttgcccaggctggtcctgaactcctgggcttaagtgattctcctgcctcagcctctcaagtagctggaactacaagcctgtgccactatgcctggctaatttgtactttaaaagaatagagaggatgggcacagtggctcgtgcctataatttcagcactttgggaggccaaggcaggtggattgtctgagctgaggagctcaagaccagcctgggcaacatggcaaaaccccgtgtctaccaaaaaaattttaaaaaaattagccgggtgtggtggtgcacgcctatggtgccagctattcgggaggctgaggtgggaggatcgcttgcacctgggaagtggaggttgcagttagtggagattgtgccactgcactccagcctgggtgacggagtgagaccttgtctcaaaaaatatattaataaataaaataaaaggaatagagatacatatgcttatatatgctttttaaaaagaatcagaaaggacacacaagaaaccacgggtagctacccaggcaactggatctgtaggataaagaaggacttgatggagtgaggacttagacttttcatcttacactttcttatactgcttgaatatgtttgcctgaacatgcattatgattatcattacaagaatattttaaaaactcaaataatagggccctgggggagtatcaggaatatggagagagcagaagaggaaggaaatacaggaaaataaggtatactaagttaaatgtgttgtcccccctaaaaaagtcctactcacccaaaacttcagaatgtgacttcatttgaaaatgagggtttttgcagatgtaattagttagggtgaagtcatgctggattaaattggactctaatccaatgactggtggccttataagaagaggtaagagacaccgagacacacacccagggaaggccataagaagacagaggcagagatggagtgatgaatcctcaagaccaggaaggccaagcactgctggtaatcagcagatgctggaggaggcaagaacagatccctccctggagccttcagggagagcatggcccagctgacaccttgatttcaggcttctaacctgtgagaggatacatttctgttgttttaggccacctagtttttggtactttcttacagcagctgtaatgcaaaaggagagagagagaaggctagtgggctctgcaggggtagttgtgaggactaactatttaatcaggtatagtcaccaagtgtatatttatggaagcttgctctgtatctagttttataaaaagaaccaagaaagctctttttctccctggactttgttttatctgtattgggatgtgaacatttctgcccagttgtctccagatttccagtcttggtagagtgtgttgcaaagtgtctccccacagtctcctccactggaaccctgtggggaaagggggactttcatgcagggggccttggcttattatctcagcagctataggggttgagccaacacactctggctcctgccgggggcaggctcctgctgtctgctttccagctgggtgcctgctctttgctctctgattccccctcctgtttggttctctggcccctgctggctgggtcgctgccccctggcatcatcactctgaagccagcagccctgctgggccattcacaggcataccctagtgggggtaaggggcagatgttatttctttgtccccctcccagcaaacacacacacacacacacacacacacacacacacaatctcacactcaatatgtattaatgtcctgggaaggggtccaggcagagagtgatggcaggctacaggctctggggggatgcaaatggaccggacagtgtgtgtgtacattggggggaggcagtggtagtaatggggggttgtcttcagactgcactcctgggcaattacatgccagcagcttcatccactaccagccggcatgcaggctttagaccaccaagaagcctccccatatggccccagcttggccactgaaaattcccagccacattctctggccgatatgctggcactaggccaagaaagttagcctggggtagctgttctctcccctagcacgtgaacacacacacacacactcacacaccagtggggggtgggatggagagttcctttagaggctcatgattcccaaaacaccactcttgtgtagggttcctgccttactcataatcacttgcccttcccatttcccatgttcctctgcaaatccacccacccaaaataccaccataggaaagaaatattcctcttctatattacctcatcaactcctggcccagggctcttttctagggctctacctgtgaacccacacatgcacacacacgcaaacacacacacacacacacacttcttcccatcagatgctgtaaccttatcagaacaaacttagctcctaactctacaaattcaactcgccccaacctccctgcttcctgctactctctcttctttctgccaaatctccttcaaaacctctgtttctttttcttaccctttctaaagtctggactgtacatattgttggtaaaactctgggaaagaagtagtttcctgaggtggtagaagagagggtctctaaacccaactctgactctttctccagcccaaggtggaaatttataagtcaacagaatgaatgcaccccggctgaggctcctccaattgcagggcatctactcagtgttttaggtgctgtacaggcacttacagttgacaaattaggaaatggacatagttgcaaagagttgcatacccactccagaaaaaggacaaagagttgtcttggtaattttcagagagcagagcaggcagtgaggagactagtaggaggcaaacccctttcagaactgcctatgggggtagccaggagagaagctggatgtggacaggggcagggccagtttctaggctgcctgtctgaccctcagtaaagaagagaaggtggggagagggctgcagaagagctgggaggtgtgacttctgctgggccttctctgcccactctctgctccactctgcctagcccagggccgtaaggacactagagaatgggaaggaaaagggagggaacttaggttatggttgggaggtatttattctctgatatccccagttgggagaactcagccctcttggcttagatctgagtttggtttaaaaggagagtatcatcaagataaagagaagtacaaagaaggaaagagcagagagaaacaagaaaaagtggagagtgaaaattagagagagcccagacgaggtgaagtgtaggagagacagcagattcctggaaagtagagtggcccggctatttgtccagcctccaaacccacgtgacagggactgtgaagcagccttgctcacgggttgagccgcgcctccgctcagggaaccctgagcaaatacgccctgatccccacataaagggccaattaactgcgccgtctccgggaacaaatccgctaacagggtgacaagcccctagacgctggcaggccctgtgtttgcggagaggccagccgggagcaaatcagggcattaggaccgggcaggagccgcatggtgggagggtttctggccccctccgccccagagtagggcctggtaccaggacgtggggtttctatcccgattcagcctctgctgtgatggaacccaggtgaccgcggtcagcagggggcggagcaaagggccccggagcctcgaatctcacaggtcagagtagatcaagcactccaattcctccttaacagatgggaaaactgagatccaaagcggtgacgtcttgtacttggcaaacgtagaattagaacccacttctgtgttggtcattcctgaaggatagatttcgggtgggaaatacatcccttactttctctcttatctgaataccaccctggagcgaggaagggaggggcgtcaaatctcttattatcttcttgcttttgaaaggatgtgtctctagcccgtctcccacctaccccagtcctcagcctcagggtctgctcggatttatgtcttccctgggggctccagggccctagtcaggcacctgcagatgaggtgctgaaaaggacagctcccagggcgctgcgtggcggtggggtggggggtccatccggccccacccccactcccacctaccccctcccccacacctagtgcttccagcctttctacgtcccgcccagaactgctagggttggaaggcacctaaacacccatagttggaggctcacagccaggcgcctggactgaggaaggaggcttggaacaagccccccaccccttgacaatgtctcgggttcccttgaacaagctctgcctgaaatatttcaattcttgattctgcttactccagagtctgcgactgtatagcacccacccctctgatctcgacccctttggggtcagaagcagtcgccccatgaaagttgtctcatcccagaacctgacggctgagccagaactctggcactgactcttcaatcagcagggccttacctcaggttaggaatgccccggcctctctctttccctgataccccaaagccatctcctgtctaggaaagtgagtttgtcgaggtgggtcttcaggtagaaagaactccagaaaagtcagaagcagaccgcgactggaagtgggaggtgggagtaggggcccatggttttcttttcgccccccccaggaaggacgactgctatccgatttgaacagatttgcactaattttgcagcaatcccacatgcctttacaaaaataatattatctttgtttttgtcctagaatccttggttccatttcagtctcctcaaaaacgtaaaacaatttaataaaaaatgtcaaagcagggtaatgtaaaaggattcaaataaatgacagttgcctgggtttccctggctttcagtctcctacaggaactcctagattagggcgtttggagcaggactcccgggtcagggcgcgccgctccatcctctggcctcctggctgcagaccaaaggaccagagggcagagaggtggacctgtcttggaattctctgcctactcccaactcttgctgcaaaccaccccagtctcctgcccttccgtcgccaaacccctagacttgggagggaatggaaaccagaactttggcagcaaggagcattgcttgcgctttgcctcagtttccaaaaggttcgggaaaagagaggacagattcctgttctaaagttgggcagaagggcagagtccgacagagcctcgtccctcatcttgggtgctttgagacagggaaaatctctcgccgcgtccagaacggaacgctgggcttggggtgcggggcggggactccaactcgcgcgctacgctactcgtgtctcctgctcggatagtgactgtagaggtaagggtgggagggtggagggaggcggattaatcccttaattacgccgtgatcggcgtggcacctgctttccgcctgcccagctcccaggggactccggcactagggggtggagagaaggacgagggaaggaggagggcacgaagaggcaccgaccgtacccaggcgcaccggcaggagagcggcaccgtggctgccgcagcgcgcagaggctgtggaggggcttacggctcccagcccacgggtctcagacccaggggctgggcccccagcccccagtcccgatcccagctgggtcgagccatgctgcgctacctgctgaaaacgctgctgcagatgaacttgttcgcggactctctggccggggacatctccaactccagcgagctgctcttgggcttcaactcctcgctggcggcgctcaaccacaccctgctgcctcccggcgatccctctctcaacggtgagaccctgcctcttggggatatgggatcctgggatggggatgaggtgagagggcggcgtggaagggaaggagaagcgctcctgtcccgaggtccgggattgagtggcgcctcccagcgcctccctgggtcgtggggtctaagggataatttggagcttcgagcacatgagtgggggtacccgcgggaggtcgagggcttgggagaagatggctactgagtctttttacacctccttcccttcccctacaacgcccaccccaggtgagaagaaccgttgctggtaacgggcagggaagtccgagctaagaaaggcccgggcccagcgcagggagggcagaggagggggcacagtctcccgccggcctcggccaagccaggtcactcggtgacccacccaggcagctggtcttcggaaccccgaagtttcccaagaactcacttaggaccagaggaagccaaaatgctggatgtgtttgctacggaggggataggggcggcgatcattttaaggaaacttagaagtttgtctttcagcggcgggactctcagccggcccaccccggcagagctgtggcgggcgggcggagctggcggcgaggtcgttaccgctaattacggtgattaataaatgactgggacagcgcgctctcccctagcgccgcggggaagctgcgggagccggccgccgccagcctgcggagaggccggagcgcgccccctgcctgccgcatcgggaacccccgctttaccgggcgctttcgcgtgtggttccctccaggtgcacgcggtccccatccctctgcctcgacccactcgagtctagtgacgagcactgtgctggggactcgaaggtggagagaaaggagaccctggcaatatgtgtgtgttcatgtgtggggcacatcaggtgctgagggaggagccccagagcctcattagcatggccattagctattcattaggctgcagtcgaagcatctcctgagaccgggaagggtagagggggaaattccagggaaagggcgcctgcagctgtgtctacaggaattagggggaaaaggccgaccagaagggtgtggtccgtatagaaggattggggagaaagacgatgggggaggagcccgattctccaacctcttgaccctcctagatttccaggaggttaagcacagatcccttctcgctggcaccccgcagagtcccgcttctgctcacctagcgcgtttacagagtgttttcaccatactttgtctcatctaagctcgaaacttagtgaggtatgcaaggaaggtgttgacagacacattttgccgccgagaaaacgctttatagagtgaatggtgccctaatcgtcacaaaagcagcatgaagcaaaacctagcgataacagatcagtccatttccattacacctgagggctataccaaggggaaaaaagaatattggggcctggtagaatttgattcaggtagagactgtaggagccaagataaggtgcatatgctgggaacacaagcccttaaataatggcagagtagtgacgtttatcccccaagggctttacatacattatggtcttagagcaaccctatcactgctctcacatcacaaagaaagaaactgagactgagagaagttaaataatttgcccaagttcttacagctaggaagcgtcaaagtctgagattccagccctggttggttcaacagcaacacttgctctcaatcactccagtgttgctcaccacggggtgttccaaaattgggaatgggaggagatggaggagaagagaagggtgaaaagcagagatttccatttggaagggaggagatggagaaaattactctcccaagtgggacagaaatcgatcttcttgactccaggcaattaaaataaactcagaacagcgccagcacgggtcagcctgtccagctttgtctacaacagaacttctaagagggggggcaggaaatgaaacccaatctcacaggcgggctggaagcgggaggttcctgcagattttggaacagggtaggaaggggggaacaggcggagggggcagggggcagaacagatgcttgaagtggtccctggttattttacagcaggttattaaaggctgcagtggcacctactggccgccacgggttacaaatccacttttgttggctggactaggggctgagagtgccggagtataacaggctccgggatcctaaccgtgctgcagaaggtgaaacaggccaaagtctgcaggccaagtgacaggtaggacagaatatgtggatgaactgatcggagtgaacaggggaagtagaggaacatcaatcagtagaataatctattggaaactatgcacctgtcaggaaaaggagccttactaacatttctactgctatttgcgttcaattcctgtgacttcacaggacccttgaaatgaagcgtgattatccggggtgtcagtaagaagggccctgtgccgattcatagaatccaggttgacaagcccttctaggcccggccctgtcactcccgtcttgcctttcataagggatcccaagccagtccacattcccaatttcactgagccaggaccttgcagaagtcaagaacaaactgttggctccagtgcacggtttatggtctttcactgagcaaggacgatccgtgaaccagtgcaggtggagatggaaaccactgggcaggaggcgagggagcggtctactcgccaagcgtggttcagccactcccgcttaaacttggcaggagaggagacggaggtctctaggtggtccagaaagccggcctagaagtttgtgtcccgatccctctactaaccggcctgtctgtaggcatcttcctttgagacgaggaacgcggaacgtctgccaataaggacatattggatcctgcagagggagagggtaggcaggtggggactgagctccgcagagaagcataggagatggaacgaccagaggattctctttccctctggagcctcaatctctccccacaatttccctgtctgaacgctctgcgccaccccctgtccccagggtcaagggtaggaccggaggacgctatgccccgcatcgtggagcagccgccagatctgctggtctcccgaggcgagcccgccacgttgccctgccgcgctgaaggccgaccccgacccaacattgagtggtacaagaacggggcgcgtgtggccactgtgcgggaggatccgcgtgcgcaccgcctgctgctgcccagcggcgccctcttcttcccgcgcatcgtgcacgggcgccgcgcgcggccggacgaaggtgtctacacttgcgtggctcgcaactacctgggggcagcagcgagcagaaacgcctcgctggaagtggcaggtgagagtcagttgaccgtcagctggttgcttccagagcctggggtaggcgggagggcactgggcaatcagacccagaaccagccccaaaggacttcagcccactcagcatccttctttgggaccgcgacctttgatctctaatggccacaccacggccagagaaggaagtggatctgactccaggctgatattttctcacctgggaacgaattccagtctgcagcgatcaaccccttcccaagacaacactttccctgtgtcctcagccagttatgtcactctacaccctgcttatttcgccccccaccgccccgcccagtcctccgtgatgatttccggcagtctcctggaaacgtggtggtggcagtgggggagccagcagtactggaatgcgtgcccccccgcggccacccggagccttccgtgtcctggaggaaggacggtgcaagactcaaggaagaggaaggaaggatcacggtgagggcgggattatgattggagaccccaacaagggaggggacatagggtagggaggtgacaaggctggagattgagatcagggcattagctaaccagagactaagagtcagctatacagtgagggataaggaagacggaattggtataaaaaaggggcgggggcatgatgccccaggaacttcccatttgatatgtgggtcaacttccttggtctcctttatcagcttgctgtgaggatcaaataaactttatacatatgtatatacacatatattcaccatatatatatacgctgtgatagctgaaatggaccaaagttaccattattgctctgcagatccgtggagggaagctgatgatgtcacatacactcaagagcgatgcaggcatgtatgtgtgcgtagcctccaacatggcgggagaacgggagagtgcggcagctgaagtcatggtactgggtaggcacagggaattttgacattatgggaacaggtagcctgcagagtaagtagccgtgcagacaccctgactgttcactcactaccactccatagagcgtccctcattcctgcgcagaccagtgaatcaggtggtcctggctgatgcccctgtgactttcctatgtgaggtgaagggggatcccccacctcgtctacgctggcgcaaggaggatggggaactgcccacaggcaggtgagagacccccttctgcctgtaggaagacccaacctgatcaagagactattctgccctagaaaaccggaagacaggcacattctcacttgagaacacagagaagtctgttccctagagcctgtggccccagtcctatccagtccccacctccattgatgggtccatgggtaaccagcttctgtccctgctgggtcctgcctgtctttaagtaccttgaccctggtgtctgtcctgggggagagagaaagggtctgtagctgtggccaacccagcctggggtggggagtggagcaggtatgagatccggagtgaccacagcctttggattgggcatgtgagtgccgaagatgagggaacgtacacctgtgtggcggagaacagtgtgggccgcgctgaagcatctggctccctcagtgttcacggtgagggctgtacttgggactgcctgcagcaggaatggtaggaggggagaaggaggatggttggcaagagactgagggagaaagggcagagaagggcatgtggatggaacacctgagacttctgcaaggagtgggaggaggagaacactaaacaggccgggaggaagagatggatatctgctcctgtacacttgagctaagctggagcttctctctcctgttcctgcagtctcctttcttagtgcctctgactacctgttcctttttctcacctgcccttcccagtcccaccccagttggtgacccagccccaggaccagatggcagctcctggagagagcgtggctttccagtgcgagaccaaaggaaaccccccacctgccatcttctggcagaaggaggggagtcaggtgggtggccatctccaaggagcttcccatcagccttcctctgcggctcagcctccctccctctacattctgcaaacttctctctggggcttctgttttatctttgggagcccccagaaacccttgcaggttatttgagaggattaagtaagataatgaatataaaaggcctggaacacattgggacactttttaataaatgataataatacatttagatggtggagaacagtcctggatggtaggttcttagagaatctttctgttttgggcaaggctatcctgaggatgtaacaaattcagtttatctctcctcctttagaccccttgggctttggctttggacataacacactgctctggaaacagtattgaaccaaagctgctcagggtagaaaagtactcgctcttctatttataagagcaacaagggactttcacaaaggagagctcacagtcatcccttttgaaccttgcaaacaaatctcaaaatccagaagcagaatgaacattaactgaagttaccacataaataactctctctaaaggaagggtaggaattttgctactggaaacagggtcagcaagataaagtaagtatgatgagctccactctgttggaaaacaaggcaacctgctacctcattccaaatcgacagccacaattttctaacatcttttctagcacctgggactgctgaattctaattagattctcacatgaataaaaagggtgacggttagtaggggtgaagcaggtgttacccagggtctcagcatggtgccctttgtcctgagacccaaacctgcttccctgtctaatctaatggattatcttccatggatctatggaatgaaaactgttcaagcaggaagaagaggaatgtgtttaccacaacgtgttagaagactttcatatgattacttcatgtgatctttataactatcctctagaagtcaaatttgggaaattggggctcaggcaggttaaacagcttgttcagggtttccccactagtaagtcacggagctgggaagtagactctgaaattgtctaataaaattccctgatgtttttgtgaatacatttaactactttgcccaagttcacatcactgctggagacagacgatgaactagaatcataggaattctctgaattttgagattgacaggaatggggacctctccctgcccagctgcctgctcattccctaccctggttccttgctctgtccccaggtcctgcttttccccagtcagtcacttcagccgacggggcgcttctcagtgtctccaagaggccaacttaacatcaccgcggtgcagcgtggggatgctgggtactacgtgtgccaggctgtcagtgtggctggcagcatcctggccaaggccctgctggagataaaaggaggtacgtgcccatggagataggactggatccatggcttgggaggaaataatggcctaaagtgatgtgtttctcttggagtctatatactatgtctgcaagaggagagatgtgttcctgaggcatgaccttgaagtttggaaaccagcagcagaagccactaataatggctggtcctgggcagagacttcagatgattatcaaagccccctctgatcaccggaagtttcaggggctggggtagggagggtgaaggagcagagaatgaggacaaggggctgcccgtggggccctaagctcctcccctgaggtgcacacgttcttcctctctcagcctctttggatgggctgcctcctgtcatcctccagggaccagccaatcagacgctggtgcttggctcctccgtgtggctgccctgcagagtgactgggaaccctcaacccagtgtccgatggaagaaggatgggcagtggctgcagggggatgacctccagttcaagacaatggccaacggtaccctgtacatcgccaatgtgcaggtgagtgtcacccctggggccctagtagctgagaatggctatctgctccacgttccttacacaagtaagtactcactgggcctgtagccccatctttacccctctgttctctcagagcacctagtatccaacatcttcccatccttctgctacccgcctccaccccctcactggatcttgctccactctcagtttgccagtgctctgccctctcttccaggagatggacatgggcttctacagctgcgtggccaagagttccacaggggaagccacatggagcggctggcttaagatgcggggtgagttttttctttcttcccttattttgataataccttcctccaaacctgcttcaacaggtagtcgatacctcctcaaactccgggattaactttatgtcacaaatgccatggttacggtggtgaggatgagaaggacagtagtggtacccatgggaggcagatgtgagtaggggttcatatactatagcccactctgaccatcaccgcagctcagagctccatagctcccctggtaaggagacaggttacactaggattatcctttccctatctttctacttaaagattatctcccactgcagaagactggggagtatcaccagacccccctacagaacccagttcccctccgggggctccctctcagccagtggtcactgagatcaccaagaacagcattaccctgacctggaagcccaacccacaaactggggctgcagtcacgtcttatgtgatagaggccttcaggtatggagaaagttttgaatgcaaacctggagagttaaaaggaggggatcctatgcccttagggtctttgctattgtgaggtgggattctccagtaccctcttgcaaggggaagacataatggtcgttcatagagagtggatgagatggagtaggcaggttgggagttcctggcttagacaaccctgtcatctccttcttgttgtagcccagcagctggcaacacatggcgtactgtggcagatggcgtgcagctggagacacacacagtcagcggtctgcagcccaataccatctacctgtttctggttcgagcagtgggagcctggggcctcagtgagcccagccccgtctctgagcctgtccgtacacagggtaaggtcagagtccctgggctcatgagcatgaaatgtaacatcataaagcaaccctctcccccaaaaccatgacaccacggcagttcatacagttctttcctgctatgccaggtctatactggtggcccggcctggaataggagatcatgtttgcctctcacagaagagacaagggaggaggaaggcagggagaggggaggagggaagaaggaaagggagagaggtagtcattcattttggcagcttctgacttctgagccttttacccatagataataatatagattattaagactagaagggaccatggaggggccatcttcatcttagagatgaggaactgaggcctttaaaggatgcatgtgtaattatgctagctggacaccgaggcccatgtctggaagctattttcctgaccagtcccctcctgaccatggggtgtgctctggagtactaagtggagcagggcagaggtaggacacgagcacactctcagccctatctccctgtccctggtggcctctgctgaatgggttccttggtcaacagatagcagcccctctaggccagtggaggacccatggagaggccagcagggactggcggaagtggctgtgcgcctgcaggagcccatagtcctgggaccccggaccctgcaggtgtcctggactgtgagtgtggtatggggaggagattcagggtggggatgattatgaggcacatgagggcctccaagagtgagtatgggagagtgggaggtgagtggctggggaaggcggcatgagtgggaggaggggctgggcctggatggcctggagggcctgtatggccccagcctccccttctggtgtgccttgtcctgtctcccacaggtggatggcccagtccagctggtgcaaggtttccgggtgtcttggagggtagcaggccctgagggaggaagctggacaatgttggacctacagtccccaagccagcaaagtactgtgctaagaggactccctccagggacccaaatccagatcaaggtgcaagcccaaggccaggaggggctgggggctgaaagcctctctgtgaccaggagcattcctgaggagggtaaggagggccaccgaacagatggatggacaagagggaagaaggggtgggggtggaggtggaggggggatgaaaatttgcaggaggagagcagggtgagtgggtgggaaggaggaatggctctcagttccctaagatgttagaacagggagggggaatgttggggcaggaggggcagcttgcaatgactatttgtgtccttctcaccatgctccaccctggcccagcccccagtggccccccacagggagtggcggtggccttggggggtgatggcaacagcagtatcactgtgtcctgggaacctccactcccctcccagcaaaatggggtcatcacggaataccaggtagagggattgaggagggactggatgggagggccaggccgggagggagagggaggacctagtggctagaattagggtggaggaaatctattacaggtttggctttagggttggggatgagtttaggggagaagagagaggtttccaagtgttgtttccaggttgaattacatctgtataaggcttctctaccatttggagccttaagtttcccggtgaggctaagaatcccatttctgactctaaatccgggactcggcctccctagatctggtgcctgggcaatgagagccgctttcacctcaatcgatctgcagcaggctgggcacgctccgcaatgctccgaggactggtgcccggtctcctctatcgaaccctggtcgcggcggccaccagcgcaggcgtgggcgtgcccagtgccccagtgctggtgcagctgcgtgagtccacccgagggcagtgctgaggatcttgacgggggcggggcaagccccccactggggtagctgtgcctgccgggtcgggaatgaccctttcccagttccagggtttcgggcccctcctcccctcacttctctgacccccacagcgtccccgccggacctggagcccgggctggaggtgggcgcggggctggcggtgcggctggcgagggtgctgcgggagcccgccttcctcgcgggcagcggcgcagcctgcggggcgctgcttctcgggctctgcgccgccctctactggcgccggaaacagcgcaaagagctcagccactacacgggtgagctcccggcctcggagcggacggatccgggagggagccaggcggcccatggggaggggcaggggcttagccgctggcgagtgaggaccgggtcgggagaaaggggtcgcacctggagttcagcctcttgggtaggggcgggatacgtggggcgactcgaggagctgccaggactagggagggctgcgggccaagacggggcgggatctggatgacgtttgcctctaagacgccacgaggaggccaggctttgcaaccatctccataaagaaggggcaagttcgaggacggaaagcccactcaaagggcggggggcggggcctggcaagagggggtgtggccaggatcccaggcagtaaattgtgcggcggggtctggatggaaaggcggggcccgctgaaagaaggcgatccgagttctgctacttcctagtaagggacgtctctggagagattctgaggtgtttgaggtcagtggttttcaatcttggttggctacacataggaatcacttgaggggcttgagaaaaataccgacacctgagtcccacccccgagaaattctgatgaaatgggtccagggtgcagcctgagtggtggaactgggaccggggcctaggcgtggacaagtataggggtatttctgacccttctcctcatttcacctcttctttctcccacgggttcctttctggaagcctcttttgcctacacaccggcaggtaagccatctctgccccagtggggttcagaccccccgggacgggcccttctctcactcattcgccccctcattttccccagtgtccttcccgcactcagagggcctctctggagccagttccaggtaattctcttagcccatttcctcaggatgacctccaccgacaggccactcttcttccgccccgctgacgccccaggtggagggagcatggccacctcccaccccaacaccaccgccactgtcctgaaactcccgaatatcgccacctccctttcctttgctggcctcttcaggctctccgtccccaacgctcacctgctctccctcaggccacccatgggccttggccccgccccctactcatggctggcagattcgtggccccacccatctcgaagcccctcggcccaggaacccaggggaagctgctgccctagcaatcctgacccggacgacagatattacaacggtgaggagttctcattccctcacctggcttcagcgcacttctcccgacctactggggcaaaccgaagggcgcccgggagcccggtctctctgaggttggtcagtccctggggaggatgtgagctggggaagcctctcagacctacctccaccctggtttaggatgtaaggcttgtgtgggggaagaagttgatcccgtgggatttccctttgtcttccattctgttgtcctctatgtttctgtctctgcttccgggcctccctctttcttctctgcagaagcgggaatctccctgtatctagctcagacggccaggggcacggccgcccctggcgagggtcctgtctatagcaccattgacccagcgggggaggagctgcagaccttccatgggggcttcccccaacatccctcaggagatctgggtccctggagccagtacgctcctccagagtggagccagggggacagtggtatgactccaactcctgaaaccccgtttagccctgaccagggtatccccaaagaggatcctcctccctgaccctctggcacctagcccggcacttccttctgacctgtctcatctctggctctttcctgcctgttctccgggtgtccccatcctattctcctcaggagccaagggaggcaaagtgaagcttctggggaaacctgtgcagatgccctctctgaactggccagaagccctgcccccacctcctccttcttgtgaactgagctgcctagaagggccggaggaggagctggagggcaggtagagatgctccctgcttccaggcccacacacctgcggccagaccatgggctgctggggaggaaggggagggggcagcaggaaggccaacgggaaggtatggaagcagctgagccctttccttctctcctgcctctttgatcccagctcagagccagaggagtggtgcccgccaatgcctgagagaagtcacctgacggagcccagctccagtggagggtgcctggtcaccccatcccgaagggaaaccccctctcccacaccttcctatggacagcagtccacagccactcttacaccctcacctcctgaccctccccagcccccaactgacatgccccatctccatcagatgcccaggtagggaggtatatagtacctcactcattgcaagccctctatacgtatctactcagtagatgactgggtgggtggatggatggatgggtggatggatctggggtacagaggtctcagggctgtgtcagggtggaagtgtaatttgggcaggaatatggaggctgacaagatctctcatgcccattagactggctcttgctggagtggtcagcactctacctgagacatttcagatatggctctccttatgcttctctagcttgggaggacttacgggcggacgggttgtgtctcgtttatctgttaggttgattgtctagcacagtgccaggcacatagtaggcattcagtttttgtggagggaacagaggctgcggcctcctgtcattgcaggagggtgccccttgggccgagttcccctctcagtgtatcccagcccatgctgggcatccgtgaagcgaggcctgctggcttgggtgctggccctgcagcctcaccccacctcagccccagtcctgcccctagcacagccagcagtgccccaggtaagtctctacaacctccttttgccccccggctccctccagtgcttgcttccccttcacccttaggcctttttcctgatttttgcccttacccattcctcttcccgtctcctaacactgcaggcagaacctggcaggggaatggggagatgactcccccacttcaaggaccccgtgctcgattccggaagaaacccaaggctcttccctacaggagggagaacagtcctgggggtgaggggggatgcacctgggagatggtgacagtagtggcggggggataggcaggaaaccaagggtgcactctgggggctggaggagggaacaggtgaaccccaatcttgggctgttcattggcagcctcctggtgccagggaatgcaggtgagagaaagattagtgacaggagtggcaggaggctccgctgaaaacagctccctccccagacttgcccccaccacccttgccaccgccagaggaagaggcgagctgggccctagagctgagggcagcaggcagcatgtcctccctggagcgggagcgcagtggggagaggaaagcggtccaggccgtgcccctggcagcccagcgggtgctccacccagatggtaagcagggccagggcaggcaggagggctgctgccacaggagactgtgggctttgggactgggggctgatagtagaccagctcagccctccctttagttaggttcatgcatttgatccacatcaaactcccctgtctctctaactctctgagcacaatcccctgaagtcccaagttgtgttctttcccaggatggaagcccagataagaggactgggctctaggtgctctgtccccgctccccacaaggctccctctgattgggagctcccccgcagcgttctgagcacccatgatgtcaaggccatgtgccggtcactctgctgctcctcagccccaggctggctgagccctgtgcctgcccttcatcttcttccagagctgagcttgtggtcagggtggcagggtgggtgacagggaagttctgcttcctgcctgcacctggctacccttccctcttgtgctgcagaagaggcctggctcccatacagcagaccaagcttcctgtcccggggccagggcaccagcacatgttccacggccggcagcaactcttccaggggctccagcagctctaggggctcccggggccctggccggagccggagtcggagtcagagccggagccagagccaaaggccaggacagaaacgccgagaggtaggggccatagattgcagaaaaatgagggcagaggactagggaagggtggaccaaggcgtaatggaaaacaggaaggtgggcaagggcttgtggaggagtgtcaaaaggaggggatcgagagggtgagggggagggaggaatcctgtagaagtgacaaggggactgagcgtggtggctcatgcctgtaatcccagcactttgggagaccgagatgggcggatcccttgagctcaggagtttgagactagcctgggcaatatggtaaaatcccatctctacaaaaaatacaaaattagctgggcgtggtggtatgctcctgtagtcccagctactcagggggcttgaggtgggaggatagcttgagcctgggaggtcaaggctgcagtgagccatgatcacaccactgctctccagtctgggcgacagagtgagactctgtctcaaacaaacaaacagacaaacaaaacaaaagaaatgacaaggggtgaggacaagatgacacataatagaggagcctgggctcaccgtaggagaactgggttaggagagagaaagcctgagcccttcctggacttgtttgccctgggccagggttttacaaaacagcatctctctctctctccctaggaaccaagatgacccttgttggggcattgagaatatcatgagtgccacggggaaggggagtagggatgtcttttcccccccagcagtgatgagtggggctagctgaagcccattggtttccacgatttcaattggctgagaaggcagagagctagctcctccctttctttctttttccacctgagacttgtttataaaaaacaaaacaataaaaagagtctgatcagagcccagggccctgtctgtctggttctgtgcagcaggttgggaagaaggggactgcagggtcctgtatatcaacgcacactggtagcttctgcttccccttccactccgtcaaaagcactaagttaggccaggcacaatggctcacactcataatcccagtgctttaggaggctgaggcaggaggatcatttgagcccaggagtttgagaccagcctggccaacctagaaagaacttgtgtctacacacacacacacacacacacacacacacacacacacacacaaaaataaataaataaataaataaataaattagccaggtatggttgtgtgcacctgtcatcctatctacttgagaagctgaggcagtagtattgcctgaacccaggtgttggaggttatagtgagctatgattgtgccactggacttcatcctgggtgacagagtgagaccctatctcaaaaacaaacaaacaaacaaaaaactgaaaaaacactaggtggggactgtaccgtcctgcttcttaaaggagtaagaagctcactgttcccgagttacaaccatagagactttccaaatgcccagtaataagacacatgttccacctttggaaggtcaagccaggcccttctttagtgccctcctctggggtctgtctactttcccacaagaaaatacacccctcacaaaaaattattttgaaaaactcaaagaaaggaggagcttatgggagaaaccccaggcaagaaggaagagcatgctttttcaaaccatctgactccgtcacagagggtatgtacaaatgggcagctcttggtgggcccagatgtgattgggttgatgggcacagaactgttaagacttttttgtggtgaatgccgtggtcctcgtcacctcctgccctgcatcccgtgtgctcactggtgacctgaggttttgttccttctcgcttgctccacccttgactcagtgacttccctggactctctgggattggcagctgccctccagtcccaggccctgacctcgtctgcccctttgacctgtgagtgtacaaatctctctttccctttcagtctggcaaacagggttgggatgttttcaaaaggaattttaccaggaagctaaaaagaaaccaaaacaacctcctccccgcaactgccacaaaatccagataaggaaaagcaaatacagaggaacagatgtgtatgtggaatactgattcttcctcctgagatcacaaaaatctggcccagactgtcctgattaatgtggttcaggaagcccccagtccccatggtcctgcctcattcagcctctcaactcccagtggcctccaagtagagctgctgggtttgagggatgagcacccccttttaggctctgcttcctgtggccctgtcatgctctgtagcatcccctccaccaacttgtggattctgcccccgacctttcccgccaagggaggaagacgcaggcctgcctaccctccagtgcctcctgtggctcaggccctggaagtcctgcttcgaggttcatctctctgttctgtttttttctttgaagggtgttcctaagccaaccgtgacaggtggttctaccttttctggagttcagctgctttgtctattttaagaaaccatctgggactgctgaaagcagttttctcctcaggatgggtgaaatcaaggggttaatttgatcaagtctgcctgccctgcttgctttttgttttttccctttttccatggagcacaaagcttctttggtagctgaaggcctcgctgctgaatgtggaaacaaccttcactggctactttataggtaacattcataggtcactatgagaatgggcgctacagtcatttttcaggaacttgggacagctcttgtccagctcaaaccaatcgagaccaccgacttttctactgggcctctgcaagtgctcgaggggtggccttttgacatcggagggccaaaaactccaccctcagatcataacacaaccattttcttttcttttttttttttctttttttttttttgagaccgagtctctctctctcacccaggctggagtgcagtgggcgatctcggctcactgcaagctccgcctcccgggttcacaccattctcctgcctcagcttcctgagtagctgggactacaggctcccgccaccacgcctggctaattttttgtattttttttttttttttagtagagacggggtttcaccatgttagccaggatggtctcgatctcctgacctcatgatctgcctacctccgcctcccaaagtgctgggattacaggcgtgagccaccgtgcccagccagcaaaacaattttctacacaaatgtccttatgaaatgccatgaaccccaagtacacttgggcagaatgaacctattacttcattttccccacagccaatcacccttccccatgccttagaccatcccacttccctcagccataaatatccctaaggcttatcttgaggaggtggatttaatataagttgccaggaccagcagaccctgaaactccccacccctgcccttcctatattctgcttaaaatttggtggatgaacctcattctccctttaattgcagaacagaaatgtgtgacactccctgagtgtcaatgaatgcctgatccctgcctaactcaggaaattcttgccatctctccaggtgctcccctaaaaatggtgctccggggaatgatctcacagaactcaagtctttaccattttatggtatcaaatttcttaagctcatagtgacaacagtacgaggatggtgcttttgacctacggtctcatacctcccttccttcagcatcctcgctagacccagccttgaaccctttgtttggcatgaggtagggcctcagtgcctcagtggcattcataattattttctttccatggtgaggttgggagagagttgagctcttctctagaggaggggcccaggtaaggctgagagggggctccgagaagctccttcctccacagccctctcccagcagccactgctgtcctccacaaaggcacctctggctcctccacttcctgtgatccaaatggtgggggaagagcagcaggcagggctgctcctcaggccaaaacaacctggtggtgggagtggatggcacagaggagaaagcagtggctaggagtcaggtggagatgatgttttgctccctgagggctccaggtcagctttgctctaattttgttttcatttgttttcacaatcgtggagggagaactctctggaggcttgggaaggtggaccccagctgcagagaaacacaggccaagacccacacaccacagcccaggtcttgtgggtggacaggagaagtggttctgattcccgtctgggaagtctcagggacacggttcaggagtaatctacaggagaagctgaaggacagtggagttatctcccttgctccttatctcccttccccagtgccaggcttcctcctggcttcttcccagaggccctctggtcaagatgaacacattagccaggaagacagacactcaccaccagccttgggcatacgacagtggagctgacttctctgggaagagatctgagagtcagggggccagggaggcatcccccttcccagccgctgggtgtggctgacctccatgtcttccaaccagtctggcctccactcccacaggggcagggagaggttgggggtcaggaagatctcatcccgtggggagggaggtgatgaggcatctgtcagggagggtagaggtgtctgtgggaggttgaccttcagcccctaggggccagtttagtacagaaagcttaggaccagctcagggcatgtacccagccctaaacataacctaaccccaactcagcccatcagtcccagaggccacatccccaggggcccgatccatttgtttctttagggagaagtgattgaactgtttccttccagcccagctctggccttctatctgcactgtcccttcacatccccattccctgggcattcttcttctgccatcatgggcacttctgtcctggataatccttgccctcccatttaccacaagcctgttttttttttttttgtcggggcaaaggatagagttaaggttagtaaaatggggatgggggatctgatggtgcatgtggggaagggacacccaaggagccaagaccctgtactaccttctgctgacatggagataaaggtcccactctgctgggaatgtcagaggtgagcccagtggctcgtcagccccagccacggacagggcaggaggatgggattggaagaggatggagcaacctttcctggagactcaagtcggggtaagaggggagtcctagaggcagggaaatggacctacagttggctgcctttagaactggacaatttgggccaggctcagtggctcatgcctatactcccaacactttgggaggctgaggtgggtagatcacttgaggtcaggagttcaaaaccagcctggccaacatggtgaaaccccgtctctactaaaaatacaaaaaaattagctgggcatggtggtaggtgcctgtaatcccagctactcgggaggctgaggcaggagaatctcttgaacctgggaggcagaggttgcagtgagctgagatcatgccactgcctgggcaaacaaacaaaacaaaaacaaacaaacaaacaaaaagaattggacaatttgtccttgttctgtgggtgaacttgggcaagccaataaaattatctgacttacagtttcctcattaggataagagagataaagaatattccacatagactttcaatattaaatgtatgcaaagcacttatcatagtgcctgagatacaataatcattcaataaaactagttgttttaacaatgatgacatgataacagttgttagaaaggcaaggggcatgagtgaggagtaagatggggagacctcacatacctatgaagacgcagtctgcctccctgggctctagaccgaaaccaaagctatccacagccactgccagggcccgggcaaagtgagcatcagcgaggaaggagccatcggaggagctgacaaggctggctctggcgctggcggcattgtcctcagaggctgagccccaaccattggctaaggagccctcgctgggggtgggggtgaggcagggccgaggtgggcacagcaagactccccccttgggccccacccctcctccagtcctgcccatgtccgtgaactctgaggctgttgggacgctgatgtacccataggtggtggggggtgaaggagcccttggcatgggagagacgctgttcctagggagaggcaaaaggggagacagcaatggtttgggtggaatgagggttgtagtaacagaaaagccccagttgagggagggcggaatgggtggagaggcgcttgcccccacagcttttctgtagttctttggttatctctcaagctactcacctgggagtctcctcaccctcactgagttccaagcacagggctacctcctcaggggtcagcacgctgtcttgatcctcccccagggatgacagtgaggagctggacaggcgactggaagctgggctggggccagagagggaagaggcctgggggctagggggactgcaggggctaaggatggggatgggggctgctggcagcaggatggaggagggagcctgtggtgccaccggaggcctgatttgcgggagagagtgatggcaccgtagttactacagctcttcaagtcctttccccccttccccagcctgtccaatcccggcacacactccccacacccccactctcccagccctgcttcccgaccccatgccctcttactgggtctgttgactctgagttgggggagtttcatgaggaaagaggggtgctggagggagatgacgagtaaccagctcatttgaggagctgaggagtttcggtcccagggcccgccaggcaaccagagcttggggcacagctcctggggaagagaagcctgggtgtgagaacagtggcatccccatctgctctggagctcagcctgccggcctgcccaccagcccccttagctacctgtccactactccatccaaccctcatcagcctcctcagggaaaggaggatgagcccgtgggagggccctgggctggtaagcccctgcatccctacaccctatctcaccccttcacttccctttcagggaccccctctcacctgggctttgggaaaggttcttggaacctctatttcctaactcacaggcccggagctccaaggagtggctgccccggagcagtggggaactgttggcatgctgcagctctgcaaagaaagggttggtggttgtggggcccaggatggacttttcagaccccagctgctggctctatcttcagccttattcaattcagcctgcacgaccctgaacccagagaaaagagggggaaccccctgaatcccctccacacccccatcttcatccagcagctgtgatagggtagaaggagcactaggcttggggtcaaaagacctgcccagctcagctgtgtgacttcagggcagtccatgtacctttctgagtctcagtttcatgtgtaaacaaccacttcgaatgatggtcttgacaattaagtaaaaacagattgcacaagttcttggccttgatagatgctttaaaaaacaactttcttttccttgactgtattcattccaatcttcctgatctctataccctcacattgctactctcatgaattttggctcagtaagaaaaatactccttcttttcttggacagaatctattaatttccatttctcacattgcaaatatctcacatggctctggatagccctgctctgggaaactcgactgtctctcacttgaaagatggggtagactgtcaggttgagctgagtgggtaggacaaaaacagggatcgacacacaatgttggctgtgacaggagacagtcagctaataggaagaggaacttcagagtgggaaaaggtattggtctatcccagggacgcaatgccctgcccatactttttgttgaatgaaagagtgaatgcatgggtgatatcagaaatgtggatataaacacacagtgagaagagtcacctagaagatggaagctgtcatctggcccacatgggcagtggagagacagggctctgagtgaactttcacaacagagaagctggaaactaaagagacagccctaactatgtgcaatgacctgtgagcatgcttcttggtcagaccagaatgcaaaagggatctaagtttaagccagagaggaatagggtaatacaggagagagatttttccaggagcaggaacctgaagaacatcagacaaaggagaaaagaaacagcctttagattagtgtcccatgaccagaagcccagctaggaaagagtttcccctcttggtggaccagggaccaggcaggaccttcagggtagagctatctagtcagtcacatatcagagatctgggggccactacgggcagcttcagagaagggaagtgagccaggctttggcattgaccaagaccccatttatgtactagtggccagaccttctgatcctttaggatgaaaactcatcaatgactagactccctccgtcaaagtttcctttggtactttggctgtttggtttttattgattttctatagctttcatatgacccaggtaatctggggagccaacttcagggttggtgcaccaactctgctatcatcagctatgtcttgtctggtgcctggcttcttgactaagctcagaaatatgagcacaagttggttggctggtttgagtggaaagggaaagaaaacagccaggcctggaaaaggccacttttatcctagcctgtttcacttcctctaagggactctggtaacaaaagccctcctcctatgttgcttggagttacttggactttagtttcaattctaattgaataaactggacaagaaaaatgttatcaaggtgaaaggttgaaactcattggtcaaattgcaataaatatttgtttgaataaaataatgaatgaatgaggatattcagtgcatatatctggcaaactgagcagaactaagaacctgctatgatggatgagagacaggagactgtaattgtgaggatatcagcactggagaagaaaccccaactaaggccaaataataagaaaaaggaacaagcaggtcaaggggagtgggtggtactgggagagcctgccagttttagaagaggaagaaacagcagtagaatcaactccatgggtctggagaagaccatagcatgatcttgttgctgctgaggtcctgggaggtagaggtagaatatctagtgtctaccagccaaggagtcgctgcagttgacctatcctgggggcagtggtgagatggggctggagcgaggagaaacagggagtgaagtaaggacctaaaccacaggctaggaagcctcatctcagaattggaacccttcttaagaactggctgtagaaaaccactcacctctttccagtagcattactgttctaagaggggctatccattccattaaagttggtgtagttctccctgggaaggctgttttttaaatgagactattccaccttttttttagctggtgtttcgttaccaccaaggatttataatgcaatagctctgaggcaaagctggtaagaatgccagcttcgctgatatttacagtcataaaattctggatattgaacaagctgttaattatcttaatccatctttgtcttattaaaagttggattaaatccacttaaaaaaaagacttggctgtagaacatttgttaggtcttactaattagtacagaagactcaagaagacagcaggtagattgcaggccaatgttctgcaggccagaaataggaaaaaatactcaaagagagaataggatttcctgagggagctccagagagactcagaatcacttcagaggcagactatcctgccttcagatttgagtcctgcagctaattacttgcagaattttgaaccagtaactcaatcattctgaccctcttcctgtctgtaaaattagagaaatagtagctagccaatctattgtgaggattaaatgaaataacaaacataagtaaagcacctagtatatagcaattgataaaaaatggaggctataattatttttctctgaaaagtctaagaatgcagctgggagtcaggagataaacctgtccagaaaggaaatacccattcctctctgagaagtgagttgggagtcggtgcccaagcacacctgtacatagtacaccaggagatgagctcgtgggagcctgaggctttgtgccagcactggtcacattcccccaggctctagcattacttgtttgctagtcaacactttcgttagacaggccctgagcccttagaagtcaggggctgtgtctgacgtctcttgtgttccccatgtttggcatgcagtggtgcttattaaacgtttgctgagttgaattgagtgcagaattagggctcactgctggtgtagccaaactgaaacaagagcacagtgcaaaaagctgaggctattgcacccctagctgagtgctctggtggtaggagaaagaggtcttgtgtccacctggagaggagaatggaaggagggtgtggaggttgcacgcccctccaggctttgaggccttgttcccatcacattcccattcctgggcccgcctaccaccagctcagtctatgtctattctccccctccttaccctgcttctttttggccttccaagcctctgcaggggccagagacaagcggggagaagagagtcccctgcggctgcagaggctgtctgagctggaacaggggctggagagctgggccagctggggtgggaggcgcctgacagctgggacctggggacttggcctggctggggtactg

SEQ ID NO: 109 - DNA, 4381 bp, Homo sapiens
atgctgcgctacctgctgaaaacgctgctgcagatgaacttgttcgcggactctctggccggggacatctccaactccagcgagctgctcttgggcttcaactcctcgctggcggcgctcaaccacaccctgctgcctcccggcgatccctctctcaacgggtcaagggtaggaccggaggacgctatgccccgcatcgtggagcagccgccagatctgctggtctcccgaggcgagcccgccacgttgccctgccgcgctgaaggccgaccccgacccaacattgagtggtacaagaacggggcgcgtgtggccactgtgcgggaggatccgcgtgcgcaccgcctgctgctgcccagcggcgccctcttcttcccgcgcatcgtgcacgggcgccgcgcgcggccggacgaaggtgtctacacttgcgtggctcgcaactacctgggggcagcagcgagcagaaacgcctcgctggaagtggcagtcctccgtgatgatttccggcagtctcctggaaacgtggtggtggcagtgggggagccagcagtactggaatgcgtgcccccccgcggccacccggagccttccgtgtcctggaggaaggacggtgcaagactcaaggaagaggaaggaaggatcacgatccgtggagggaagctgatgatgtcacatacactcaagagcgatgcaggcatgtatgtgtgcgtagcctccaacatggcgggagaacgggagagtgcggcagctgaagtcatggtactggagcgtccctcattcctgcgcagaccagtgaatcaggtggtcctggctgatgcccctgtgactttcctatgtgaggtgaagggggatcccccacctcgtctacgctggcgcaaggaggatggggaactgcccacaggcaggtatgagatccggagtgaccacagcctttggattgggcatgtgagtgccgaagatgagggaacgtacacctgtgtggcggagaacagtgtgggccgcgctgaagcatctggctccctcagtgttcacgtcccaccccagttggtgacccagccccaggaccagatggcagctcctggagagagcgtggctttccagtgcgagaccaaaggaaaccccccacctgccatcttctggcagaaggaggggagtcaggtcctgcttttccccagtcagtcacttcagccgacggggcgcttctcagtgtctccaagaggccaacttaacatcaccgcggtgcagcgtggggatgctgggtactacgtgtgccaggctgtcagtgtggctggcagcatcctggccaaggccctgctggagataaaaggagcctctttggatgggctgcctcctgtcatcctccagggaccagccaatcagacgctggtgcttggctcctccgtgtggctgccctgcagagtgactgggaaccctcaacccagtgtccgatggaagaaggatgggcagtggctgcagggggatgacctccagttcaagacaatggccaacggtaccctgtacatcgccaatgtgcaggagatggacatgggcttctacagctgcgtggccaagagttccacaggggaagccacatggagcggctggcttaagatgcgggaagactggggagtatcaccagacccccctacagaacccagttcccctccgggggctccctctcagccagtggtcactgagatcaccaagaacagcattaccctgacctggaagcccaacccacaaactggggctgcagtcacgtcttatgtgatagaggccttcagcccagcagctggcaacacatggcgtactgtggcagatggcgtgcagctggagacacacacagtcagcggtctgcagcccaataccatctacctgtttctggttcgagcagtgggagcctggggcctcagtgagcccagccccgtctctgagcctgtccgtacacaggatagcagcccctctaggccagtggaggacccatggagaggccagcagggactggcggaagtggctgtgcgcctgcaggagcccatagtcctgggaccccggaccctgcaggtgtcctggactgtggatggcccagtccagctggtgcaaggtttccgggtgtcttggagggtagcaggccctgagggaggaagctggacaatgttggacctacagtccccaagccagcaaagtactgtgctaagaggactccctccagggacccaaatccagatcaaggtgcaagcccaaggccaggaggggctgggggctgaaagcctctctgtgaccaggagcattcctgaggaggcccccagtggccccccacagggagtggcggtggccttggggggtgatggcaacagcagtatcactgtgtcctgggaacctccactcccctcccagcaaaatggggtcatcacggaataccagatctggtgcctgggcaatgagagccgctttcacctcaatcgatctgcagcaggctgggcacgctccgcaatgctccgaggactggtgcccggtctcctctatcgaaccctggtcgcggcggccaccagcgcaggcgtgggcgtgcccagtgccccagtgctggtgcagctgccgtccccgccggacctggagcccgggctggaggtgggcgcggggctggcggtgcggctggcgagggtgctgcgggagcccgccttcctcgcgggcagcggcgcagcctgcggggcgctgcttctcgggctctgcgccgccctctactggcgccggaaacagcgcaaagagctcagccactacacggcctcttttgcctacacaccggcagtgtccttcccgcactcagagggcctctctggagccagttccaggccacccatgggccttggccccgccccctactcatggctggcagattcgtggccccacccatctcgaagcccctcggcccaggaacccaggggaagctgctgccctagcaatcctgacccggacgacagatattacaacgaagcgggaatctccctgtatctagctcagacggccaggggcacggccgcccctggcgagggtcctgtctatagcaccattgacccagcgggggaggagctgcagaccttccatgggggcttcccccaacatccctcaggagatctgggtccctggagccagtacgctcctccagagtggagccagggggacagtggagccaagggaggcaaagtgaagcttctggggaaacctgtgcagatgccctctctgaactggccagaagccctgcccccacctcctccttcttgtgaactgagctgcctagaagggccggaggaggagctggagggcagctcagagccagaggagtggtgcccgccaatgcctgagagaagtcacctgacggagcccagctccagtggagggtgcctggtcaccccatcccgaagggaaaccccctctcccacaccttcctatggacagcagtccacagccactcttacaccctcacctcctgaccctccccagcccccaactgacatgccccatctccatcagatgcccaggagggtgccccttgggccgagttcccctctcagtgtatcccagcccatgctgggcatccgtgaagcgaggcctgctggcttgggtgctggccctgcagcctcaccccacctcagccccagtcctgcccctagcacagccagcagtgccccaggcagaacctggcaggggaatggggagatgactcccccacttcaaggaccccgtgctcgattccggaagaaacccaaggctcttccctacaggagggagaacagtcctggggacttgcccccaccacccttgccaccgccagaggaagaggcgagctgggccctagagctgagggcagcaggcagcatgtcctccctggagcgggagcgcagtggggagaggaaagcggtccaggccgtgcccctggcagcccagcgggtgctccacccagatgaagaggcctggctcccatacagcagaccaagcttcctgtcccggggccagggcaccagcacatgttccacggccggcagcaactcttccaggggctccagcagctctaggggctcccggggccctggccggagccggagtcggagtcagagccggagccagagccaaaggccaggacagaaacgccgagaggaaccaagatgacccttgttggggcattgagaatatcatgagtgccacggggaaggggagtagggatgtcttttcccccccagcagtgatgagtggggctagctgaagcccattggtttccacgatttcaattggctgagaaggcagagagctagctcctccctttctttctttttccacctgagacttgtttataaaaaacaaaacaataaaaagagtctgatcagagccc

SEQ ID NO: 110 - protein, 1378 aa, Homo sapiens
MLRYLLKTLLQMNLFADSLAGDISNSSELLLGFNSSLAALNHTLLPPGDPSLNGSRVGPEDAMPRIVEQPPDLLVSRGEPATLPCRAEGRPRPNIEWYKNGARVATVREDPRAHRLLLPSGALFFPRIVHGRRARPDEGVYTCVARNYLGAAASRNASLEVAVLRDDFRQSPGNVVVAVGEPAVLECVPPRGHPEPSVSWRKDGARLKEEEGRITIRGGKLMMSHTLKSDAGMYVCVNMAGERESAAAEVMVLERPSFLRRPVNQVVLADAPVTFLCEVKGDPPPRLRWRKEDGELPTGRYEIRSDHSLWIGHVSAEDEGTYTCVAENSVGRAEASGSLSVHVPPQLVTQPQDQMAAPGESVAFQCETKGNPPPAIFWQKEGSQVLLFPSQSLQPTGRFSVSPRGQLNITAVQRGDAGYYVCQAVSVAGSILAKALLEIKGASLDGLPPVILQGPANQTLVLGSSVWLPCRVTGNPQPSVRWKKDGQWLQGDDLQFKTMANGTLYIANVQEMDMGFYSCVAKSSTGEATWSGWLKMREDWGVSPDPPTEPSSPPGAPSQPVVTEITKNSITLTWKPNPQTGAAVTSYVIEAFSPAAGNTWRTVADGVQLETHTVSGLQPNTIYLFLVRAVGAWGLSEPSPVSEPVRTQDSSPSRPVEDPWRGQQGLAEVAVRLQEPIVLGPRTLQVSWTVDGPVQLVQGFRVSWRVAGPEGGSWTMLDLQSPSQQSTVLRGLPPGTQIQIKVQAQGQEGLGAESLSVTRSIPEEAPSGPPQGVAVGGDGNSSITVSWEPPLPSQQNGVITEYQIWCLGNESRFHLNRSAAGWARSAMLRGLVPGLLYRTLVAAATSAGVGVPSAPVLVQLPSPPDLEPGLEVGAGLAVRLARVLREPAFLAGSGAACGALLLGLCAALYWRRKQRKELSHYTASFAYTPAVSFPHSEGLSGASSRPPMGLGPAPYSWLADSWPHPSRSPSAQEPRGSCCPSNPDPDDRYYNEAGISLYLAQTRTAAPGEGPVYSTIDPAGEELQTFHGGFPQHPSGDLGPWSQYAPPEWSQGDSGAKGGKVKLLGKPVQMPSLNWPEALPPPPPSCELSCLEGPEEELEGSSEPEEWCPPMPERSHLTEPSSSGGCLVTPSRRETPSPTPSYGQQSTATLTPSPPDPPQPPTDMPHLHQMPRRVPLGPSSPLSVSQPMLGIREARPAGLGAGPADHLSPSPAPSTASSAPGRTWQGNGEMTPPLQGPRARFRKKPKALPYRRENSPGDLPPPPLPPPEEEASWALELRAAGSMSSLERERSGERKAVQAVPLAAQRVLHPDEEAWLPYSRPSFLSRGQGTSTCSTAGSNSSRGSSSSRGSRGPGRSRSRSQSRSQSQRPGQKRREEPR

SEQ ID NO: 111 - DNA, 1968 bp, Homo sapiens
ctcccggcctcggagcggacggatccgggagggagccaggcggcccatggggaggggcaggggcttagccgctggcgagtgaggaccgggtcgggagaaaggggtcgcacctggagttcagcctcttgggtaggggcgggatacgtggggcgactcgaggagctgccaggactagggagggctgcgggccaagacggggcgggatctggatgacgtttgcctctaagacgccacgaggaggccaggctttgcaaccatctccataaagaaggggcaagttcgaggacggaaagcccactcaaagggcggggggcggggcctggcaagagggggtgtggccaggatcccaggcagtaaattgtgcggcggggtctggatggaaaggcggggcccgctgaaagaaggcgatccgagttctgctacttcctagtaagggacgtctctggagagattctgaggtgtttgagcctcttttgcctacacaccggcagtgtccttcccgcactcagagggcctctctggagccagttccaggccacccatgggccttggccccgccccctactcatggctggcagattcgtggccccacccatctcgaagcccctcggcccaggaacccaggggaagctgctgccctagcaatcctgacccggacgacagatattacaacggtgaggagttctcattccctcacctggcttcagcgcacttctcccgacctactggggcaaaccgaagggcgcccgggagcccggtctctctgaggagccaagggaggcaaagtgaagcttctggggaaacctgtgcagatgccctctctgaactggccagaagccctgcccccacctcctccttcttgtgaactgagctgcctagaagggccggaggaggagctggagggcagctcagagccagaggagtggtgcccgccaatgcctgagagaagtcacctgacggagcccagctccagtggagggtgcctggtcaccccatcccgaagggaaaccccctctcccacaccttcctatggacagcagtccacagccactcttacaccctcacctcctgaccctccccagcccccaactgacatgccccatctccatcagatgcccaggagggtgccccttgggccgagttcccctctcagtgtatcccagcccatgctgggcatccgtgaagcgaggcctgctggcttgggtgctggccctgcagcctcaccccacctcagccccagtcctgcccctagcacagccagcagtgccccaggcagaacctggcaggggaatggggagatgactcccccacttcaaggaccccgtgctcgattccggaagaaacccaaggctcttccctacaggagggagaacagtcctggggacttgcccccaccacccttgccaccgccagaggaagaggcgagctgggccctagagctgagggcagcaggcagcatgtcctccctggagcgggagcgcagtggggagaggaaagcggtccaggccgtgcccctggcagcccagcgggtgctccacccagatgaagaggcctggctcccatacagcagaccaagcttcctgtcccggggccagggcaccagcacatgttccacggccggcagcaactcttccaggggctccagcagctctaggggctcccggggccctggccggagccggagtcggagtcagagccggagccagagccaaaggccaggacagaaacgccgagaggaaccaagatgacccttgttggggcattgagaatatcatgagtgccacggggaaggggagtagggatgtcttttcccccccagcagtgatgagtggggctagctgaagcccattggtttccacgatttcaattggctgagaaggcagagagctagctcctccctttctttctttttccacctgagacttgtttataaaaaacaaaacaataaaaagagtctgatcagagccc

SEQ ID NO: 112 - protein, 309 aa, Homo sapiens
MPSLNWPEALPPPPPSCELSCLEGPEEELEGSSEPEEWCPPMPERSHLTEPSSSGGCLVTPSRRETPSPTPSYGQQSTATLTPSPPDPPQPPTDMPHLHQMPRRVPLGPSSPLSVSQPMLGIREARPAGLGAGPADHLSPSPAPSTASSAPGRTWQGNGEMTPPLQGPRARFRKKPKALPYRRENSPGDLPPPPLPPPEEEASWALELRAAGSMSSLERERSGERKAVQAVPLAAQRVLHPDEEAWLPYSRPSFLSRGQGTSTCSTAGSNSSRGSSSSRGSRGPGRSRSRSQSRSQSQRPGQKRREEPR

SEQ ID NO: 113 - DNA, 2163 bp, Homo sapiens
ctcccggcctcggagcggacggatccgggagggagccaggcggcccatggggaggggcaggggcttagccgctggcgagtgaggaccgggtcgggagaaaggggtcgcacctggagttcagcctcttgggtaggggcgggatacgtggggcgactcgaggagctgccaggactagggagggctgcgggccaagacggggcgggatctggatgacgtttgcctctaagacgccacgaggaggccaggctttgcaaccatctccataaagaaggggcaagttcgaggacggaaagcccactcaaagggcggggggcggggcctggcaagagggggtgtggccaggatcccaggcagtaaattgtgcggcggggtctggatggaaaggcggggcccgctgaaagaaggcgatccgagttctgctacttcctagtaagggacgtctctggagagattctgaggtgtttgagcctcttttgcctacacaccggcagtgtccttcccgcactcagagggcctctctggagccagttccaggccacccatgggccttggccccgccccctactcatggctggcagattcgtggccccacccatctcgaagcccctcggcccaggaacccaggggaagctgctgccctagcaatcctgacccggacgacagatattacaacggtgaggagttctcattccctcacctggcttcagcgcacttctcccgacctactggggcaaaccgaagggcgcccgggagcccggtctctctgagaagcgggaatctccctgtatctagctcagacggccaggggcacggccgcccctggcgagggtcctgtctatagcaccattgacccagcgggggaggagctgcagaccttccatgggggcttcccccaacatccctcaggagatctgggtccctggagccagtacgctcctccagagtggagccagggggacagtggagccaagggaggcaaagtgaagcttctggggaaacctgtgcagatgccctctctgaactggccagaagccctgcccccacctcctccttcttgtgaactgagctgcctagaagggccggaggaggagctggagggcagctcagagccagaggagtggtgcccgccaatgcctgagagaagtcacctgacggagcccagctccagtggagggtgcctggtcaccccatcccgaagggaaaccccctctcccacaccttcctatggacagcagtccacagccactcttacaccctcacctcctgaccctccccagcccccaactgacatgccccatctccatcagatgcccaggagggtgccccttgggccgagttcccctctcagtgtatcccagcccatgctgggcatccgtgaagcgaggcctgctggcttgggtgctggccctgcagcctcaccccacctcagccccagtcctgcccctagcacagccagcagtgccccaggcagaacctggcaggggaatggggagatgactcccccacttcaaggaccccgtgctcgattccggaagaaacccaaggctcttccctacaggagggagaacagtcctggggacttgcccccaccacccttgccaccgccagaggaagaggcgagctgggccctagagctgagggcagcaggcagcatgtcctccctggagcgggagcgcagtggggagaggaaagcggtccaggccgtgcccctggcagcccagcgggtgctccacccagatgaagaggcctggctcccatacagcagaccaagcttcctgtcccggggccagggcaccagcacatgttccacggccggcagcaactcttccaggggctccagcagctctaggggctcccggggccctggccggagccggagtcggagtcagagccggagccagagccaaaggccaggacagaaacgccgagaggaaccaagatgacccttgttggggcattgagaatatcatgagtgccacggggaaggggagtagggatgtcttttcccccccagcagtgatgagtggggctagctgaagcccattggtttccacgatttcaattggctgagaaggcagagagctagctcctccctttctttctttttccacctgagacttgtttataaaaaacaaaacaataaaaagagtctgatcagagccc

SEQ ID NO: 114 - protein, 309 aa, Homo sapiens; identical to SEQ ID NO: 112

SEQ ID NO: 115 - DNA, 1657 bp, Homo sapiens
ggcccgctgaaagaaggcgatccgagttctgctacttcctagtaagggacgtctctggagagattctgaggtgtttgagtgtccttcccgcactcagagggcctctctggagccagttccaggccacccatgggccttggccccgccccctactcatggctggcagattcgtggccccacccatctcgaagcccctcggcccaggaacccaggggaagctgctgccctagcaatcctgacccggacgacagatattacaacgaagcgggaatctccctgtatctagctcagacggccaggggcacggccgcccctggcgagggtcctgtctatagcaccattgacccagcgggggaggagctgcagaccttccatgggggcttcccccaacatccctcaggagatctgggtccctggagccagtacgctcctccagagtggagccagggggacagtggagccaagggaggcaaagtgaagcttctggggaaacctgtgcagatgccctctctgaactggccagaagccctgcccccacctcctccttcttgtgaactgagctgcctagaagggccggaggaggagctggagggcagctcagagccagaggagtggtgcccgccaatgcctgagagaagtcacctgacggagcccagctccagtggagggtgcctggtcaccccatcccgaagggaaaccccctctcccacaccttcctatggacagcagtccacagccactcttacaccctcacctcctgaccctccccagcccccaactgacatgccccatctccatcagatgcccaggagggtgccccttgggccgagttcccctctcagtgtatcccagcccatgctgggcatccgtgaagcgaggcctgctggcttgggtgctggccctgcagcctcaccccacctcagccccagtcctgcccctagcacagccagcagtgccccaggcagaacctggcaggggaatggggagatgactcccccacttcaaggaccccgtgctcgattccggaagaaacccaaggctcttccctacaggagggagaacagtcctggggacttgcccccaccacccttgccaccgccagaggaagaggcgagctgggccctagagctgagggcagcaggcagcatgtcctccctggagcgggagcgcagtggggagaggaaagcggtccaggccgtgcccctggcagcccagcgggtgctccacccagatgaagaggcctggctcccatacagcagaccaagcttcctgtcccggggccagggcaccagcacatgttccacggccggcagcaactcttccaggggctccagcagctctaggggctcccggggccctggccggagccggagtcggagtcagagccggagccagagccaaaggccaggacagaaacgccgagaggaaccaagatgacccttgttggggcattgagaatatcatgagtgccacggggaaggggagtagggatgtcttttcccccccagcagtgatgagtggggctagctgaagcccattggtttccacgatttcaattggctgagaaggcagagagctagctcctccctttctttctttttccacctgagacttgtttataaaaaacaaaacaataaaaagagtctgatcagagccc

SEQ ID NO: 116 - protein, 431 aa, Homo sapiens
MGLGPAPYSWLADSWPHPSRSPSAQEPRGSCCPSNPDPDDRYYNEAGISLYLAQTRTAAPGEGPVYSTIDPAGEELQTFHGGFPQHPSGDLGPWSQYAPPEWSQGDSGAKGGKVKLLGKPVQMPSLNWPEALPPPPPSCELSCLEGPEEELEGSSEPEEWCPPMPERSHLTEPSSSGGCLVTPSRRETPSPTPSYGQQSTATLTPSPPDPPQPPTDMPHLHQMPRRVPLGPSSPLSVSQPMLGIREARPAGLGAGPADHLSPSPAPSTASSAPGRTWQGNGEMTPPLQGPRARFRKKPKALPYRRENSPGDLPPPPLPPPEEEASWALELRAAGSMSSLERERSGERKAVQAVPLAAQRVLHPDEEAWLPYSRPSFLSRGQGTSTCSTAGSNSSRGSSSSRGSRGPGRSRSRSQSRSQSQRPGQKRREEPR

SEQ ID NO: 117 - DNA, 2026 bp, Homo sapiens
ctcccggcctcggagcggacggatccgggagggagccaggcggcccatggggaggggcaggggcttagccgctggcgagtgaggaccgggtcgggagaaaggggtcgcacctggagttcagcctcttgggtaggggcgggatacgtggggcgactcgaggagctgccaggactagggagggctgcgggccaagacggggcgggatctggatgacgtttgcctctaagacgccacgaggaggccaggctttgcaaccatctccataaagaaggggcaagttcgaggacggaaagcccactcaaagggcggggggcggggcctggcaagagggggtgtggccaggatcccaggcagtaaattgtgcggcggggtctggatggaaaggcggggcccgctgaaagaaggcgatccgagttctgctacttcctagtaagggacgtctctggagagattctgaggtgtttgagcctcttttgcctacacaccggcaggccacccatgggccttggccccgccccctactcatggctggcagattcgtggccccacccatctcgaagcccctcggcccaggaacccaggggaagctgctgccctagcaatcctgacccggacgacagatattacaacgaagcgggaatctccctgtatctagctcagacggccaggggcacggccgcccctggcgagggtcctgtctatagcaccattgacccagcgggggaggagctgcagaccttccatgggggcttcccccaacatccctcaggagatctgggtccctggagccagtacgctcctccagagtggagccagggggacagtggagccaagggaggcaaagtgaagcttctggggaaacctgtgcagatgccctctctgaactggccagaagccctgcccccacctcctccttcttgtgaactgagctgcctagaagggccggaggaggagctggagggcagctcagagccagaggagtggtgcccgccaatgcctgagagaagtcacctgacggagcccagctccagtggagggtgcctggtcaccccatcccgaagggaaaccccctctcccacaccttcctatggacagcagtccacagccactcttacaccctcacctcctgaccctccccagcccccaactgacatgccccatctccatcagatgcccaggagggtgccccttgggccgagttcccctctcagtgtatcccagcccatgctgggcatccgtgaagcgaggcctgctggcttgggtgctggccctgcagcctcaccccacctcagccccagtcctgcccctagcacagccagcagtgccccaggcagaacctggcaggggaatggggagatgactcccccacttcaaggaccccgtgctcgattccggaagaaacccaaggctcttccctacaggagggagaacagtcctggggacttgcccccaccacccttgccaccgccagaggaagaggcgagctgggccctagagctgagggcagcaggcagcatgtcctccctggagcgggagcgcagtggggagaggaaagcggtccaggccgtgcccctggcagcccagcgggtgctccacccagatgaagaggcctggctcccatacagcagaccaagcttcctgtcccggggccagggcaccagcacatgttccacggccggcagcaactcttccaggggctccagcagctctaggggctcccggggccctggccggagccggagtcggagtcagagccggagccagagccaaaggccaggacagaaacgccgagaggaaccaagatgacccttgttggggcattgagaatatcatgagtgccacggggaaggggagtagggatgtcttttcccccccagcagtgatgagtggggctagctgaagcccattggtttccacgatttcaattggctgagaaggcagagagctagctcctccctttctttctttttccacctgagacttgtttataaaaaacaaaacaataaaaagagtctgatcagagccc

SEQ ID NO: 118 - protein, 431 aa, Homo sapiens; identical to SEQ ID NO: 116

SEQ ID NO: 119 - DNA, 2250 bp, Homo sapiens
ccaggatcccaggcagtaaattgtgcggcggggtctggatggaaaggcggggcccgctgaaagaaggcgatccgagttctgctacttcctagtaagggacgtctctggagagattctgaggtgtttgaggtcagtggttttcaatcttggttggctacacataggaatcacttgaggggcttgagaaaaataccgacacctgagtcccacccccgagaaattctgatgaaatgggtccagggtgcagcctgagtggtggaactgggaccggggcctaggcgtggacaagtataggggtatttctgacccttctcctcatttcacctcttctttctcccacgggttcctttctggaagcctcttttgcctacacaccggcaggtaagccatctctgccccagtggggttcagaccccccgggacgggcccttctctcactcattcgccccctcattttccccagtgtccttcccgcactcagagggcctctctggagccagttccaggtaattctcttagcccatttcctcaggatgacctccaccgacaggccactcttcttccgccccgctgacgccccaggtggagggagcatggccacctcccaccccaacaccaccgccactgtcctgaaactcccgaatatcgccacctccctttcctttgctggcctcttcaggctctccgtccccaacgctcacctgctctccctcaggccacccatgggccttggccccgccccctactcatggctggcagattcgtggccccacccatctcgaagcccctcggcccaggaacccaggggaagctgctgccctagcaatcctgacccggacgacagatattacaacgaagcgggaatctccctgtatctagctcagacggccaggggcacggccgcccctggcgagggtcctgtctatagcaccattgacccagcgggggaggagctgcagaccttccatgggggcttcccccaacatccctcaggagatctgggtccctggagccagtacgctcctccagagtggagccagggggacagtggagccaagggaggcaaagtgaagcttctggggaaacctgtgcagatgccctctctgaactggccagaagccctgcccccacctcctccttcttgtgaactgagctgcctagaagggccggaggaggagctggagggcagctcagagccagaggagtggtgcccgccaatgcctgagagaagtcacctgacggagcccagctccagtggagggtgcctggtcaccccatcccgaagggaaaccccctctcccacaccttcctatggacagcagtccacagccactcttacaccctcacctcctgaccctccccagcccccaactgacatgccccatctccatcagatgcccaggagggtgccccttgggccgagttcccctctcagtgtatcccagcccatgctgggcatccgtgaagcgaggcctgctggcttgggtgctggccctgcagcctcaccccacctcagccccagtcctgcccctagcacagccagcagtgccccaggcagaacctggcaggggaatggggagatgactcccccacttcaaggaccccgtgctcgattccggaagaaacccaaggctcttccctacaggagggagaacagtcctggggacttgcccccaccacccttgccaccgccagaggaagaggcgagctgggccctagagctgagggcagcaggcagcatgtcctccctggagcgggagcgcagtggggagaggaaagcggtccaggccgtgcccctggcagcccagcgggtgctccacccagatgaagaggcctggctcccatacagcagaccaagcttcctgtcccggggccagggcaccagcacatgttccacggccggcagcaactcttccaggggctccagcagctctaggggctcccggggccctggccggagccggagtcggagtcagagccggagccagagccaaaggccaggacagaaacgccgagaggaaccaagatgacccttgttggggcattgagaatatcatgagtgccacggggaaggggagtagggatgtcttttcccccccagcagtgatgagtggggctagctgaagcccattggtttccacgatttcaattggctgagaaggcagagagctagctcctccctttctttctttttccacctgagacttgtttataaaaaacaaaacaataaaaagagtctgatcagagccc

SEQ ID NO: 120 - protein, 494 aa, Homo sapiens [sequence omitted]

SEQ ID NO: 121 - DNA, 1756 bp, Homo sapiens
ctttgcaaccatctccataaagaaggggcaagttcgaggacggaaagcccactcaaagggcggggggcggggcctggcaagagggggtgtggccaggatcccaggcagtaaattgtgcggcggggtctggatggaaaggcggggcccgctgaaagaaggcgatccgagttctgctacttcctagtaagggacgtctctggagagattctgaggtgtttgaggccacccatgggccttggccccgccccctactcatggctggcagattcgtggccccacccatctcgaagcccctcggcccaggaacccaggggaagctgctgccctagcaatcctgacccggacgacagatattacaacgaagcgggaatctccctgtatctagctcagacggccaggggcacggccgcccctggcgagggtcctgtctatagcaccattgacccagcgggggaggagctgcagaccttccatgggggcttcccccaacatccctcaggagatctgggtccctggagccagtacgctcctccagagtggagccagggggacagtggagccaagggaggcaaagtgaagcttctggggaaacctgtgcagatgccctctctgaactggccagaagccctgcccccacctcctccttcttgtgaactgagctgcctagaagggccggaggaggagctggagggcagctcagagccagaggagtggtgcccgccaatgcctgagagaagtcacctgacggagcccagctccagtggagggtgcctggtcaccccatcccgaagggaaaccccctctcccacaccttcctatggacagcagtccacagccactcttacaccctcacctcctgaccctccccagcccccaactgacatgccccatctccatcagatgcccaggagggtgccccttgggccgagttcccctctcagtgtatcccagcccatgctgggcatccgtgaagcgaggcctgctggcttgggtgctggccctgcagcctcaccccacctcagccccagtcctgcccctagcacagccagcagtgccccaggcagaacctggcaggggaatggggagatgactcccccacttcaaggaccccgtgctcgattccggaagaaacccaaggctcttccctacaggagggagaacagtcctggggacttgcccccaccacccttgccaccgccagaggaagaggcgagctgggccctagagctgagggcagcaggcagcatgtcctccctggagcgggagcgcagtggggagaggaaagcggtccaggccgtgcccctggcagcccagcgggtgctccacccagatgaagaggcctggctcccatacagcagaccaagcttcctgtcccggggccagggcaccagcacatgttccacggccggcagcaactcttccaggggctccagcagctctaggggctcccggggccctggccggagccggagtcggagtcagagccggagccagagccaaaggccaggacagaaacgccgagaggaaccaagatgacccttgttggggcattgagaatatcatgagtgccacggggaaggggagtagggatgtcttttcccccccagcagtgatgagtggggctagctgaagcccattggtttccacgatttcaattggctgagaaggcagagagctagctcctccctttctttctttttccacctgagacttgtttataaaaaacaaaacaataaaaagagtctgatcagagccc

SEQ ID NO: 122 - protein, 431 aa, Homo sapiens; identical to SEQ ID NO: 116

SEQ ID NO: 123 - DNA, 2748 bp, Homo sapiens
atggggaccggggaagcctctggagggtatatccgggaaggcaccaaggctgaagtgagagcggttctggggaaggctttaaaaagcagatatggaccaggggaactctggctggtcgtcatggctttgtttaatgctcctctctgccacactaccgcgttccctgtgggatgggaacctctgggaaaggacctgacaagggaccagaaaaagggtcttattcctggaggaggacgtggggaaggggttggggcactcccactgggagagcatcagagatgccagagcagggcaggggtccttcaagaccccaaagccaatctcccaggcccagatgggttaatccataatgcagacgagcaagtaactggctgtcagcccagcccccaggaccccctccctattagtgccactgccctaatgaagcccagcttggagagcccccttctcaatgagctgggtgcctgctctttgctctctgattccccctcctgtttggttctctggcccctgctggctgggtcgctgccccctggcatcatcactctgaagccagcagccctgctgggccattcacaggcataccctagtggggacttgggagggaatggaaaccagaactttggcagcaaggagcattgcttgcgctttgcctcagtttccaaaagctcccaggggactccggcactagggggtggagagaaggacgagggaaggaggagggcacgaagaggcaccgaccgtacccaggcgcaccggcaggagagcggcaccgtggctgccgcagcgcgcagaggctgtggaggggcttacggctcccagcccacgggtctcagacccaggggctgggcccccagcccccagtcccgatcccagctgggtcgagccatgctgcgctacctgctgaaaacgctgctgcagatgaacttgttcgcggactctctggccggggacatctccaactccagcgagctgctcttgggcttcaactcctcgctggcggcgctcaaccacaccctgctgcctcccggcgatccctctctcaacggtgagaccctgcctcttggggatatgggatcctgggatggggatgagcgccgcggggaagctgcgggagccggccgccgccagcctgcggagaggccggagcgcgccccctgcctgccgcatcgggaacccccgctttaccgggcgctttcgcgtgtggttccctccaggtgcacgcggtccccatccctctgcctcgacccactcgagtctagtgacgagcactgtgctggggactcgaaggtggagagaaaggagaccctggcaatatggtcaagggtaggaccggaggacgctatgccccgcatcgtggagcagccgccagatctgctggtctcccgaggcgagcccgccacgttgccctgccgcgctgaaggccgaccccgacccaacattgagtggtacaagaacggggcgcgtgtggccactgtgcgggaggatccgcgtgcgcaccgcctgctgctgcccagcggcgccctcttcttcccgcgcatcgtgcacgggcgccgcgcgcggccggacgaaggtgtctacacttgcgtggctcgcaactacctgggggcagcagcgagcagaaacgcctcgctggaagtggcagtcctccgtgatgatttccggcagtctcctggaaacgtggtggtggcagtgggggagccagcagtactggaatgcgtgcccccccgcggccacccggagccttccgtgtcctggaggaaggacggtgcaagactcaaggaagaggaaggaaggatcacgatccgtggagggaagctgatgatgtcacatacactcaagagcgatgcaggcatgtatgtgtgcgtagcctccaacatggcgggagaacgggagagtgcggcagctgaagtcatggtactggagcgtccctcattcctgcgcagaccagtgaatcaggtggtcctggctgatgcccctgtgactttcctatgtgaggtgaagggggatcccccacctcgtctacgctggcgcaaggaggatggggaactgcccacaggcagagagaaagggtctgtagctgtggccaacccagcctggggtggggagtggagcaggtatgagatccggagtgaccacagcctttggattgggcatgtgagtgccgaagatgagggaacgtacacctgtgtggcggagaacagtgtgggccgcgctgaagcatctggctccctcagtgttcacgtcccaccccagttggtgacccagccccaggaccagatggcagctcctggagagagcgtggctttccagtgcgagaccaaaggaaaccccccacctgccatcttctggcagaaggaggggagtcaggtcctgcttttccccagtcagtcacttcagccgacggggcgcttctcagtgtctccaagaggccaacttaacatcaccgcggtgcagcgtggggatgctgggtactacgtgtgccaggctgtcagtgtggctggcagcatcctggccaaggccctgctggagataaaaggagcctctttggatgggctgcctcctgtcatcctccagggaccagccaatcagacgctggtgcttggctcctccgtgtggctgccctgcagagtgactgggaaccctcaacccagtgtccgatggaagaaggatgggcagtggctgcagggggatgacctccagttcaagacaatggccaacggtaccctgtacatcgccaatgtgcag

SEQ ID NO: 124 - protein, 914 aa, Homo sapiens
MGTGEASGGYIREGTKAEVRAVLGKALKSRYGPGELWLVVMALFNAPLCHTTAFPVGWEPLGKDLTRDQKKGLIPGGGRGEGVGALPLGEHQRCQSRAGVLQDPKANLPGPDGLIHNADEQVTGCQPSPQDPLPISATALMKPSLESPLLNELGACSLLSDSPSCLVLWPLLAGSLPPGIITLKPAALLGHSQAYPSGDLGGNGNQNFGSKEHCLRFASVSKSSQGTPALGGGEKDEGRRRARRGTDRTQAHRQESGTVAAAARRGCGGAYGSQPTGLRPRGWAPSPQSRSQLGRAMLRYLLKTLLQMNLFADSLAGDISNSSELLLGFNSSLAALNHTLLPPGDPSLNGETLPLGDMGSWDGDERRGEAAGAGRRQPAERPERAPCLPHREPPLYRALSRVVPSRCTRSPSLCLDPLESSDEHCAGDSKVERKETLAIWSRVGPEDAMPRIVEQPPDLLVSRGEPATLPCRAEGRPRPNIEWYKNGARVATVREDPRAHRLLLPSGALFFPRIVHGRRARPDEGVYTCVARNYLGAAASRNASLEVAVLRDDFRQSPGNVVVAVGEPAVLECVPPRGHPEPSVSWRKDGARLKEEEGRITIRGGKLMMSHTLKSDAGMYVCVNMAGERESAAAEVMVLERPSFLRRPVNQVVLADAPVTFLCEVKGDPPPRLRWRKEDGELPTGREKGSVAVANPAWGGEWSRYEIRSDHSLWIGHVSAEDEGTYTCVAENSVGRAEASGSLSVHVPPQLVTQPQDQMAAPGESVAFQCETKGNPPPAIFWQKEGSQVLLFPSQSLQPTGRFSVSPRGQLNITAVQRGDAGYYVCQAVSVAGSILAKALLEIKGASLDGLPPVILQGPANQTLVLGSSVWLPCRVTGNPQPSVRWKKDGQWLQGDDLQFKTMANGTLYIANVQ

SEQ ID NO: 125 - DNA, 188053 bp, Mus musculus
  misc_feature (1)...(188053): n = A,T,C or G
ttgtctaagtcatcctgtccatggtgtctttggaagaacagacaaacgcagctttgatgtagtctaacttcctgagtttttacttcacgggttgttgcctaagtcttattctaacttggggtcatgcagattttcttcgaagtttcacagccttggggtttacatttgtgtctgcagcccagtttgtgttacttttgacacatggcagtttgacgttcttgtctgcctttactgtgtgaggagctggttattttgactcagtgcagtgtggcaatgtttttcactgtaccaatatcaaaatcacttttttttttcttaagacatgtatagaacagagtgatgatcttaacagaagtttccttagtaaaaccccaaagtcaaagttaatttggctcagatgtttataaagggtatacccatgccagatggggtgcctagaaccaggttagaaggaacggatgagggaagttaagggctgaaaccttggttaaaatgcactacaagaggcaagggcctgttgggagtgcttggccattgtgcttggtgagtcactacgttcagggtaagagcctgttgggagtgcttggccattgtgcttggtgagccactacgttcagggtaaggcttcttggaggaggaggtgtcctaggagttatcctgagtgagcagaaccagcaagcaaagatgagaaagcagagaaagtggggaccaaagggatgcaggtacatggcagcacaggtgtgcttgcatggtcatgtctgtgggcaagtatgcatgtgtgcttacatgcatctctctctctctctctctctctctctctcgtgtgtgtgtgtgtgtgtgtgtgtggtgtatgcatgcacacatgacatatcatcaacattttactatttgtggtgggttgagaggaatacggttgagaggaatacgtagggcagcagagtctaagggggtggcaggtctcatcagctatgccatgattacatacaccagggaagtctcctttcacgaaggtacaccccaagcctgtttttatttttatttttgtttttaatctttattttgagactgggtcttggtaagttgcctaggctggctttgaactcattctgtggcccaatcaggccccaaacttctaatcctcctgcctcagcatcctggctagctggtattacaggaatatacccataagactcagctaagtaactatcttcaaggtagctgggatgaaggaacaacagacaacattgttagaagatgtgtgtgtgtgtgtgtgtgtgtgtgtgtgtgtgtgtgtgtgtaatggtgacaagtgtgcatgccacggcatctgtgtggaggtcagaggacaacatttttggcattggttctcttctaggtggtttggatgagaatgacctcatacagtaatctgtttgaatacttggttgttagttggtggaactgtttggaaaggattgggaggtgtggccttgatagaggagtcaatgaggtttgaggtttcaaaagagcagtgccattcccagtgtttccttcaccttctgcctgtgaatcaagatgtaaggaagctccctgctgtcaccccagccttccctctactattgtacactctaacactctggaatcataggtccaattaaacccttgtataagttgccttggctgtggtctcttatcacaggagtagaatcccaactaagacatatgaatttgctgatcaatcccaggttctcaggcttgtgtgacaagagctttgccagctttgcccactgagcaatcttgccatcctcctagtttgggtcttgatacatttgagatgcttattaattaattaattaattaattaatttagattttttgagacagggtttctctgtgtagccctggctgtcctggaactccctctgtagaccaggctggcctcgaactcagagatctgcctgccactgcctcccaaatgctgggattaaaggcgtgcgccaccactgcccggcttgagatgctttttagacatttacctgagatgccaacagattgttgcatgcatgtgtttcctccccagggaggtggctggaaatgagatccattgattaggaagctcctgtaaataagacagaaaaggggctttgcagagactctggggggtccatctgcattaaaagatggcaggagcagagggtacctgcacaaatggccagaaaattagtagagtccttagagaacagcttcctgggagaaaatgagattgaggggcttggtgagacaaggggagcagggcttgactacgaagaaccttagcccaggaacagccaaggcaggggcactcccataagtggggccagaccccaggtgccactatgagccgtgcaatcttgggtaaattgcctaacgtgcccttttcacttatctcaagctaaaacagaataataaattgcacattgcatggggattaaatgagatcatatatttgatgttctcagagtagcacctgggtgatcataaacaacaatgctggctatgatgtaattagacaagggatcagaagtgccccctgattttgccgtgatgcttgttggcactggcatagtgtgcagtttgagtgaagtggggggccagaggtggcttgcagtgagcatattggggtactttgagctgatttcagaaaactgaggatcattcaataagcctggcttgaactgtgggtgaggaggaggatcagccagtattgtacgagtatcttaggaggctgtgctcacctccctgtgtgctcacctccctgtgtgctcacctccctgtgtgctcacctccctgtgtgctcacctccctgtgggcattaaaagcccttcactctgctgagtgttgtctgtgaatttttttatttttatttatttatttatttatttatttatttatttattggctttacacttacaggatcaggatcctgttgggtttggctctagggccagtgtggcacatggcccatctggtcacaggaagttctgtctgcttgggctatgacagctgcctgagacaagctcatctggaagacactgaaggcaggaaggatcaaagagagtgaaatgaggcaggtagagctgttggggaggaaggcagggagcggggatggagactgtcttggaagaggggatgcaggtgagggtaaaggtatgacaacttgtgtggagggaggcttccttctgtggaaaagatgagtgggaacaaggaaatggagggcaataagaggacagagctgatgatggacgaggggcaggaccatcaccctatctgggaacctggagctgcaggctagcagctgggaagcaaaggtaaccgattccccagggctcaacacatctcttcttcttgttagcacagggccataaagggttggtccaaacagctatcagcagtgttatagatatggcctataaaggctcaccagtaaaccttctttatttcctccttaaagggctgagagccaccgaggcgctgagaatcttctgtggcaggcttctggtggaacttagagattaaggtagccagcatccatgcttgaggagtcactcccaagctttcagtaatgcatgcagggaaggcaagccctgccccagttcccacaggaactgagaacagaacgctgccatccctggaaagatgaagctgagtagaggtagcaatgggtcccttgctgtgcctacgcatgcataggagctgccttcgatcctggtgtcatccaatatagccaccccaccaacctttgctacagttgctgccgaggatgaagagccaggggatcatgcactattgtgctctcaatagccacacggtcctaagcactacatgctcagattcatctattcatctgagatgtgtcaggcccggccagcctactccctcaaagggctgaaagaagagaggccacagataggcacccagagagattcactgagctcaaaggaagggagtacaattgagatgagcactctggggaagcaagcaggcaggaaggaagaattatctgggcatttaaggcatgatcagccaaagacacgcagaagtacagatggggagccaagtctctgccaataggccagggagctgtttgggttctcaggcaatctatggaagagagcatcggtacctagaagtcggagaggaccttcaggaaaagatgagtctgtagggagaagagtccgtggtgagaaagaatagcacagcgaggcggctccaatggctccaacggtgaggatgccgcttagcatagccgaaggcaacgcccaatgctttgggaggatcctcaagtgtctcagaactatacatacaggcctgctcacacttcctagcactgagctaaccagtgctatcgtaggctgagccaggcccaccaacccaaagggagtcaccctgtccaaagcagacacacatagggatgagagggcgccggggagtttgacatcaggatgtgcactgtcacaggactgcctttccattgtcaggggcctcagactgcagatggggagagagctcagccgagagcataatgcccggggtttgagcgagaggctctctgtaaatgcaaaggctttcttgacataaagaaggtgtgctaaatcctgccgggccagtggagcgccgggcactactcggccttcagggtttgataaaagggcagacagaagaagtccagacatgtgtctcctaatcccggccctgctcttactgctgtctagaccccctcagcctcaccgtggctactagttgactccttcccagaacagtccccagggccacaggatgtgctggctcatactgttcctcctttggcagcagctgggaacgctatacaatctggcctagcccggtagctgggcctgagggacccagcgtggtccaggagcatccgctgcacattaagtcttgagcacactgctctcttccatccatctggctcctctcctgggactactgaagagccagtgtgctgcttggtaaccgcctgctggggatacgttccttcagcatctcagaagagcctgagtctccaccttgtgtttggcattcatagccctagaatttagttcctattttcaagctaattatcctggttctgatatgtctgatgccaacaacacacccagtcaagcctcttccctgttggtaattcatcgccatcaagatccaaagtcttagtgaaatgtggggcttgggagcgggcatggggaatagggttgtcaaatatccccaagggttcatggggagggaagaagaggactcaacatcagcttgccacattctcctccttctattgttcctctgactcaacatgttagatgggtctctgggtattgggtttacagtgtgtgacacagttggctggggtcctacacatcccagtttttatgaacacattgtcttaatcagcataggatgcaatacagtaagactgcaatctgagcggcttaaaaatagaacttttatgtctccgtgtttgctgggatgtctgaggtcacggggctggtcgagtctattgctaatgaggcctgtcttcctggctatactagagggtcgggtcaactcactgggtcttcctagagtagagagcaagtgactgcgcttcctgctctttcttctgagagggacactaattctatgagttcagggctccacccttgtgacctcacgtaactccaattaacccctgaaagctctccttccaaatatcatattgggagttagggctttaaaaatgcactggaaaaaagagcaacaaagaagaggtaatgaaacggggtagcacacagcttagatacatctttttccaaaagaagagaaggtatggacgcagttgtatccggagcagagccttagatgcgtgctgcctcttgtaacacggctgtaatttttgccatttatgtagtgatggagtggcggcaaagccggtgagactcagggcagactctcctaagttctaatgttcacaaagggtatggacttggtgttagctttccatcactgtgaaaatgttcctgaggccaatcaacttaaaggaagaaaggcgtgctcaggctgtggagtcagcaattcagttcttggttgcttggctctcttgctttagggatcatgatgaggctctctatcatggtagcggagaaagccaagaaggtggccaagaaggaaggaagaattgagggaggaatggagggagggaaggaggaaaaggggcagctaggattattgtcacccttcagtgacccaagttcttcccactatagtctgcctcttgaggttccgatagatctcagtagacccagtctctggggcacacttcagatctaaaccttataatgttttgggggaggttatttcagtgattaatttattacaagtaatttataaaatatctagtagatgttaatagttaataggatgtctgctcctagatggaaaatctcattagggtgtggtgtgtgctaggagctgggaagtagagagatcacctggggtgatcagagcactagaatcgatcctgcctgtcgctgttagcgtctcagggttggtttaccttggtgacgcttccttgaaagctcccataagatgaaggatctctgcctgccacaccttcttttttctgcctaagtccggagaagacagctcaagccaacctgagaccacttcctcctccattgcttgccagctctgaaagcatgggcaagtcaccagattcatgagaaccattccctcttgtcccacacaaagaagagacactggctgaggatgagactgtaacatggccactaagcacactagtgttgctgagtacacagcacagctctgtctcggatccagggtctcctgcgcacgactctgctggactgccagttcctgttgttctggattgcttcccattgctctggggccagtctagctgttgttatataattttcactgtgaagtttgtttgttagtatcaaatcttatgtgaaattgtgacggtcaccactggcacggggcgacacatcacttgtctgcttttagaaggaaaggcccttaagggacatcatttgggaatcattcctttctattacagcttccttatggtctcacgttgtgatcctagtgtgacacagtgtgactcttttcatttctgattctgatggcactgtctcattccgagtcttgtcccctgaaccagtctcatgtatatgagactataacatgaacactgactcaggtcagaacatcccaagttttcccattcataagcaatgtggacatgggagggcttttaggtcttcccacttataactctttggccgcccctacaggtggccagccacttcatgtgtgcttttctagttaatgtgtctacctcattgtctgggctttgggactcaccttctctgcatgctcgagcctacactgtgaatgtgaaattgagtttacattgttcactgggagcgtgcatataaataaatcctcaagttggggaaaaatgcgttgtcacgttccctgccgtgtcctggtattttcttggtgagattgtacatagggcagaaaacgtggagcctgggccttttaggtacagggatgacttcagagtcacagtgatggaaagccaatgagaacttaggaacaccccctcccccgccccaccccgttcacctggtcattgctactcaggtccatgaggcaggggtgtttccttcacctctgaaagatatgtatcttagtcagggtctctattcctgcacaaacatcatgatcaagaaggaagttggggaggaaagggtttattcagcttacacttccacattgctgtttatcaccaaggaagtcaggactagaactcaagcaggtcaggaagcaggagctgatgcagaggccatggagggatgttctttactggcttgcttcccctggcttgctcagcctgctctcttatagaccccaagactaccagcccagagatggtcccaaccacaaggggcctttcccccttgatcactaattgagaaaatgccttacagttggatctcatggaggcatttcctcaactgaagctcctttctctgtgataattccagctgtgtcaagtagacacaaaactagccagtacgctatgttggattgtcttttttataattactctactgaggttaaaattcatctcccgcgtaactcacccacccaaagcatacagttcagtggtttttactacgctcacagttgtctcataactccaggcaactgttcctctgatctgcgtctttatggattcactttgtctagatagttttggattgataggcccacccatccgatgatatgttgttctttgtgtctgggttattttgcttggcataatgttgttcagggccatccacattgccacgtgtggaaatatttccttcctcctcttaaacagtcatagttccaccgcaagaggaaagcattgtcttcctcgcccctcggttgatggacatttgcagcatttcccccgttagtctttgtgaataactgctgcaagtgtttacataaaagtcagttttcagtcttttgggagaggtgttcagcagcctctggttctatctgtaccttcaaagtcttctcaaggctggactaacctgaaggagtaaacacgaatctcagggagcacacagtggccatggaatactttctccaaagatagattcgaacagtctataagataaggaggttggccagttcctcctgccttctgtttttcataacccacgcacacacacactctccatccacagtgggaaacaatcatggaggaagagggttcccagactgccctttgggaataaaatgggaggccagaaccaaagtcttttggataaagcaccatgactgactacacactaacccgtttggctgccttccttcccaaggcacagatctttcccagcatgggaaagaccgacctccctccctccctccctccttcctttcctcccttttgacccattttcactcttccaccatacactcaataaaataaaataaaataaaataaaataaaataaagtaaagtaaaatttaaaaaaagtcagttttcagatcccccaggaaataagaatttctgtggctagcattattgagtacctactagatgcaagacctagtagtgcctacaagatgcaagtgcctactagatgcattgagtatgtcccatctcatgtacttctcacagtaggctcacgaggagctttcctcctcatttttcaagtaaagaaacagacccaatagctaatatgggtggagcagcggctacacccgattctccacgattcccttcacattgcatcctgaggctgggccgctactgggactgtacctctccatgtcacccacactggctaagtccggatgatgggtccctgacagccattacctgaactgaatccctccactaactgctgagctcgcctttactactccagtgctcagtgaagaaaaaatattcagagaagtttcatagctcacccgggacacatggctcatgggcaccagagactggagtgtgagcattccacggtactgtcactgcttccctggtcccacagctgtccctcacaaatgcacagccttatctttcctcagggaccttcttgtagacttagagttccatttccaaaaggatagtgagcaagttcctttctgtgcccctgtctcttgagggtattttggcacctgggcccaaggacctcagacaggtaggacccctggtggccggctgtggtactgcattgttcccctgatgcttatgccatagaattcattgctgtctgtgactagaggctgaagcatgcagcaaactcactctggagagttctgtggatgtcgaagtggagagggatttgggaagctgactggaaaagggaagtggcagtgtggggcgggtggagaagagggatggatgggcaatggtggtgggtggcatatcaactgtctccatatggttacctgcccacagctgctatcttggatgaccccatggagtgcagcagaggggaacggctctccatcaccctggccaagaaccgcatcaaccgcgcaccagagaggctgggcaaggccaaggtcgaagtggacatctttgagcttctcagagacagcgagtacgaaactgcagaaaccagtacgtagaatgggtaggctggcagaggaagagttggtggtgggtgtgtgctaagtgccaggcctccgatacaatgtcttcaggggagggagagagttacataccaggaaggcctatgagaatctcagtccagatgaaactcctaggatttgttgtgaccatgaattggatagaatattaattcaccaagtaatacatccatccatcgatttatccatctattcattcattcattcattcattcattcattcattcattcattcacatactggacatttttatacaaatacttggacaaagatttgtggatgatcgggaaagaatggcagccagagtaaaggcagcttacccattggtaccttcttccatccctccatcccgccctcctttcctcctccccctctaacttccttctcctttcccttttcccttcccttcaagtctttagtagttcaccactgagataggcattcactttgtagcacaggctggtccagagctaagtaagtagcccaggctagctttgaatcacagcaactttcctgcctaaggagtcacctggctctgccttatcctcttgtgctgaaggaggcaatgaaggaagatgctgtgtcttggaatggagtatggccattttccccaactgaggtattcagcctatctatacctcagtttattcatcagtaaaatgggagttctaggttctactttgcaaatcttgcgtatttgttatgaggttcacatgagttaaaagatgggagaattccctgtggattgtagggttttacagacacagtagggccctcaactttcatagcacacagggtgggttccttgtgatgggtgcctcttttacatctaacaatactatgagaattacatgctgcttcctctattttaggaagaacagtgatgctcaaagttgtgggataatcagcctgagcccagagctagtctgcgcaatctgctgcttctcccttcggtcctctgcctggtgctggtattgccttgtgacttagcctcagctactgagcctctgccttgcagctaagccagaagtgaacaacagctctgttacagaagggaagcagagagctatcagtcacctctctgcttctctgtccaagtgccagagacagcagcttaaagggagaaaaggcttgcttggctgcacagtctttgaggtccgtgactgagcaccatggagaggcttttgttagagtaaagttgcccactgcgtggtacccaggaagcaagaggagatgggaagagggggaacaaggaggctcccaatatccctgtaaggacacgccccagtgacctcactcccttccacttagccccacctcccactgccatgtgatgaccacacgccttcaccacatgagcctttgaaggatattttcaccccaaatgtaacaagggatgttcaacccagacaggagacctgatgacatcatttctccaagactctgggggagtctccttctcttcattttgcaacctcaaactaagtgaatgaaagaaaagagcaacttgtgtagctattggtgtttagacactgggacttccccgtgaggatgcaacaatgttctgttgctctagcctgggctgtttgggctgcaagaaagggagcaggttctcactggtttaaatacagcagatgatgcggaggcaggcagtggtgcccaggcccaccagcatctctctctctctctctccctctccctgccccaccccgtgtttctttctctgcctctcccgtgttctcattgcttctctataaccttcctgtcctgccgagtccaggcttttccctcagcaggttagttctccactcctacccatcctacactatctcataatggctgcccgggatgagtcttcatcctggagcttttattgagtgcttcctctatgattcagcatgttaggcattggaaacagtgctggaaacaagagagataggacctctggactcatggaacttacagtcccctcagagtatatgcagtgtcagcttctcctagtactgctttttataatacattttttattaaacttttgagaattttgtgcatgcatacaaagtactttgatcacatctatccccacagtcttcttcctaattctgtttccattacaccccacccttcccaactccatgcaatttgtttataagtaatgcactgagtccagttggtgctatttttgtaggtaagggtgtggggctattatctggagtatggccagcctgtcagggaacatgtctctaaagaaaacctactctccttgccctagcaccattaactgcccaaacctcttcgaccaggagagaggcatgtgagctcctccactctccatgctggtttgatcatatgcaagcctagctcaggcccccacatctattgtgaattcatgagtgcagctgtcctgccacatccgaaagacacagctttgctctggttctccctgactctcgactctcatatagccttctgctcattctttcctgatgtcccctgagcctcgaggggaggagtatgacaaagttctcccacttagtacctgttcctctagaaacccaaagagaaagatctcatcgggactgctcatctcgctttgtggccagtctcacaggatgctggtgtttgccagtctgcaaacagatgttgactgtccttggggaacagtgccctttcctggttcagtagctgtgagtaacacacacttctccagaacagggtgtggtgcgaccagtaggaaaacattcatttattcattcaattagtaaataaatattcagcaagcgcctattgcacctgattctagccaacaagaatttgtcagggaagatgtcacgattaatgtctaggacaacaaaggaagacagattgttcaagatcttccaaataaaatcagaataccagtaacttctcatgagtctcctagtctggtctgtggagtttcttcacctaggtatcagacaagggtctggatttcttcatagctctttgaaaaccaactcccctctccttcccttcagttcttcagagcctccccagtgggactcaatgcgtatgtgcccattgtggatggcgttagtggcgggaagaaatgtcctctcccggtgacctatgcagcctgccttggtaaagtcaaggcatctaaaatatgaagccagatgaatcagggactaaaggaaattgatatctttattcttctttgcagggctttggacatctttttaatgtccttttaggcaccgagtattttattagcaagtggccttcggttcagcttttatatcagtgtgtttgaggcaagcttcagatggcttctggagttttctacccccaagtgtctttcatctggagtcagagtgtaccgccaccataggttttaaacaccacctagatagttctttgaaaggccacgcctagttcttctatgttcagggaagggaacaggtggatggtgtgttcatgcagtgagctaaggcagggtgagcagtctcttcagtgtccatggcaaactggaaaaagataagtagatccggaacagaatccttgggtggaggaggccactctgatccctacttaggaagaggtctaagtggtatggcaggattgtgggtttgggaactggattgagcagagcgctacctgtgtggcatggaaaggctgtttagccatttttatgcttcgggtttgctgatgtgtcacgtgatagttaccgtcgtcatgttatctcatcagagtggcctgtgcaatagtgtaagtgacacatgcaacatgtagggtgacatgggtgttcggcaaactatagttttggttgtttgattatctttgctcctgtctcagctgtgcatgcttcttccgcccccagcctccccatcacctcttctatccagtttcaaagctcagccctccccgagggctggctccactctctcccaggctcttctcaggtgacttgcttaatgtcaacatccttcataattggacattcacattctctctccagtttcctgcatttgatgcgcctgacagctttgagcctttgaaagttgtagtgggtcatcccgtgccagaagctggtccgtaccacagtctgagatttccccgggctagtggtccaggtttgattttcattgctaattgaagacatttgcatggatccagggccttggatgactccccccgacccctcacctatcaccctgcggccggggaccgtgcttcaaggagatgaaagagactgcaagtgatgtatttggttgggcaaagtcaaggctgtgattgaagttgggactttagcaattcaacagggctatttggtcttactgaagtaatgggtgcttttcaaaaagctctgtacattgcacacttaatgaatcacactcagggtgggccagccagtccagggaagtggaggttattttaagaatcaaagatgagggagtgtaaggaagatgaagatgctagcatcacctgttcgcctagcacaagtcttagagatgcaaagtatcacacagggcattaattaacagccaacctggaagctgggaagatacgaggagaaaaaaaaatcaacccccattctgcctggttcacataggcaggttttcatacagcagttttaaagtgggggtcacttacaaagcttcccccaacactcatgggactccccccacctctgccctttaccactgttgcctcaggcttccagatatttgatttgctaactccccctgcacagctcacagatctgaagtgaaaggaatagacaagacccattagtctacctcctccctgcccctgagccctctcagcccttccggcttccctcagcatcttatcgccatctctccatcacaggcttccgtttgcaaggagcccctaaaaggatccaattttgatgccctctgctccatagatcgctctgtctcctgcggcgaatgtatcaggtttaactgagcacctccccccttgccactcaaatatccacaggcgctggcacgatgtagccagagccaatttgaagcttaatttactgtagagctagaagcagggaccttcctgtcaacccctcacctctgcttgtttctgcgaggcaagcataccgtccactgaccacactgtctccctttgatatccagaaggcacattagggaaccaagaccgaggcaggctccagcgttcctggcacaggacgtgtgtctgatatgttctgactccatctgcaagtccactcttcctgggattccaggattcttgaaggcttggggtcatgacctccagggatttaaggttcccttaagatcagtccaaagcctctggaatgacagctcagtggtagaatgcaggctatctctgtaaatcccagtgcttgggaggtggaggtgaatagatccctaagctcagtggccagtcagcctggactactacttaggagttctagcccagcaagagacattgtctcaaaacagaccgagatggactgagtctgagaaacaagacctaaggttggcttcaggcctccatgagcatgcgtgggtaacacacacacacacacacacacacacacacacacacacacacacacacacactctgccagggtaaagagaagctagaaaggcatgcagattgtgaggagtcattcagcaagcatcctttgctctgctctcaaaggtcaccccttacttgtcgggtgcacagcgtggagtcagaatcacacagaatggcagagctcaggagcagtctgctcctgtcctcttaagtaactgaggctcctggtgttttcgaggactacacatttttcaaagtgacataattcttaggtgacttctagaggtgttgtcagagagcaccccagtatacggagcaaagacttgagcctggacaggggatacagtggagcaaaatggctgatgaacacgtgtgttttacagagtctacagagggcacagttgatggtcagatatgaaggtcagtagagaccaacactcccattcagggctggggtcacctgtatgctccagaattctaaccttggttctaccacatcttcagctcaggccttatttctctaagtccttatgggagaagaatcagaattctctggaaacaggtgggcatgcctagcactgtcccttcctgaggtcagtggggatggggtgggagtatttaacacactcggagtagcgcacgacctggtgtgagctctcagcaacttttacctatttttgcgaagcttagactcctgcctccctctcagtggcggtgtgcctgcaagcttgatgcctggcatgtgggaagccccagggaatggtggtgtttcttctgcagtggtttgtgactatgagccctctccatcctacactgctcctatgtgcctgggcccagctccccagatggatgtcgtagatgctcctctacggcatggtctaacaattgctttctggttcctctgctgccaggaaaacagttgtcctgaccatgacatgtacatctttctgtatcctcactcccctgttcccctagaaacagagttaggcgcatctcgttcacttccttgctgcccctcccagccacttctcagtggtctcactctggtggctttggcccgtgggatccaggcccagagatgagttctagagataaggttttttatggctgtttcccatccgtctcagggattcccaagctatgctgtcctatgataggaggaccatcctatttctctggactcatcttggaccaccttggttcaatagaacaagcatctggtaagcacctgctttctgccaggtctgaacaaatgtccccgtgccctcaagggtttagaacgcagtgaagtcaatggataaatggatgtgggtctgaagaactcagaatggcaggctcaggaccccaagctcctgaggtctgatatgtttagaactcagaacttttgagactatagaaagtgcacatggtgcatatgccagacactgaagaatatctccatgtgcaagcaaatatatttaatagtcacacactctacaggttgaatatcccttgaatgaaatgcttgggacaggaagtgtttcctggtgggggtggaggtgaggatttgaactgttttcatggacattggtagctgaaaattcctaataatcactatatcttaaatcccaggtctcaagtgttttgagcatcatgccagtgctcaaaaggtttctgataggattttggatttttggattagggccgcttagctggtaaatagctacacacctgtctacttagatgagatttcaccacctattttgaggtaacacatccaaatttgggattatgaccttctgtaagaatttatcttttgagaaaaatccctgtgctgagagccatcacaggcatgcttggggcagaagctggctaggcacgtagagacgaagggagctgacctgtttgtataggtagctgggtcagatgcaggacacagagatgctttcttaccttggggcaggagctgggctggctgctggaggatcaatatgagtttcctgagcagaagagtctagatcatggcaggatgggagtcccatcttagagaagtcttctaaagtagagaaaatagcggaccatggaaaccaattatatagaaaagcagctaaaatattttaatagtgatatattaatatctatgatttttaatgtattcataggcaagccccgcgttgggtctaagcaccagaacaaggttgaactagtcatgaatataaatgacatttgtgatgagctatgaaacatcagtaatttctgctggtgacaaaggcacatgtactgtaaatatactgtgctttattgcatgcattgaaagcaaagaaaatgttacatttcggctaggtttatagagaggaatgaacaacaacagcaacaacatcatatacacacacattctctctctcacaccatacctctctctctctctctcaccacatacaaacacatacacacatgcactcaccacacattcactatacacacacacacactcactcacacacacaatttctctcaacacacacacataagcacacacattcactacacacacacacactctctctctctcaccacacagacacacacaaacacacacgcacacactcacacacacattctctctctcacaccacacatacacacactctctctcatcacacacacacactctcaacacacacacacacacatacacacaagcatacacacacacacacacacacacacacacactctctcaccatacacacacaagcacacacactctctctttcttaccacacacacacacacacacactctctctctctctctctcaccacacacacacatatacacacaagcatacacactctctctctcaccacacatacacacacaagcacacacacacacacactcactatacacacattcacacacacacatacacacactctctctctctcacacacacacaccttcccatccatgactgctcgtcacacaacacaggcagctggtcaggtagggaacagctgatttaggcacaactaatcactcagaggcagcctggaggaggaagacagagtcaggcacagtgcagaaagaggcacgggggctgagaaggcagggtgacaggcagatcagacctcttaaattttacttgtcattggaaattttttttatcacatcccttacaacatattataaaaagaatacatgctcattacagagagcgaagaaataaaaaaagaaacccacagaacattctcactgccaaggcggtgtcatggaaccttccagataattaccattctctgtggaaggctgtggcttaggaggtggtcctagggccaggggttaagccgtccaatctgcactctattccttaatttctttgtcttgtttttgtgtctataaagtgaagatgccagccattgtgcctgtttcatcaggttgctttagaattacataaatccatccctaagatgttctctgagcaggccataattatctcttggtaagtgttgacactagtcatgtcttccttggctcattcttcaatacataactagccccggtattggcttagcttgaacttcatgtagatgcacatataattttacatcctacttaattctcttaatatttttacataaataatcgtaatgctattattaactgctcagatacatttgaaatacctaaataccattctatttggccatatgacccactctttatagctattccttgatggttagacatttagtttatttccagtttcccatgagaagaatcaagaagactgtagtatagcttagccatggttccctggtgtgttatctaagggcagcagggtgcctggacacatatgacagaccagaacaataggtcagtgttttatgattacggcttaccctgcagcatggagaaagaattggaaatggagatccctagagacagaacccctaggaattgaggtcagatcggcagagcctagtgagagggaaggtgtgggagaatcaagagtgaccatagcattgacctccgggagccaagggaagtgaagcccagtggttaagaacacgagccttggtgtcagatggacttctaaggtcaagactggctcagccatatattacccatatgagcttgaataagttacttacatactacgcctttatgtccacagctgtaaagtgggaataaaatgaatcatcctcaagggaggaagaggattagcaagatctgacagaggaagatagaggagcacagtgtgggaagacggatgaataagaaaaagtatagtgatgtgtttgtctgggaatgccataatgaaacccatcgctttgtggctaactttagacagtaatacattcggagggctggggtgatggatcagcaggaaaaagcccttactgcttttgcagaggacccaagtttgtttcctggcatgtatgttggatggctcatgaccatctgcaattcctactccagggactctgatgccctctcagacccaggccgtttggcaacagagtccatgctcagactacactgaactctgccatgttgagtaggagatgccagagggcaggtgccttggctaagaccagcaggtgcttagaacttgattttgtactcaagacataagccaaatggtagggtcatctgggcaaatgcagcaaggataagtttgttcatgcagagggaggcataggtaaaacccggatcaattgaataagaaagaaagagccattagccaagagagattgtcagagagctagatgagaaactgcgctgaacaatgtcacgaaatcccagagatatgacccagctggtcatatgctaggaaagagagtcggatgagaaccagtgacaggcggtgacattcttgacaaaagctggacaaggtgagctcagagagagacctctgtaagcacggaggctctgtagttgtgaaggagagagctggggatggtgtggctggagagaatgagattataccgtgaatggggccaaggggcttcaagcccaaagccaacttcgaccttgacctactaagcatcacttaacatcaggagggaggatcctcttgaaagttgctggggtgatactgaaagcatccagcaggcagggggagatgcaagtcaagtatgagaaggcttgcatccttctgaggctcatccgaggttgggcctggccactaggttatatgcctctggggaagggtgtacttagtactgttgagtcttctgcagctttgagatgttggagcccacaggtgaagagaggacctagaagacccaaagttcagctggtacagcacaactctgtgacttgaaccatggagtcctccccctggtgtctgcaccccatgtcgttcatcccatggctcttgtggctgatggttaggactctctctctccattggaaggagccccaggcgtcagtcgtgactaggtggtatcctccacaaaccagcatgcactctttcctcacacgcagtttctaggcctgggaaatgagttctgtcatgactaagagagaaatgtgtgtggagctggggtttcagttgtggatgcaatgtcaggttgcgcagcggagagcctctttatgcagccaaggatggcgtgtgggctctgacattgctgacatgtgcagagaatgatctcagtctctttctcttcccttgtttcttcccgtctgccattcctcagtctctagcattctgaaaccttgattcccccttcctcttctgactcaggccccatcattccacatccagtcacaaatccaatctgggaccctatctagaaaacattgtgcccgacatcaaaagtcacctggccaaatggatttgcaagcttgtgaagaagtgactccagggaaatggttcaatgggctaggtgcttgctgcacaagcatgaggacccgagtttgaatccccagctcccacataaatgctggatataatgatacacatgcacaccttcaatgctggggtaaagatagctggaccctcagggctcactacctagctgcccaggctagtccaatggtaagatctaggttcagtgagagaccttgtcatagaaattaaggtggggagcaacagatgatgacctctggtatccacattacacacacacacacacacacacacacacacacacacacacacacacacacacactcacacacgcatgcacactagtgaaaagaaaggagaactctataccacaaccaaatcagacaaagtgtttaagatgagagatgtaaagtagggatgtgggaacaaggaaaggtgagtgtctaacattcaggaaaggagggaaccttccccattgaaagaaagcaaggtctcagacaatgctggtccccaggtagcacacggtgggaaccagctcttgacaaggcagccagaaaggccctgccaggagacactcttcctctttccttccccttccccttccctttcccctttctctcttttttcttccttccttcctttctttttcctttctccctttcttccctccttccttccattctttattttttttctgtttcttctctctttctcatctgcctcctctgatttcctgtctgcttttcacttctctgctggaatctcttagctacctcggtcacctgattgtcttcttttcttcctcctcaactgtctttgcatgtgaggcattaagagattgaaggctggccaccattctggtaccacctagaccttgcacctttgcagtagctgtgtcccctaacactctgcagaccagatagggagtgtgtggggcaccttggattctgtcctttggtgatggtgtggacaatttataccccctgttggctatggctatatgttgtcataacctgggtcattttcccatttaatattgtccataaacactaataaaactgtcggagagcctagtagaccgggaagagaaggagagactttagaagggatggaaaggtgcctgaattgggcatgggcagaaggtgagagtgttgggtctaaggacttagttagggtagagcctgagctgcatcatccgatctgttttcttccctaatcctgtttttgccctggctacagtgtgtcagatcctccccaagggtgtggtcgctgtcctgggaccatcgtccagcccagcctccagctccatcatcagcaacatctgtggagagaaggaggtgagtgtggggctgctttggggatggtacctgtagactggatccttgaatgcaggaagagtcaaggaggccaagctgttaatgacatcatcaatgcaaatgtgaggtagaatggctcctgggggtgggggtggggaacatgtccttttcccaagtgatgagaagatggggagacgtttgaccacaggatttccaagctaagtaagctcagtgtcttagggcccaggacagggcagtgcctgcggtggcctctctgtgatgcagagagatggaggctggtggcctggcatgaggctgagggaacagaggcctgagttctgcactgttggtgtaggcagcgtattgtcggtctgttccttgggattctggggaagaatgccttgggaggaagaagccactgctccgttttattgcgagaataaactgtaaaagccgctgctttctaagtgggtggggaagagcttttattttgtttccctcattcaccggctcctgcatgtgctcttccaagcgagatgttggtcttcaggtgtgacctctgactggaggctctctgggcccaaagtgtggaggccatttcctctggttccagttcatgggacaaaaacatgatggaagacgggtttcctagcaacttgtactttagagagcctgctgatcctaggcatcactgtgggcccgttcagaagctgcggtctttcacctacaagacaataggcaagaggacaacactttcccactcctccccacctccttacccctatgcccacgtacccctagcccccacatccctgcaccaaccatacccccacccctcccacctgccaccccccatccctgccccgcaccagcctccctatgtcccaaagcttttctggatcagtatgtaggaagcagatggagcccagactctgggaggaacatggggaggcagcaccatctcccacttgtgctagagacccgagtcttggcttttgagcagcgtctgatgctggagagcagccaggtgccctttcagagaaggcctaacatccgcagagcaaaccacccttaccaaagtcggggaatcacagacaggcttctacctacccagcttcctggaactgaatccttgatcagggtttgggaataggccctagttctctaaccccctctcagagctattatgtttaaggattttatggcccttgccacccctgttctgaggctggaattgcttctcacagagcttcagagctgccctccccccaaccccggctcagttactccggaaggtgtttcttaggcaagctcagaccgcaaagccacttctgtcctgccacagcatgtcagaggctcagccaggagctgacgtttaatttagatctctctcgctgtgcttcaggtaacagtcgagtgtgtcacaggttgttactccagccttggctctgatcttcacccggctaggttgccagtctttgagctcccacattctttggctgattccttttgctttctcttctctccctctctccacctcactcccttcactggcccttgctctcctccctcagcccctactccagaagagccctatctcagagctggagatctttcacattggcttgcgagaccatccacagtgtggcctttcaggacagaggccatgggagccactgatttacagcgtcccccacagtccaaccaggaggcactgcccagacagcagccaggcagttgcccctcccctgtctggccatgttctctccagagcgaccttgcctgccactcagattatgcatcttggttaatattttatgaggcctgactctgaggaaaagccatggagtcctcgccgtgggctccagccctttaaatgccgctaatatttctgagacccccatggctggctgcttcctgcctcctgctctcccctcagccccactgtggtgacttcctgggacgaatttgcaatcatgaatcaatcgtggattgatttttctccaagagagagaacaaaccagcagggtgagggcctagctacccttgcccaggccacagagcagctggctgcctctccagcagccttccagagggcccctgctagtgattgaacacttgcgtccagcctggagataccgccccactctctccattacacagctaaaagggcctctggaaacttctacaattagagaggagggaagggaggaaagcaaggcactgactgtgtgcgggtttgctttgctgggttgctttgctcttgacacagaatcacattctctcttccctggactctcagaaacacctgaagtccgctctattttgatgaaggttagccaggttaaatggtttgctcctggatcacacagtagaacctagacaaacaaagcagtctgtagactccaaaaaccgcgtatccttctcctccttgaagggcccctcctcaaacccagggctgggggctatgaattcatcaatgtctccaagggctccccaccatgggggagctaaggggcagagctcttctggccagctgctattgtagctcagtgagctgccagtcacacagggaggaatcagggcagagactctaagatctggatctgaatgagccagggcacctggcccatccccagccttgccctccattcagctcatttgtcacctctcctgccttcaaggtgtgtgtgtgtgtgtgtgtgtgtgtgtgtgtgtgtgtgtgttactttagatcggttgtgtgggatacaaaaatgcaggcaggaggaaaggccccggtgaaatgcactgggtcagctctgatcctgagagtcatcctccatcttcagggttttgtcaattctgcaccatgcgatccctgctggggaaaaaaatatggtcgtgttctgtccatggttcaggggctaagcctccttgaattcagtaattttctctttggattttactagatctttgctctcttcccatctcagtttccaaagagccctggtctctggcagacttctctctaaattgtaaaaggataagatggtagaatcctatagagaccatcacagcagcatctcagacccctgtagcagagcctttgagcaaagacgggcaacggaagcttctgtaatcgcatctgactaatccattctagacgccaagcgccccatcatcaggaaattcttcctgctgtccactttcaatctcacttgctttcgcatcagtacagactcaacgctcagtgtcagctttcccagctctgagtaccagagatgagagcgtctgaataaaatcaaggtggatggcagcttattacgatttaactttcccattacctaccaaatagcctaagctgtcaataaagccaccattggtgcctcttaatatctctttcccagcaaagagaaggaacgtggcaccttctagaaacatggctggtagatgtggtggggacaccaacactgctctgacgaatccagggcagatgtttgtccctttggctccatccagaggctctgaatgccccctccggcacattgctgtctgccccatacccccgggacttgctcaggaagctttctgggaactactatacaccagctatgttgggctgcactgaaaacctcctctctaacctatagggaactgtgtgtctcttcttgctccaatttattaactacagtcttgtaaggacttcaagagtgattgcactcgtacactaaagagaatgtactgaggtctctagccaaaggatgctaccgtgtcatactcccatgggcttggagcccaggtcccgaatgctgctttccccttggtgtgtgtcaaaggtgttaagcaaaagaagccctgctcaggcacagcctgggtcacccatcctgcttctgatctctgcgtcatggtggttctggattctccttgctgtcctgttttgctcttctttccaggtccctcatttcaaggtggccccagaggaatttgtcaggttccaactccagagattcaccaccctgaaccttcaccccagcaacaccgacatcagcgtggctgtggctgggatcctgaacttcttcaactgcaccaccgcctgcctcatctgtgccaaagcagaatgtacgtattcctgggctagctccatgtccaggcaggctggtcttgttcatttctactaggctatgggcacccaggcttgcaacaacccaggaatgtggtatccctaggatcctagtctgtctgactacaaacaggtacaatcaattctctctctctctctctctctctctctctctctctctctctttctctctccctctctctttctctctctctctcctctccgaatgtgtaaaagagaaacagtgcccataagcaccctttagcatggaactaggttgcagggaggctggccaactgccaagtctttttgtatctgcaaactcaattcccacattttcagcctcattgttaaggagatacaaagagagagggagagagaggtgggaatacagaattgaatgcatttgtgcttgatgagctgaagagtatcttcccccggagagcaggttnnnnnnnnnnnnnnnnnnnnnnnnnnnnnnnnnnnnnnnnnnnnnnnnnnnnnnnnnnnnnnnnnnnnnnnnnnnnnnnnnnnnnnnnnnnnnnnnnnnnnnnnnnnnnnnnnnnnnnnnnnnnnnnnnnnnnnnnnnnnnnnnnnnnnnnnnnnnnnnnnnnnnnnnnnnnnnnnnnnnnnnnnnnnnnnnnnnnnnnnnnnnnnnnnnnnnnnnnnnnnnnnnnnnnnnnnnnnnnnnnnnnnnnnnnnnnnnnnnnnnnnnnnnnnnnnnnnnnnnnnnnnnnnnnnnnnnnnnnnnnnnnnnnnnnnnnnnnnnnnnnnnnnnnnnnnnnnnnnnnnnnnnnnnnnnnnnnnnnnnnnnnnnnnnnnnnnnnnnnnnnnnnnnnnnnnnnnnnnnnnnnnnnnnnnnnnnnnnnnnnnnnnnnnnnnnnnnnnnnnnnnnnnnnnnnnnnnnnnnnnnnnnnnnnnnnnnnnnnnnnnnnnnnnnnnnnnnnnnnnnnnnnnnnnnnnnnnnnnnnnnnnnnnnnnnnnnnnnnnnnnnnnnnnnnnnnnnnnnnnnnnnnnnnnnnnnnnnnnnnnnnnnnnnnnnnnnnnnnnnnnnnnnnnnnnnnnnnnnnnnnnnnnnnnnnnnnnnnnnnnnnnnnnnnnnnnnnnnnnnnnnnnnnnnnnnnnnnnnnnnnnnnnnnnnnnnnnnnnnnnnnnnnnnnnnnnnnnnnnnnnnnnnnnnnnnnnnnnnnnnnnnnnnnnnnnnnnnnnnnnnnnnnnnnnnnnnnnnnnnnnnnnnnnnnnnnnnnnnnnnnnnnnnnnnnnnnnnnnnnnnnnnnnnnnnnnnnnnnnnnnnnnnnnnnnnnnnnnnnnnnnnnnnnnnnnnnnnnnnnnnnnnnnnnnnnnnnnnnnnnnnnnnnnnnnnnnnnnnnnnnnnnnnnnnnnnnnnnnnnnnnnnnnnnnnnnnnnnnnnnnnnnnnnnnnnnnnnnnnnnnnnnnnnnnnnnnnnnnnnnnnnnnnnnnnnnnnnnnnnnnnnnnnnnnnnnnnnnnnnnnnnnnnnnnnnnnnnnnnnnnnnnnnnnnnnnnnnnnnnnnnnnnnnnnnnnnnnnnnnnnnnnnnnnnnnnnnnnnnnnnnnnnnnnnnnnnnnnnnnnnnnnnnnnnnnnnnnnnnnnnnnnnnnnnnnnnnnnnnnnnnnnnnnnnnnnnnnnnnnnnnnnnnnnnnnnnnnnnnnnnnnnnnnnnnnnnnnnnnnnnnnnnnnnnnnnnnnnnnnnnnnnnnnnnnnnnnnnnnnnnnnnnnnnnnnnnnnnnnnnnnnnnnnnnnnnnnnnnnnnnnnnnnnnnnnnnnnnnnnnnnnnnnnnnnnnnnnnnnnnnnnnnnnnnnnnnnnnnnnnnnnnnnnnnnnnnnnnnnnnnnnnnnnnnnnnnnnnnnnnnnnnnnnnnnnnnnnnnnnnnnnnnnnnnnnnnnnnnnnnnnnnnnnnnnnnnnnnnnnnnnnnnnnnnnnnnnnnnnnnnnnnnnnnnnnnnnnnnnnnnnnnnnnnnnnnnnnnnnnnnnnnnnnnnnnnnnnnnnnnnnnnnnnnnnnnnnnnnnnnnnnnnnnnnnnnnnnnnnnnnnnnnnnnnnnnnnnnnnnnnnnnnnnnnnnnnnnnnnnnnnnnnnnnnnnnnnnnnnnnnnnnnnnnnnnnnnnnnnnnnnnnnnnnnnnnnnnnnnnnnnnnnnnnnnnnnnnnnnnnnnnnnnnnnnnnnnnnnnnnnnnnnnnnnnnnnnnnnnnnnnnnnnnnnnnnnnnnnnnnnnnnnnnnnnnnnnnnnnnnnnnnnnnnnnnnnnnnnnnnnnnnnnnnnnnnnnnnnnnnnnnnnnnnnnnnnnnnnnnnnnnnnnnnnnnnnnnnnnnnnnnnnnnnnnnnnnnnnnnnnnnnnnnnnnnnnnnnnnnnnnnnnnnnnnnnnnnnnnnnnnnnnnnnnnnnnnnnnnnnnnnnnnnnnnnnnnnnnnnnnnnnnnnnnnnnnnnnnnnnnnnnnnnnnnnnnnnnnnnnnnnnnnnnnnnnnnnnnnnnnnnnnnnnnnnnnnnnnnnnnnnnnnnnnnnnnnnnnnnnnnnnnnnnnnnnnnnnnnnnnnnnnnnnnnnnnnnnnnnnnnnnnnnnnnnnnnnnnnnnnnnnnnnnnnnnnnnnnnnnnnnnnnnnnnnnnnnnnnnnnnnnnnnnnnnnnnnnnnnnnnnnnnnnnnnnnnnnnnnnnnnnnnnnnnnnnnnnnnnnnnnnnnnnnnnnnnnnnnnnnnnnnnnnnnnnnnnnnnnnnnnnnnnnnnnnnnnnnnnnnnnnnnnnnnnnnnnnnnnnnnnnnnnnnnnnnnnnnnnnnnnnnnnnnnnnnnnnnnnnnnnnnnnnnnnnnnnnnnnnnnnnnnnnnnnnnnnnnnnnnnnnnnnnnnnnnnnnnnnnnnnnnnnnnnnnnnnnnnnnnnnnnnnnnnnnnnnnnnnnnnnnnnnnnnnnnnnnnnnnnnnnnnnnnnnnnnnnnnnnnnnnnnnnnnnnnnnnnnnnnnnnnnnnnnnnnnnnnnnnnnnnnnnnnnnnnnnnnnnnnnnnnnnnnnnnnnnnnnnnnnnnnnnnnnnnnnnnnnnnnnnnnnnnnnnnnnnnnnnnnnnnnnnnnnnnnnnnnnnnnnnnnnnnnnnnnnnnnnnnnnnnnnnnnnnnnnnnnnnnnnnnnnnnnnnnnnnnnnnnnnnnnnnnnnnnnnnnnnnnnnnnnnnnnnnnnnnnnnnnnnnnnnnnnnnnnnnnnnnnnnnnnnnnnnnnnnnnnnnnnnnnnnnnnnnnnnnnnnnnnnnnnnnnnnnnnnnnnnnnnnnnnnnnnnnnnnnnnnnnnnnnnnnnnnnnnnnnnnnnnnnnnnnnnnnnnnnnnnnnnnnnnnnnnnnnnnnnnnnnnnnnnnnnnnnnnnnnnnnnnnnnnnnnnnnnnnnnnnnnnnnnnnnnnnnnnnnnnnnnnnnnnnnnnnnnnnnnnnnnnnnnnnnnnnnnnnnnnnnnnnnnnnnnnnnnnnnnnnnnnnnnnnnnnnnnnnnnnnnnnnnnnnnnnnnnnnnnnnnnnnnnnnnnnnnnnnnnnnnnnnnnnnnnnnnnnnnnnnnnnnnnnnnnnnnnnnnnnnnnnnnnnnnnnnnnnnnnnnnnnnnnnnnnnnnnnnnnnnnnnnnnnnnnnnnnnnnnnnnnnnnnnnnnnnnnnnnnnnnnnnnnnnnnnnnnnnnnnnnnnnnnnnnnnnnnnnnnnnnnnnnnnnnnnnnnnnnnnnnnnnnnnnnnnnnnnnnnnnnnnnnnnnnnnnnnnnnnnnnnnnnnnnnnnnnnnnnnnnnnnnnnnnnnnnnnnnnnnnnnnnnnnnnnnnnnnnnnnnnnnnnnnnnnnnnnnnnnnnnnnnnnnnnnnnnnnnnnnnnnnnnnnnnnnnnnnnnnnnnnnnnnnnnnnnnnnnnnnnnnnnnnnnnnnnnnnnnnnnnnnnnnnnnnnnnnnnnnnnnnnnnnnnnnnnnnnnnnnnnnnnnnnnnnnnnnnnnnnnnnnnnnnnnnnnnnnnnnnnnnnnnnnnnnnnnnnnnnnnnnnnnnnnnnnnnnnnnnnnnnnnnnnnnnnnnnnnnnnnnnnnnnnnnnnnnnnnnnnnnnnnnnnnnnnnnnnnnnnnnnnnnnnnnnnnnnnnnnnnnnnnnnnnnnnnnnnnnnnnnnnnnnnnnnnnnnnnnnnnnnnnnnnnnnnnnnnnnnnnnnnnnnnnnnnnnnnnnnnnnnnnnnnnnnnnnnnnnnnnnnnnnnnnnnnnnnnnnnnnnnnnnnnnnnnnnnnnnnnnnnnnnnnnnnnnnnnnnnnnnnnnnnnnnnnnnnnnnnnnnnnnnnnnnnnnnnnnnnnnnnnnnnnnnnnnnnnnnnnnnnnnnnnnnnnnnnnnnnnnnnnnnnnnnnnnnnnnnnnnnnnnnnnnnnnnnnnnnnnnnnnnnnnnnnnnnnnnnnnnnnnnnnnnnnnnnnnnnnnnnnnnnnnnnnnnnnnnnnnnnnnnnnnnnnnnnnnnnnnnnnnnnnnnnnnnnnnnnnnnnnnnnnnnnnnnnnnnnnnnnnnnnnnnnnnnnnnnnnnnnnnnnnnnnnnnnnnnnnnnnnnnnnnnnnnnnnnnnnnnnnnnnnnnnnnnnnnnnnnnnnnnnnnnnnnnnnnnnnnnnnnnnnnnnnnnnnnnnnnnnnnnnnnnnnnnnnnnnnnnnnnnnnnnnnnnnnnnnnnnnnnnnnnnnnnnnnnnnnnnnnnnnnnnnnnnnnnnnnnnnnnnnnnnnnnnnnnnnnnnnnnnnnnnnnnnnnnnnnnnnnnnnnnnnnnnnnnnnnnnnnnnnnnnnnnnnnnnnnnnnnnnnnnnnnnnnnnnnnnnnnnnnnnnnnnnnnnnnnnnnnnnnnnnnnnnnnnnnnnnnnnnnnnnnnnnnnnnnnnnnnnnnnnnnnnnnnnnnnnnnnnnnnnnnnnnnnnnnnnnnnnnnnnnnnnnnnnnnnnnnnnnnnnnnnnnnnnnnnnnnnnnnnnnnnnnnnnnnnnnnnnnnnnnnnnnnnnnnnnnnnnnnnnnnnnnnnnnnnnnnnnnnnnnnnnnnnnnnnnnnnnnnnnnnnnnnnnnnnnnnnnnnnnnnnnnnnnnnnnnnnnnnnnnnnnnnnnnnnnnnnnnnnnnnnnnnnnnnnnnnnnnnnnnnnnnnnnnnnnnnnnnnnnnnnnnnnnnnnnnnnnnnnnnnnnnnnnnnnnnnnnnnnnnnnnnnnnnnnnnnnnnnnnnnnnnnnnnnnnnnnnnnnnnnnnnnnnnnnnnnnnnnnnnnnnnnnnnnnnnnnnnnnnnnnnnnnnnnnnnnnnnnnnnnnnnnnnnnnnnnnnnnnnnnnnnnnnnnnnnnnnnnnnnnnnnnnnnnnnnnnnnnnnnnnnnnnnnnnnnnnnnnnnnnnnnnnnnnnnnnnnnnnnnnnnnnnnnnnnnnnnnnnnnnnnnnnnnnnnnnnnnnnnnnnnnnnnnnnnnnnnnnnnnnnnnnnnnnnnnnnnnnnnnnnnnnnnnnnnnnnnnnnnnnnnnnnnnnnnnnnnnnnnnnnnnnnnnnnnnnnnnnnnnnnnnnnnnnnnnnnnnnnnnnnnnnnnnnnnnnnnnnnnnnnnnnnnnnnnnnnnnnnnnnnnnnnnnnnnnnnnnnnnnnnnnnnnnnnnnnnnnnnnnnnnnnnnnnnnnnnncctgcatgctgggcaaacactcacaggctgagctactccccagcagcctgatgtagatatcttctgcagtgtgtgtgtgtgtgtgtgtgtgtgtgtgtgtgtgtgtgtgtttctttccttctaccatgtaggtcccagggtatcaaactcaggataccactgggcagcaagcacccattcctgctgaaccatttgatagtctctctctctctctctctctctctctctctctctctctctcttttcttttgaaattggctttctcactgttcttggagcttcttgaatcttctctaaactggcttgccatggagatgccaaaactcacgtgtctctctggggctgctctccgctgagcacagattcacgagccttgccactacatatggcttttcagagtgttgaggatccaaactcaggcctctatgccgtacagtagacactcgaaccctgagccttctgcgtaggccccgtgtttagattttgatgttggatcattgtgtcccctgaagagacattactcaagcatctctgcccgtcctgtgtctataactaactctagatccactttcacagccttgatgtcctccctcagccctggagcccctgccttctacttcctgaaaccagcctgtgcccttcctcctagagcagttgcctattgggctccacattgatccactttggtcctgatggaaactaatggcttccccaggctcctcagcccagccttggcaggcaggctgccgctgggccagcattctgtcccatcctatgagagagaaagactggggtggggatggtggaaacctgaagggagagcagagtttaacccctgtgatggcggctgtgcccggtaaatcctttagttatagtaaagaggtgagagtgacacgggcccagcagcaccaggcagggcatgctttcccttctgtgagtctcccacggcctggaaacaaaagcaccaacttccggttaccaccaaacatgattgcctgagctggaatcctgggatccacatggtagaaaaagcatgggctccacaaagtgctctctacgtgagcatgtgcacatgtgatgtgtgggaactctctctctctctctctccctctctctctctctctctctctctctaacacaaatacaaagttaatgttaaaaagtttggttttgggcgggttgttttggggtggttttttttttggttttggatttttttgttttgggctggttttttgtttttggatttttttgttttgttttgggctgtttttttgtatcctgtttcagacttgcagaatctgaggcaccctgagctggagatacatggcttttctctctttctacttcctgcccatagtttaattccctagagaaaagtccctaagagtgccttcctgatgatgggtttctgcatgccacacaggcagcccatttgcatctgtagacagtgaaaccaagatgctcccccagtgtgagcaagcctctctccctgtgacatctaagccttcacagtcctgaggcctccctgaccaagtcttccctcagaccacaccccttccattaagctgcctgcttggtgacagtgtgacaggtctccctaggcactggcctcagggttacttcctccagtttctaactcagtctggtccaacaagtgctgtgtaccggcctttcctggggatgtgcagaggtctctgaaagggttccctgcctttcctgaggggaatcactcaggtatatagtcttgtattcaggtagttccaacttacagtgatctaacttacattttcctgcttttaccattggggaagcaatgtgccatcagtgggaaacgttcttaaggggcttgcgagatggctcagtagctaaagtgtgtcatacaagcatgaagacccaagtttgggttttccagcgcctacatcaaaacctgggagcagtgtcatgtgctttataatcttggcactaaggggataggaacaggagaacccctgcctgggcttgttgggcatcagcctagctgaattggtgagactctggctaggggagaggctcttcctcaaaacatagagcagaaagtgattgtaggagacccctgacattgaagcccctcccaccaccacctcctccaccccacacattcataccattctcgaagtttttgatttggatcccttccctggtatagacctcacacttttgggggatgctgggcagtgatagtaagtcatgtgatcacaagagggaacccccccacacacacacactagagtgtacagtgtatggtgttgctaagccacagtgttccacagcagcagtgagcgtgtgcagtgtgttttcagattaggagagctccagctgacaatagccttatcaggattgaaaattcagggcactatttttgctggtaaatattttatgtgatttatcagcaggggctatgatttaggtgctgggtgattgctcctgtaagtgttggtgggggaaatgggtaaagacttgagaagggagggatgtcttcagcaggagaagcaagtgcaagaaaaatacaaacaagctttgcagaggcccttctgggtgactgacacctcggtgctgcgtgactaactatctcataaccttgctcccgatcgatcacccagatggggggcacagtaggctggggacattgtcccactagctcccttgctgtgtttgagcctcaatattggccattccaggtaggggaagggatagttacctgatgggggatgggtgcactcacctttaggggcactcactgcctttgtctctagccctccctctttgcacacagaatatggggagaagcagaggaatgcactgtcaagggtagcagagcagcccaggtcagtggccacagatggattggagcagaatctctggtgtgtcagtggcttggcttggggagctctttcctcaagatcccagggcccctgctaggatgaaagggatgatgggtccctgtgctgcctttgtcaggtgtcaccattctgcgcaccatcctgctgtattcccccaggattcctggtctcgctctcccgaatggctttgtccatctcatatgttttgggttgggggaggattagcctctttctagccagcctccaaagattctcattgctacagaccaggcctgtggggttcacaagacttcccacattttgctctttctggcctcagtgatcactcaatgccaagggacctggtggagaccctggagtgccatttctgtgccctgacctcctggtgagaacagtgccttttggggcagaagcttgggtctgtatctggtggaggctagcctctgctatcatctcattggatggcgcagtatgccctttctccatcttgcagctaggacaaaaaggggctgttcccccaggagtctaaatccactcaggtcactaaacaaagcagggagtatgatttaactttactctccacctatgctaaacgctgagggcaggatccattgtgtctgcctgctgtctgtatacataaagcccccagggacatacctccttcaatgaagccacacctcccaatccttccaaagctgttccaccaacaagggaccaagcttatgagcctgtgtgggccattctcattcaaatcaccacatactgtttgtgaagcaagttattccagcccaaatctctcactagggagcatccagctccctggaagaccttctcaagacttagagtgaagtagtggtagggggcaggacacagacacaggaagagtcacaccttcccagctttctcctccatcaggcaggacctcaagctcccactctggttccttgtttcaaaacaaaacaaaacaaataaaaccactcttattgttaaacaaaacaaaacgaacacactgagtattggcttcccccacttacgtgtccagatgcacgcccatggccctgctgcttccttctttgttctaagaggcaatgtggtctcctggataaaggatctggtggaggtcagaaagtgggttttctagtcccagctgtgtccctcgcatgtgtgactacacaagtcaccatattttttatgacagaaggactgggtgggtggtcctcagtgccacctatcaatgatgccaactgtctttagagggtacaggagagagtctttatgggctgcattgatggcacctctgaattgaatagtgtgtcggtcagcactgaagctggcatagggaacatacagtggtagaaaaatcagccttcttttactgcccacagcacgaggtgccttccttacctccctgcctcccattcttcttggagcttgggaattctaatactgtacagtattgttatgaagacttacataagataagccatgttaaaaatttagtacattagccagagcataataaggtttgataaacgtttctcctgtcgttgctctgagagcaaatgcctgcaggtatctttctaccagactccagactactggctcgggggagatggctctcccgccacacgtctgccctccccctggcctgccttggcagggacagacagaatgaaacccctttagtctctgcaatgttgttctggatcatttcttcacaccaatacccctgacatctactagctgggggtggaggggaaggggagaatccttagcccagggtcccctttccctgtttggttctgagcctagtcttgctgctgttcaaagccttttcttttatgatcatgataataccttgtcttagagcagccacagggctctaaagaattcaaaaggttttgctaggactctttcctgggcctcaggatcttgagggaactgctttgccaccaccaaaatggaaacaaaggcttttcttgatggagcttgatggagcacttctgggttctcctgagcaccgggagagcttgacagtgcagcatttaatggatgcacagccccgggagctgtccgcgctgttaggattcattcttcttggaggagctgattagacaaccggctacatgagaaggttctggaagtggggaaagaaattcaggcctgctgctctctgaatccagctctcagtcactgggcacagtgcttcagagaaggaggtagggcccctccctgaagaggcctcaggttctgctctaaaggtagaggactgctgggagctgatgggagcttctaggggctccttacagttagatagcataactgaagctcaagaggcagacaaacctgcttagggtttaaagctcatagcatcggctctgagctgcactgcttcactatatggcccactttttggtgagtgtctgtggagaccactttgcagaccctcaggggcttcctcctctttcccatcccaggccttttaaacctggagaagctgctccgacaattccttatctccaaggacacactctcggtccggatgttggacgacacacgggaccccactccactcctcaaggagatccgggatgacaagacagctactatcatcatccacgccaacgcctcccatgtcgcacaccatcctcctgaaggtgggagcctggctggggtgggtgagaggaggatggttcactctccttacgtcagctttcctgactcgagctgtggtcatcccttggtcctgggatggatctaactctgtttccgtggacaacaactcctccaaagagaaggcaggatgaggttgtcactcggaaacacttagcacctggtggggctgagacaccagttggactagagtgagatatgagaggctgcagtgggggccacttgtcaggcagtgtacctagagcaccgctcacgggtggtgccgacggtcagcccatcctcatgatgatgtttcaacagccctgacagtgtttcaacagtttgcaaagtgcctccctgtcattccacagcacagccctctccgaggtgacatgaggtgcgtctgttgttgtcttcgtcatgtaggtgaagaagataactctgggaggttatcagctgtcagaggccagggcagcagggctcagcatagctagtgggagcatccctgccagggtaggcactttctattgggctcatgatgctctagatgtctgagcagacataggtacttggtcgtggagctttgtcagagaggtaggtcctggagagagagaagtcaggtagttagggtcacatggacagctggcagcagctggccagctgaggtgccacctggctccagtccctgggctaagcatgtgcttcagttagcaagccttgctctagggtcttcctgggctcctcagcagtcctcataactgctcaggcacagtgacctcgcttaatgctgtttaaattgcactgccagcttccactgggtagccaggcttcttgttaacctttgnnnnnnnnnnnnnnnnnnnnnnnnnnnnnnnnnnnnnnnnnnnnnnnnnnnnnnnnnnnnnnnnnnnnnnnnnnnnnnnnnnnnnnnnnnnnnnnnnnnnnnnnnnnnnnnnnnnnnnnnnnnnnnnnnnnnnnnnnnnnnnnnnnnnnnnnnnnnnnnnncacacacacacacacacacacacacacacacacatatacatacatacacacggatccatatacagagaaagacataaagacatacacacactgacacacccagagtcataaacacacacagagatacacacacacacacgcacacacacacacacacacacacacacacacacacagatgcacatacagagacaaacataaatacacacagacacacagtcatgaacatattcagacacacagacaaacatacagacatagagacatacttatatgcacacaaacatgcacagacacacacacacacacacacacacgctcctctttttgctcttttccttctcacatcaggagatattatccatgatgtcattaagaatgaaaggcccctgtaggcttcaggggacagcaggctgagggtcatctttatggggaggagcctcagctgtaatcagaagcccttccagcgtgcttgtggagagcagaggctggaggaggagcggctgtttccaagagtgctccacaattcctgccatagcaaactgaagttcccctgaacccctcattatacccacaccctgttaaccttctgagtttattgctgagattttaaaaatcacctcaaaaaaaaaactgcacaaagaagaaaataaatgtcactcacaaccctcgcagccttaacctttcctaaaattttgatgtctattctttctgcttcagacgtcccccaatcatccccacgctgtttaaaacctcctgtaatcagccattctttttgctcaactatgtatcacacattttccatgtcattaaatatttctctacagatattttagtggctgtatcgtttcctatcatgctcgtgtcccataatttatttagccatctcttcatccttgtagaaacaggttgtttccaatcttttgctatgataaataatgttagggcacacatcttcatgcataaatctttccgcacgtgcgttcgtgcatatttctttagcatatgctctcgatgtggaataccaagttcaagcgctacatgccctgaaggaatttgggatgacttgccactcaaaccctttacatgctcagaagtaacagacagcgcacctttgccagtatttgggatgctcttttaagcatagcttgtgttctcctgtctcttagggattttatgcaggggaggagaacctgggatggctggatggatttacttagtgcatcatgctttcgaaggcaactgtctatagtgatcctcgttaaccaacagctgctctgggtgcctgtggccgccctttctagcctcccctccctttttacttacactcttgcatctttacagctgaaatgatcaatgaacagcgaggcctttggggaaacttgttcccttgcttcccacctgacatcctggtagccacaggcaggcagtatttccagcaagcctggcctctctcctcaggcttccacgaggctccacgtttgtctcctggggctcacggagctttctaggctctggtatgcacttgggagccatgctccggttggcagctcttggcagcttcttgctttgaggaggctttgcacagtaatcccctactttattgagtggctgtttcagcaacgaactccatatttacccagaattcatgtcttaaaaagcgaggatctcttgtcttttatctcttggaaagcaggttttccaaaatggattttaactactgactgtgccccttagcccgctcctggctggatgcctgtcagcagtagtcatgtgaacactaggcagtgttcaaggcagtggtactctctcaggaaggatgtgagtgggtacggtaaggtgtgagtggagagaggcatctgccttattgttgtcttgggaaaagggataggaagtgttaaagggaggagcccaatgaaaacttcatactctgctgcagccccacaccatcttgatcttgtcaccaagcccttcaggcacccgttgggactacggtgatgccattgtaccctgaacctcaagcagctgtgaagatgcaaagttaagaatgctctcaaagttatttgagttcttgggggagaaagaggaaaatgcaattaccctggtcttgtttctcccttcctccttcacaatagttatgacaagagccatctcccagtggcccggggctgcaggatatatatgaaaatctaagggactgtcaggagggatgagggccctagagagagccaggctcattacttacatgatctccttgtcaattcctatagcacctgtcacactcaaagccaggcacactgacagggaaggttggtcaggggtgtttgtgatgggtacagagagcagacagaagggaggctgtaccaaagccacagttctcagctgcaggatggcaccacaccactgcacagcgatcaagggtgaagcatgtcacgggcaattgttccttagcaggagcaaaagaatcaggcttgcaaatgactcgcttagtctgcaggtacagcctgctcaggtctcatgtacattctgacagacacagggttcatttgggcgtgctccatgtccttcatctcagtccctaagagtgctgtgtgtgcactttcatcaagcttgtggtccttggcggggtagtgtggtttggctacagtgcttgtccccctctggttaacccatcggaaggctttaaactaccgagcacaaaacctaatagtggatgaaccttagccagtgttattgttaggactcatgaaggttattctagtatgttttcttacttgcttcatttcccttaaatccactctgttttctgtaatactcagtcccatttgtgggagtgtgctatacataagaacaccagatatgtgcatgtcacccaaggggaggggaagggtggatagaacatcctctagaggctaaagtttctgtcttgcattctctagcttccagggccacttgagaaccagatgagatgttcctctctgccttgtgctgagggttagtggaccagataagtggtagaggcggtgtcccccactgcttctgcacttccagtgaccatctcttctctaatctccttctctttgcattgcaggcagctgaactggggatggtgtcagcctattacacatacatcttcaccaatctggtaagacatttccacagtcctcctctttagcatactgttgtcaggggccagggcttgtgggtcctgatgggatgatatctggaagatggtttgtggggaaagagaggcaaaaagagcagaagccgacatagtgtgtaagcatcgtgaagacacaggatccagaagcctgtgggatgctcatgctgacactaaagccctgtgagggtgggcatttggaggctctgatgcctgcctcctccaactgtctctggtcttatagcaatgattcctcgtggcagatgggtgatgggtgagcctcttcagtaggtacagtttctggtctgcagtagagtggcatcctttcccacacacccccccccactcccagtcacgatgataactcagaagggggaaaactagagcactcaaagtatgcacatctgctggtgttgtaaccgcatgtgtctccgcaggtcatcttagctagaccccttattttacgaatgagaaaactagaactttactgaattaggcttaagcattaggtgtgccaaaataccagccatgagcccttcaagaaagctttgagatgtgtgtggtgtgcttattcatcagatatggacatgaacagctacatcactgggctgtggctaaattataggacttaacacatgtggaagcattttgaaattttaaagcattaagaaatgtgaagatgctggccagtggtggcacaggcctttaatcccaactcaagagtagttagaaactaagaaaacaagcattaaaataaataactggagtggagccatggctcagtgcttaagactgagtggtttagtggttttgcaaggacccaagtttggctcctcccacccaatgggtggttcacaacaaccacctataactccatctccaagggatctgatgccccctttcgggctccacgggcatctgtacttacatgcccacactaacacacagagacatgtgataaacatctgatcctttaaaatgtgtaactttaacttaggaatcatgaaaagatacctaaggagtcacaaaggtagctacatatttttgtttgccaatcttggggcccacaaggctttcctagggccactgctctagagttccacctgccatgccccttcctaccactgctaaaccttagcagtcactaagctgtgtcccacctctctcattttagagtttgaggaaagtgatactgtgggtgaccttctgaggtggcatgttcacatggtagagggccctggggacccatccaggatttttcatctttactgctgtttaggcttcatggtttagttgtccctcaattcgctcacaggctggatgatgttttggatttcttctgaatgctactatagatcagcatttagagaagtttattttattttatcaattacttgactgggggtagtcattacttttctcactgctctcaccaaatacccgacaagaagcaacctaagggaggaagggtttatttcagctcgcagtttgaggagacggttcaccatgttggtgaaggcatgtctgggagtcaggctggaagcttggagtttgcaacaaaacccatccatttttccactctaagggcagagtgggatcatgctggaactggggccaggctgtactctgtaaggcccagccctcagcaagccacttcatccagctagacaccccaccttccaaggactgcacacttccccaaacagtactgtctgggaaccaagcattcaaacacaagagcctgtgatgggtatcttacatccaaataatgcaccggatagctccttcatcctgatgtgctctcaggtgtgttcctgagtatttttggtatactgagtgtcttagttaggattcccattgctatgaagagacaccatggccaaggcaactcttataaaggcaaacatttcactgaggctggcttgcggtttcagaggttcagtccattatcatcatagcaagaagcctggcatgctttgtaaaaacccaaagtacctcaggcaataaaacatagagaattctatttctagatatgtcatgaatggcaccagcctcttgggcagggagtacatgctcaccctaggacaatagggagcagcttcactgaagaaagttctagaagaaaggtagggtccttctatacacacacggaaaggaaaacacaaggtagggaactgtatccccaggtagctggacagaagatggtttgtggcatgtccagaaaacagcaagggcctttaatctcatgcattcccaggaatatgagctcacttgtttttagtcactgcctgtcgatgcccttctttgaaaataatgggtgaattttaagaagacccttgctaagaaagagacttcagcctcgcagcttggatgctttcgatcttacaaagagaaaggttgcttgttagtaaaggccttgctgacagtgtgcatgggatctttaaaaggccatgcagtctccctcctgggaattggggcaggtctctttcatggtcttgcagtatttaagagatgcttgtctagagaaacaggtctggattgacctaggtaccatggacagctccctcttggggctgccttggaattgctaaccctgatatatacataggtcagctgagctcctagaatgaaagactgcaaaggaatgaaccatgcctcttccttctggtatgggatgtccctccacctgtgcaaggaagtcattccccatggcttgaatttgagagtacatggctggctcctcaaacctctaacctatactgtggtttgctgtaactgttttaacttttatagcacaggctggcctcagaactcatggcaatcctactgcctcggcctcctgagtgctggagttacaggtgtctgccaccatgcctagcccacgggaccatttattccagtctggtgtgcatacagagcactgtgcgtgttatatatgcacagagcaaagagctgtctccaagtgagcgcacctgtgtaagcagcctgtacatccagaaatagaatgtcaccagaaccccagaagtcccccctcactcccctcaaaatgtaaaatagaacaaactcctttgtttgcccttttttttcccttctatctaacactgcagctgtgaatccaagaattaacatgtaaaaagggagaagaggattaggctattcccacagcaatgcaaatgggtttgcttaaggtgagggggcatctggggcagcctgggcaagttggcaagaggggagagggattaaagtacagtcctgctttgttctgagactgtggtgggggtggggacaaagagaggagggaagaaaggcaggtggatggggtgaagttgtctgcactgtgccagtcttgcatcagacgagctcaggttggagctgggcatctgcatgccacccagccactaggcaaatggaagagagcagttccttacagtagtcagcatgagatggaggtgctggcttggggctctaggaggacagcatccgatctgccgcaggccatactgtctatcaccattctctctccttgaaggatgacagtgttctctagtgggaaaaaatgtaccctcaagtcaggaggcccaggaaccaagtcttcatactaccttgtcttctctgggtgactttaggagagccgcacctactctcagcggtccccccatccccaccccgtttcctcactttagagataaggaaaccttaccatagtctgtggcaagcctcctgagtccctaaggagccatgtggtttatcatagcagaaagatgctttcctccttgttggtgggcacccaccgggtgagaatagttctgccttcagcctcagcctgaggtctttgcacctggaatcatcaggactcgtgcccgactgagggatttcaagcggaaagcagagatctcaccaatctcaccatctgagtgatgctacctgggaaacagtcaagaaacagaagcaggaatgctgcagaaaccagtcagtgggagagtgttctggaagctgcttgccagtgccttgtttttccagcaggaacaggatccagcaggggtaaaacattgttttagggccagtcttgctgcctggagctttcagagtttggaaacagagcagaggggctttgtggtggtggaggatcttctatacgctctgtagctccttccatcacacacaatgcactgggatttccctctccccacccctctctcagaccctcggggaaccccatcttgtcacctctctctgacttctgcaacagtgatgtgagttctcaggtctgccttttgaaaaccagggtggagaactggaaaagacatagacctgggcatctgatagacaggcctttaaccttctagtctgaggagctaccagctgtgcggactacttaacctaactgagctctggtgacctctttgatcagtggcccctgtacctagctcaggagagcaatcggctcacaataagagtttaataaaggggggttgttatgttagagagtcttggctttgcttcttgtgggttcacaggaacagaaaacatattttgctccccagagaatgatttctaaaataccattctctttatttctagtgaatgatcagttatgtgcacgagagtgctttccattgtgggatgtttgtgtgcatgccagtaattactgagtattgaccaggtccccacacctcagtcccatccaggtgttaagaacactgattgacatagggcattttcgataaatgaattagactgacaggtctgggttcgatctgttgattacctatatcaagaggtgggcccaaatggccaatcctaaattaaacattaagccatcaatccactgaaccctgttcgtgctgcacaaagcatagtttctttcttagtcagggcttgggcattggggagagtgtgcatgtcacccttaaactttgagtgacatgggagactgatgtgagaagtgttgctgagtcaggaaaaaataaggctgctcttgggtccagcagagctcaacagagtctatggtttaacagccaggcttctgagtccagaggaagcccaacttggtggcagagggacaggaaggtgtgaggcaatgagggacacttcagcagcaggagatagacctgtgtttgggccaacacccctgctctggccagaataaaaagaaaagtgcacagtgacagtgcacagcaagaggattttaattctcttcttcatttgcagatggatttagggatgcgcatattggtggtttaatctgtcagcgaagcaacttcttgtccccagttatgattctcatgaggcacaagtcagttccagcagagcaagtctttgatcagtagatggggctgccacccagatggtgtgggagccctgggacaggggtttggctcgtggggttcaaattgcaaaacatgagcagtcatagaaagccagaggtgcacatggccagaggtcaggatcaaagaaggtaatgggagaaagtgaggcctggccagcagaataaataagcgttaggctaaagagagagagcatgggctgagaaagggacaaagcagggcaaagaagagtcactgtgcaaagtcctaaggtaacacatgcaccgtacagaggacccgttcctgccctggtgcagaagtcactcgaccaaccttccttctttctcttctatgctttctctcttcatcatctccctctccctnnnnnnnnnnnnnnnnnnnnctctctctgtgtaaacatatataacattaaatttgccatttcaagcatttaagtttacaattcagtggtatcgacacattcccgtttataaaccatcaccaccatttctaaaacccaaggaaacccaaacacaacagttcctgttctttctcccctgcccctggcatcctctgttctttcttctgtgtgaatacagctcttcttgttcctcattcagggaccttaaacaatatgtcttggttggtgtctggcttagtgcactcagggtgatgttttctgggtatatccatatcgtaccatgtatcagaatttcatttcctttgtctcaacaacaacaaaaaaaaacctctttctgttatgatagaaatacccaccataaagtttaccagtttagtttagtgtgtctttcagtgggattagcctattcgaattgctggccaccatcatcaccctccatgtctacgttttccatcttctcaaacagaaactctactcttataaccctgatcccctcctcctcccagacacgccctggccacaaagcacacttctacaccgtcaactgaaaatgactgcctgcttcatggaaatgaagtcatacaatatttatccttttgtgtctggcttgttttatgtagattatgtctttaagtctcatccttcttcaagctgaataatatagcatcgtgcatgtgcatcacatcctgcattaacacatagtgagtgctcacggtgtttggtattgtggctaatagtcccatgaacatgagtgtccctcccactttctgctttcactcttcctgggtatgcacctaacgagggaactcactagacagtcatcaccttttaatgtattgggacatcaccaaactgttctctagagtgacttcaccatgcttcattcccaatagcaatgcacaggaggtagagttttgctacaatcttgccaatatttcttaatttttatcttttagtgagagccactccagtgggtgtgaaatgctcagataaatttcttctctctcgttagagtttgcagattgggagagtcaagaccgcagggctgtagtgtagggcccttctaatgaagaagctttgcaataagaggaagcagctggtgtttgagagtcaagccccgatggatgttcaggacaggtgagaagccctgcttctgaggtgttcagggacttgtgtggacctggggctcttcggactttggttttcccattagtgaggtgtgtataggggtaacgcctatccctaaaggttcttagaagggatttgaaaatatctactggtggcattgtagctgctaagcagagctaactactacagccattcaactcacaaatcccacagcttcactatgcagaggcaaacacgcagtctcttactgtggcaagggatgggttgtagggccctttgtgaataataatgataatagagatgcagatgttcaagtccctcctttatgatgtggcattctctcccacatactttaaatggtctctatatgaatacctactgtaatgtaaatgctagcagctattatttggaaccatttagggaacagtgagaaggaaagtgtctgcgcttgctcagcccagaccttatgtcccctgactattttcaatcatctgttggatgaatcgatgattcagaacccacagatatagaaggcagatcttacatttcttaccggaagttcgacaaggatagctgggatagaaatagcctcaaataaggtcatttagggtcccaggcattttctagcttataaatatgtctcatgaaggtcaggggtaggggaaaacatggaggttcacacacagagtaatttatgagtcaagccttgaagtcctacagatcacttcttacaattccattggctagatctcattacatggctgcacctccctgcaaagatgtctgggaaatgtagtttagtgcctaggcagaaggggaaataggtttggccgtcagcaaggaatctctgccacattattgaattactaattgctactgtacttctcttttgtgtatgctgcaagatcagttgacgccaggaccctgtcttgtctgtttagatgagaactgatcctaagagtgggtattagcacctgttggctccccagtaaccacaattgctgtggggctttgagtgtgcctgcttagatagggtgcacacgaaatatatttcattcggttgctgagtggaatggaatggagtctctctgcccttcagcttgcttgacggcggttggaggaatctttatttcacaagatacatgcaggttggatacaggacatgaagaattaaggctctgggcaaagccgtctctgttattgcggcttgagaagaagaggtgaagaggaagcggggtttgagctaataaatctggaggggttctccagctgctaatgaacccagcaagagctgcaatcacttcctaataggaaagataagatcaccctaatctactgtcagagggctcaggcagtcgatgtgccataggagggagctgccaccttggtggggagaattgtagagatttaggggtaaagtcgaaagtctcacaggatgccaatgaaaagctggaaatgtgagcaccaggagcctgggcatcctctagcctcacaggcagcctggatctatgtcatcaccaccgttcctgtaatgctgccgctgtgggggtgtgtttaaaagcagcagctccccagacttgttccctgggggaatctggagagaggctaaggagaatagttatggcagcaggaggagtcgagaaaaaccagactggcagtgaagcccccgggacgccaacgactaatcccggcacggatgctgggtgacagcaatggctgtacttgctgtttattgaatgacttctctgggcatggccctgtaaacactgcaccgtggttattttctcatgtaagcctcacatcaactccagcagaaacagctattttgttcccatttacaagagcagaggctgataatgccttggtctcttgcttgtagtggagccagatcataaagccaggcagttagctcttaaccgccccgcttagtcattccgtcgtctacgccagccattccttcttgctgagcttagttcgctgtctgtttattatggctttgcacgaggaggtctccgagggtctttctaagccttggacttgtttctctatacattggttgggagcaatccaactcacaatgtcctggggatagaactgttttctggaaagcgggaagaacgacacactgaatggaggccccatgtggcccacagaagcagtgcctgtttaggtcttttctgtcacaattatagccaggtcccagcaagctctgcagtaatcacccttccacgtcccaggcgctccgtgtttcagcaggaaaggtgtgtgcagctggccttcctcccctctgttcttttactgccaaacagacttgagtttgtatttattttccaaaggcttatcagcgagattagccataagtaattgaaattgctaaaattattacaggaaggggaaacagggcagacacacagagaaaaaggcaattaatttctggagaaagggtgaatgcctttatcccaatcgtctgctcccatctacggcgagccagccctgtccatcttccaggcgttccttaatgtcactcttccactgaagtcatcctgacacatcaccaggttgagtgtgttgtcactttcacaggtaggtatgtgtgtgtgtgtgtctgtgtatggcacactcatttatatacacacatatatatggctgcacacactcatgttcacagatgtgtgccagagaaagacatcagatctcctggtctgttgctcttggtctccatcactgtacctggagcttccatttcagctaggctggctgacccaccagctcccaggatccacctatctcaacatctaagccccgaggttcaggcatagtggccatgttcagtttatgcgtgtacgcatattgaaactcaggttcacacagtaaatattcttatccattgagccatctcaccaacctcactcacagttctttagccctgtctaggctctaagcttcataaagtccaaaccaagtctgtcttacccatctgtgtaaccctagtgactgacaggaacataatagatgctcaaccagtgtttatcgggtagattaatggattatttcttcacattctaagagatctgggcatgggagttctggataggggggataactcatctccttacatccaaaatgaattcagttcatcccacaaaagctctccagctaaaaggagcccagggggttggctggctgcagtccagcctgggaatcgcttccctatctatccctaggatgcctctgcacatatgtagcccacatagtcacgggtaacttctaagtatcgcatgcccttcctctcattccagcctgcagagatttggactgaagggtatgaggatccagcaaggaggtttattcgggattcaggaggcagaatttggaactccaccaagggtgggagatgtcaaaacctgaggtcaggttagagcggagaacgatcgtggcagaaggaagatggaattcaaggctagccatggttgattgcaccagggggcttccctgtcatcaagatggccacactgtgccctggtggtctgaggtcacctgccttcttgaagcctaaacctggcacctgacttgtaaagtgacagcccaagggtcttccgaacaaatcccatcctttaggtctgagaggtcacttttagaggagtcctttcccctttcctctgtgctggccacaggagataaacagcaacctcagtggaagcagggctttgtttcttggaagcaggcagagccgcagatcagcgggagtgtgacctttactctacgttagatgctcaccttaggttagatgttcatgtggcagctgctttacctattggattccatattaggtgtttttttcgttgctatgtcaaagtgtctgacaaaagtannnnnnnnnnnnnnnnnnnnnnnnnnnnnnnnnnnnnnnnnnnnnnnnnnnnnnnnnnnnnnnnnnnnnnnnnnnnnnnnnnnnnnnnnnnnnnnnnnnnnnnnnnnnnnnnnnnnnnnnnnnnnnnnnnnnnnnnnnnnnnnnnnnnnnnnnnnnnnnnnnnnnnnnnnnnnnnnnnnnnnnnnnnnnnnnnnnnnnnnnnnnnnnnnnnnnnnnnnnnnnnnnnnnnnnnnnnnnnnnnnnnnnnnnnnnnnnnnnnnnnnnnnnnnnnnnnnnnnnnnnnnnnnnnnnnnnnnnnnnnnnnnnnnnnnnnnnnnnnnnnnnnnnnnnnnnnnnnnnnnnnnnnnnnnnnnnnnnnnnnnnnnnnnnnnnnnnnnnnnnnnnnnnnnnnnnnnnnnnnnnnnnnnnnnnnnnnnnnnnnnnnnnnnnnnnnnnnnnnnnnnnnnnnnnnnnnnnnnnnnnnnnnnnnnnnnnnnnnnnnnnnnnnnnnnnnnnnnnnnnnnnnnnnnnnnnnnnnnnnnnnnnnnnnnnnnnnnnnnnnnnnnnnnnnnnnnnnnnnnnnnnnnnnnnnnnnnnnnnnnnnnnnnnnnnnnnnnnnnnnnnnnnnnnnnnnnnnnnnnnnnnnnnnnnnnnnnnnnnnnnnnnnnnnnnnnnnnnnnnnnnnnnnnnnnnnnnnnnnnnnnnnnnnnnnnnnnnnnnnnnnnnnnnnnnnnnnnnnnnnnnnnnnnnnnnnnnnnnnnnnnnnnnnnnnnnnnnnnnnnnnnnnnnnnnnnnnnnnnnnnnnnnnnnnnnnnnnnnnnnnnnnnnnnnnnnnnnnnnnnnnnnnnnnnnnnnnnnnnnnnnnnnnnnnnnnnnnnnnnnnnnnnnnnnnngaagggaggaagggaggaaggaagggaggaagggagggagggagggagggagagagggagagagggaggaagggagaaaggaaaggtttatttgggtgaagtttgacaagagggagtccactgtggcaggaaggcccagtgggtggggacagggagcatggagggttggtcacatggtacttataatcaggaagcagagagaggtgaactgaaacaccagtcctgctcagtttcccatttctcattcagcccagaactaggtgcaggggaatgtgctgtccccattcggagcagatcttctcacctcagttcaagttccccgaaaacaccctcacaggtgtgccccagggctcacatcctgcatggttctaatcccatcgagctgacagtcaagattgatcatcacagaccctatggcaaagtaggataatgatgcttccggaggaggcttctaatccttagttgatggcaggtgaatcttgccttctccccagccccagcccttttttccccattgactgtttgcacctggagacctcattttcctgatgactgcctctggctgtcctcaactccatccagagttctcatcaggaaaaaaaaatgtcaaaattgggctcacctagttagaactatagtttctactacgtctgactctattccagattgttcacactttcattgaaagagtacgctacacacactcacacacacacacacacacacacacacacacacacacacacacattcacacacacacacacacacacacactcaccaaccagccagcagaactacaatccatcagtcggacaactttctgggtgccagagcaattgattctaaagtgtagtttattgtaaaattattaagagtccacacatatttcagcgttatcgagccctttaggagagccattctgcatattccagtatgctttagtgaataaatgcagatttatatcagcccagggtagaataatgaagtaaaagctccccaggagtctgtctgagctgtgaacatctccccacccccactccgttttcctcctgaatgcaagcctgagaggtggcaggtgcctcagtgacagatgtctgctgggcccacacagcctggcagcctctttaggaggagctgtgactccagcatggtgttcatcgaggagcctcctcgcacgtgtgctctgaatcactgttggaaagtgtgggtgcatttgtaaagagcaatggtagggagagtcagaaggaggttccgggggtgttagctaatgccttgtgttttgctttttgtcctttaaatttcttgggggaattcatactctttcgcaagcatagcctgtcctgagtaaggcagagaaataggaaaagcttgggtccgcagtggatctgagtcagtacctttcacttgatggtagtttatcacaaagggatgtcccagaccaatagtcacaatcacagacaacactgaaacaagagggatggccacgactgtcctaaactgagatcaaaatcgtgaactgcctcagggcacaagcagggggtgggatggggtttgactggtctcgaagctggtgcagccctgcctccttcaaggcaagaatgccaactgctcagaaatgtctgagagaacaactctggcccaggattctactcttggccctggcttgggggctgctaagcctggagcaacactgccagggagctgtggaagcctttggcagcagaagaggtcaatggggacacctatctacaaggccacatgctatggggagggggcatttgaatgaagcaattgcttccctgtggctgctcacaggtctttccaggaagaaagatgaaaacctcagaggtgggacccgtccctcgatgagtgcagatagccagttcccaagctgcatgggaagctaaaaaccgctgtgactgagatactctgcttgctttctccgtgtgttttctccacgtggtgagagttgggagaggccagtgactgtcccagtgaagggggatgaggcatgaagggaattaccccaaagaagcagcagcagggggcccaggtctacagaatcgtggggaatggatatgaggcagagttgatgtgaaaggaggagtctaccctgtggcctcacagtgccattacaacggccatcggccatccctgtgctgtctggttacggaggcgaggcaggtgtgtctgcaggagtcaggaggcctctatccaggtgggtcaggggtgtgtgtgttcaggaacagaccagatgaggtgtgcctggggtagcaactggaaaagccttccgtaaggtgctgtggctccgggtgaaggcttagaagcactgtggtggttcagaggagccaattatcaggcaaacacctttgttgatgttggacaaacagggtgagagcaaagatcagtcccctcggggctcccagatccgagttagaggtgtgtgtgtttcatctatttaataaaagtcagaactcatgccagtctttgctttcaactctggctcacacttctgagtttctcctgagcccaagtaagcttgttactgggtgcatcaggctgctcgtaggagataaatcaaacggaagcaagaagcaggctctagggaggcctctggcttaggctctggaaacataatggaagtgtcccctctgactgtcatgaccatctgtctggtaaggtttaaggagaaagagagacgacattgactcctgtcacagagttcttaaatattcagaaaccttactaattcagggagagtcactttaccaccattactgcctgttgagctagcaatttcaagatgtctactctcaagaagatgtattaataaaaatctacccattttcacaagctggggcagtagcaatagtcatctctggctctgggtatagtggggtgccccatgtcacgccaagcacttggtttttgtatgtaagggggtagacatgtgtatgagcacggacactgggggtcatcctttgaggtgttctataggcatcattaccttgtttcctgagatgatctccctggcccggagctcaccatgtaagttctgcctgctggctgtcaaactccaggtatccacctacctttttctccccagtaacatgattatgacagcatgtcaccttgctcagggtttttgtgtaggtcccaggtatcaaactcaggtcttcatgctgactggctggcgtggcaagcacttttctgacagagctgtctccccaggccctatattcaagatctttaagcattagcagtgactcagcaaggtagagttgtggttctataaagcaggaaagtgagtctcagagaaagttgaatcctgtctgtcttttggccacatggtgtgtgagaggatttggcgtttctccccctgccagcctctcatccttttctttccatttatggcattggtgcacagtatctgtttcctatcaccatacgacaaattatcacaatgttagctgcctgtgtaggtcatctgtctggcttagcatgatggggcttcgctcaagctactatgatcaaagtattcacaggttgtgttgtcaactgcagcccaggaccctctgctcaactcatgcctgtcactggtgaattcacccccttgaggccagagggctgacatctctgtttccttctgactcttggcttgagtgagcaccgaacatctggagcagcaatccagcctttgtccaggccctgctccatctcaccagcaggagacatcactctagcccggtctccaactccttacctattagatctgtttgactttctctctcgaatctaactccttttaaggcacttgtgggtaagttggataaagtttaccatgtgatataaactagctacagaagtagagttcaccgtagtcccaattgtagggatggtgtgtgtgtgtgtatgtgtgtgtgtgtgacactcttgtgcacttagactcaccccacatttcacactaactgtgtaaattagtgaattccctgtactcaccccattaccaccagggagggctagacaaggcaagaggtagccagggaacgaggaagagtcactagagacagttgtggcaggaaatcagtccattccctgactatatgaagcaagtggcacctgctctgggcagggcatatccctgggcctcagaggatgttatgtaaacagggttcctgagggaagacagcgagcagagtaaagggagaaactgaagccttctgagacttctgtagctacccggggtgccttctgccctgaggaattcaggtcctactgagaggaacatttgggattaatgactgggcagagcaagaatgagatgaacacacaccgtggcaaattattattattacatttctaagtgctattgtattccaagcaccactaagagtagcaagtactgttattattaagccatccagcgtctccatcctcccctcagtgtcaaaggcatccacagctcaatcaatcaccgctggaggtgtcctgcacactggctctgtggtgttggcagtttgtgtgcccagcccggggggtaacagggcacctgtcatcctgccagaaacttcaccttgtgacacctcttgtaaatcccaaagcctggctttcatcttggacgaaacttagaatcttcctaagccattcctgatcttatcactcttaaagatcctctgggggctcccccattaccctagagtaaacccctgaccaccactcccgcagccccttacaaacttgccccttggcttcctcctgccttgtctcccatccctcccccacctctgggccatccactgtgtatgcttctgggtgttgttgaaacacatctgagaacctagtggcctggaatacatcatagtcagcaagctgcccacctcttgtggaacctgctgcagaggtggggcaagccgagtaagtaaagaggcagagaccactgattgacagcatcactcatcttcccagacaactgtgcccatagtgagaagggaggtgccttaggcctgtatctatatacctatatacctgaatgcatggggtgatgcactgggacctggggaaggagatgctggccttctgatatgcagataagaggtctcacaaacagccctgagtgcagaggacctcagatgcaaagactgatatatgaagccagtcttcatgaaagcagacactctccttagtccaaggtgggcacacaaggtggccaccatttttcatgtcagtttcacacgtggaagtttaagctgtacagctaacgacgtagtttacagctagcgacattgttaacaactacttatttagcaactgaagacagaacagtattctcaacacaaaacctagacagtcccagctgctgcaggggagaaaggagggcttcccacctggcctctgtcttcttcttcaagggagcgaatgatggacgtctttgtaaaggcagttacactccgagggtgtgtttccaggagaacattaattcatttaatgagtgtaccctgaacacctgctgagcacaggcatggagtatggagctggggacagagcaatgagccagacagaatggactcagcctgtgaagtcctgtttgcagggtcacactgggaaagcaaagccgaaaagggacaaggttccttggaagaatagatctgcatgctcaggtcatcggagtaaatgaataggaaacatgcagggagaatccaggggagctgggagctgggcggtttggggccaaatcttccattaaataggacttactgacaggtatgaattagcctcccagctgccactgtcttcaaaggcctattatacaaaaagcaatcttccagcctgcagagagcagaggctttgatgcagataaatagactgtcgggtaccacagttaggtggctttgggggtgggggcggggggagaaagaaggagggaaaggagagacaggatgctaagttgcccaagagacttggaacttctgctaactgtaggttcttgctaagaaaggttaaggtgggatttgtgagggagaggtcgggggcctggcttcttccatgtgtcagggcctgaagagaagtgaataaatatggctataaagaagagtttgggggaaatttcaaggctctgattgcccatgtaagatggcgggtgttctcttctgaaatctagtcagccaccagcgctgacttctttcatgtgtgatataccgagtggatgtagtataaatacatgcatgtgcttcagcagaaacctggcatgggggtggtagctcttcatagacatatgtgattaaaaaaaatagaagaagaagctctaacaagacaatagagatactgtgacagcacactagagtggccctgttccaaactgtttgatggaggtcaaggtggggactgcataaaaggtgggcctgaatcgtgcaaagacttgtgtgtgtgactatgtcttgtgtgcaacttgggcagatgggggtgttgaacattccctagcaaatttatattccacaaacatccctccagcaataacaaggcaaaggaagttggtgaatgacaagaccagaggaaaggtcggcatgagatggtgaggacttccggaattgagatgaagatggtcgatcgatagggaaggagggcagaggacagagccacggggtgggatgaagggaaaaccgcgacgaaagcacacaggcttgcagagggagctgtggctggtgggagaatgaacgaagtggagggcgacgtccaaattctagcttgaaagattggagggtaatggtgacattcatagatagggcaccaagggagaggagccaagtagggtgggaggatactgggttcaagtcgaggggtgatgccatctcaggattcctcccatcctccccgcaccgtaataacaggttaggaaattggagtctttggtgttctcggactcctggggcgacagcgttttaagttgtcagtcattaactacctcagggaggagacgtgtgtcctggtggccttgcctagtgctgagtgtgcggcgggaatgaaataggatctgatgttgtatgcagcaggatttcctcccatttctgtcttttgggggaaaacacttacttctgggcacttggcttcttctttctctaaatgggaatgtgtagaactccaccccctgtgttagtgtggtgggaggaacccaaggtgactcaggaaagttccttgtcagccgtgtagagccacgccagtggaagcaggtatgagcatactcaagaatagatgggtgtctaggaaatttctgtagttgaggtgatgtgaggctgtgactgtccctcccaggctggttagaggctgagactgaatgtggagctgtgggaaccaaagaccgaatgagagcagcagaaaatccccctgagaaggggccgacttccgcacaaccgttgagaaacttgacatgttctggaatgaagggaccgaccgcaagggcagtcacaaccaagctgggtccaggaggctaaactgggaagggttccagcggccctagtggtactgagacaattaagtgaaaattaagagagccagcaagggtcaagtgtcaacgggagcctgctcccttatgccaaagctgagaggcagcctttgcggtggctgacactataggcttcctgaagtcacactgtcttccttactgcctgtcagtgacacatggacgcatgtgataaatgactccaaagcagaggccaccaaagagaggctttccaagggctagcagtagctcctgaccagctccctgcagaagctggctaagttcttgatcctgaacctgacacatcttgctccgtaccatccttgccacgcgtgtctccaattcgctcgcatccgctcctaattcttcctccccttgtgggagtagagctagcactactcttagttcagtgggttcctcgtgctgcacaggggagcagtcacagctttccctgtgagccattgccacccaggtgctcagtctggagctaagacgaagccccaggcttcctagtaagaaaactccccctcactaagaaactcagccagcacgtcatagcccctcctcagaccatttggtgtgccgttgccacctgtgtgttccgagattagctttgtcttggtttccttggttatttcatagcatggtcccaatgaaatcacagtacttctctgactttatggtgaggacattgtacaccaacacagagccctgggttggagctcagcagaacctgggtttgaactcacaactcccttttcccggccaagtggcccggggcggggagagccactttgatgctcagggtctccactctgatgccatgaaacagtcaagattaactgccatgccccaggcttgctctaagggtaaacagagatcgtgggtgaaatatgcttagttctgtctggccagtagattgtagcagttagtgctataatcaactttgttaatgttgttcaggcttgaaaaagttcagaacttgaaccctagccttcctatctggacacaagtgacttcacccaacactgaacaccttatgacaacttagttgaacctttctcatttggcgaggagctaagagtagcttcctgcagagggaggtggaagacatgtaggtgtggaaaagcctgcagggcagatattttctatgaggtagggcccggatgcagctcatggaagccagaaagagggagaagaaggatgcttgggccctctttgttaaaagcacagagactgactgtgcttagaaacaagggaactcacgtgtctggggttcctctgtgctgggcacccttctacaaggtggacgctcattctattatcggcaaaggaattgacattgcagagacctcccatggaccacctggccaagacctgtgcaaatgagcattaaaccccaaacctgtctctacttcctaccacctgactttgtttcccaatgagattgtcacactgcacaagcccggtagaccctattgcactgtcttcagcacaaaaaaatagagttgtataatatagtagctttgtctctcaatatcagctgcaagatctgcattgaatatgctgcccccacagaagggaggctggaaaggaagggacaaagtccagagagatttgggagcccagatttgccagcatcagcaatgagctgggcatagagtttcaaaaggagggagctggggcttcatcttcagtcccgagcttaggtgccagggactgggatgcatatttggcttaggaatgtaaaggggaagaagggttgcttgggctaggagatgcaatgggtcattaagaacccttacacttgcagtgaccattgacaaaacttggcctgtccctgagttgactaatggactaggctggttagcataggcacaggggtctcagagaggccaccttccccccacccttgtcctggacagacgctgcccacaagcatggatttgtttcccatcccctgtcctgtacccctggcacccaagctgtgtttcttgatatttggatcctagaaagggttagatgtgtggctagtaaatcttttctcatttgaaaaatagcctagaatggcttcttgcagaagaaaggaaaggaggaggaagaagaagaggaggaagaagaagaggaagaagaggaggaggaggagggggaggaggaagaggaggaggaggaggaggaagaggaggaggaagaggagaacagctcggtgataacctcagtttccccacccctctcttctcccttgaacaccttcccttcccttggccctgactcctgctcagtgccctacccacagcttgtccttacttcctggcctgcgtggatgaatgggccacggaggttcctcaagtcaatccaagaatggatgcctatgtgtaaatcaggacctgggcaatgtcacctcttctagagaaataggaagctggattgagcgctactacctatggtgaccattccacacagccctcacccatggggcagtcttccatgcattgaaacactccctggtctgacctcacctttgactctatttatttggattttacacaccataacataaacaaacatgtacacacacacactaaaacacacataccccagaatgttcaggtaggctggcatagcctgtgctcatattcttataccttctatgggtataaaatcgtgcttggtaatatagatgaccatagtgatgactacaggaggactccctcccaggaacgactcctaggctgtctgtcgttttctgaaagggtcagtcaggctgggcagagggtaagggagacaggaaggttgcaggaacctgaaggggccctgtgtgcattcatggttaaagctagagatggagaacaaaaatcagacaaaatttcctctcttccaagtctggattttgttaattttatggaatatctatttcgcctggcatctcctccaccttctttggggtttataatgtttctctgagtgtgtttaaggtagcagggcccaaattgtgttctgcagaaggggactgggggacacagatttgaaggggggggatatatattctgtagtcaatgtgtttgaaaaattcaagattaaacaaaattaagccagctccactgcaggacttcgttcagccttcagtgtgcaggggtgtgctgcgaatcttaaagagccaggaagaataagtgagtgtttttaacattatctgagcatgcaaccttgtttaagtgaaattgctgtccactttgcctgggaagctaatgtctgcaggaagagacttcgggaaatactgtcttagaaggttttcgttgtatggaagtggatagctgtcacccatttcccgaactctcttagaaagtttgcttcagaagcagcgagagatcctaagttcacacacacacacacacacacacacacacacacacacacacacacactacaacagtacagatgctagcagagtaaaaccctggtgtgtctgggaaatcgcagtaaaagggcctgccacctctatcttgtccttcggtgagctctcccacgagtcatcgtatatagcacgaatcaccaaggaagcccccgaaatcgttttatcttaagaggcctttgaaactaggaaatagaatgtagtcaggggataagaaggtaggaaatgaaagacaggaagacagactggctggcttctgggggaactgcctcagagtgtctgcaattaaccctttcattcttaactctgcccagaacatactgcagtaggaggtacttccaccctccggcttccaagtagaactaaggaaggggagggtcagatgctgcttaattcccacaggcatatttcagtaactaccatcctctgactccttctcatttgccagctgctgctgttgggccttgctttatacctgtcttgtttcttttcttcatgtattcattgaatggtgtgggcagagatggggaggtggggaggtgagcttgggctgtgccatgtgtatgatacagggtttctacagaggggccagagaacaatctggcttgagttggttctctcctactcccacgtgggtccagggattcaaactctggcccttgggctttgtggcaacgtaccttttatccagagggccatctctctggcatcttgattgtttcttggcataacataggaggttttttaaaaaaatttttattgaaaatacattctttgctcatacactacatcctgaccacagtttcctctccctcccctactcccacttgctcttgatccctcccctctcccccaagatacaccccttctccatttcctctccagaaaaagagcaggcctctaagagatgacagccaaacaggataaaacaatatgcaataagccctcatattgagtctggacaaggcaacccaataggaggaaaacagtcccacaggcagtgtaaatagtcagagatacacccattccagctgttaggagtcccacaagaacaccaagccaacaggcataacatacacagaggacctagtgtagatccatgcaggccctgtgctctccactttagtctctgtgagcccatgtgagccctgcttagttggttcgatgggccatgctctcatagaagatgtccaatagcatccttcctactttcagtgtggctggaaaggccagaaaaattaaagaccttactcaaggtcacatatcctgtatggtgaggaagctggatttgacccggaagtggttgtctactctgtactccttagtgccattgtgaatatggacatacaagatatcagtgccttcatctcttaggctgtacaggtggtatgtctgcccacactgataaagaagccagcacaagagactaatcccagccttcaccatccatggccagcaaagtcccttggtttcccaacaacagtctggctgtgtgcctcggtcacctcatccttgccaaatacatttcttctcattagccatctgccccctcatgcctgctgttagcccactgtggttgggcagctgccccgttagaaagacaggacataataccagcgtatgaatcaatgcattctctggcatgcctgtgatcccctaacggggaaagtggcagaatccaaaacatacttcatcctcatccaagtccactctgtggggttggtggcttcaaagaagtctcaataactccagtgtacaaactaaagctaacaaggctgggggctgggcgcgtgaggcttgcagcctgaggttctggtggtggctgtaggtgggggcaagatacaggttggtgggggtaccaggagctgggagagcaaagtcattggaaaaggagaccacctaaaggaaagcagtgtgtccacctgggcagggtgtaagcctaaggcacccgccatctgtcccatcatgctgagtgactgataggtcaattctagtgcctgtaaatactgtgtgctcatgggctagggagctgtgtataaggcattcagagtgagcatgtgatgggtgcagctccagtctgagaaaatggcctgatctcatctgaaggcagttttgtaggaatggaccagtaagctgaataagctacacactttcgcttgtgtagggccaaaggaagtccagggtaaagatgatgtggggattgtgacttagtcaccaatgcacactgttgggataaaatacagaccaaattaaattataggagaaagatttcatttgggctcatggtctaaggtaaccggtccatcgtaaccgggacgtaagcaatagaggcacgagctcgaggaaggtgatcacactgcatccttaatcaagaagctgggagcactgaacgcttatgttcagctagctttcaccttcttatgcagtccagagccacccacttttagtgtgtatcttcctacactaattaacctaatcaagacagccttcccaggcatggccagaggctaatataatctaaataactccctggagatacatccagacacttatttcttaggtgactgaagatcctatcaagttgacaaccatcattaaccaccactgcatggatgactggatgacccttgaacttccagatgtcactgcctcggatgtcccagttctctgactgcaggagcccctgctcccccacccatagctgcccaaagtaataatgtgcttggctccttgctctctgcctctttgactcctgtaaggctcttgagtgtagcaagttcatatcctacgcatgctctttttgcctagaacagtgtctagcatgtgagagatgtttgtgtatttctgaaatgaacggaaccaccatgattacaaacatacaaccttggctgcacaccttccagttgacatgtttagaaagcaaacctgacactgacacccgctgtgaacagtccccctcactatttatttatttatttatttattttttattttttggttttttgacacagggtttctctgtgtagccctggctgtcctggaactcattctgtagaccaggctggcctcgaactcagaaatccgcctgcctctgcctcccaagtgttgggattaaaggcatgcgccaccacgccccgcactttaaattttgttttatgtgtgtggattttttttttttttttgagacagggtttctctgtatagccctgactatcttggaacttactttgtagaccaggctggcctcgaactcagaaatctgcctgcctctgcctctgcttcccgagtgctgggattaaaggcgtatgccaccacgctggcatagtccccctcacttacaggacaaaattctgactccatagtctgggatgctccttcacactcgggcccttgggctctgaccccatcacagccctccctctatcctccccaggcttcatgcatcctgtgtattcatccactcattgcttctggaactttggtgttcatgagatgtaaggactagtagtgatttttccaccccaagccctggactcagctacgggcatactcagactcaggtggtatagtggtggtggtggtccatcttgagaaagacttctggggtggttttgatggtagatcctcactatgaggagctcatgccttcatcaaagtgcaatgggcagcccagggaatcgccacatcctttctcccctcagcgcctttgcatgatggtttctggagggaatatcccttgtctatccacattctctgtgcaaaaaaatgcccgcacatccttcagacctggctcctagatgacctaccaaggattcggtcttccctcccccagtcacacatagtccatgtttctctcttcacccagtgcatcttgtacttaccctgcttaggaactaatctactgaattccttttctccctggacccaggactgcagatcccagaagaacactcttagctattctgtatactgagcatccagtggggtgcctcatgtgtcctgcactggctcatagccccctggtgtgctccatcatgttctttcctcttttcctccaccctaactgtgttctctctttctaattgccccgtctccccaggagttctccctccagagaatggacagccttgtggatgatagagtcaacatcttaggattttccattttcaaccaatcccatgcattcttccaagagttctcccagagcctcaaccaatcctggcaggagaactgtgaccatgtgcccttcaccggccctgcggtaagtgtccggttaggtacccttggaccccaacatgctctgtggtcaacggcatactccatacaatgaggcagatcctaagtcattggtttccaagatgcatcatgacaggggagtgtgaacccatctacatctgggagtacagttctggaggcccactgatgcggagaggacgtctgcagaggtcaaagaaggccttttagaaggtggcaggcaaacccagtcaagagattagccacaatgatttggtcaaccaaggaccacaggaccagcagtgattccactttatagtcatcttactttgtgtaagtgcactctgtgatacttacacaatgatacaacagactaagcagctgctcctcagagcatccttttattaagtgctgcgagacttgtcattcatgctttatgcacaagacctggatgaggagaagggctcggtttccctggagacagtaggagcatcttctgtctcattcttgagacccaaaaccctcctgccacatggaaactcatacaggtattcccgagtgtcgccttcctagccagctgcagggtcttctggcccctgggaatgttggagccgatctgggtggcagacagtgttctgcaaacaagctgagtgagtcttagacccaggtcaatctccatgtgatgtcataggtcctcttccaagtccccttccagtccctttggatttcttgctggcatgaagggtgcctggtcttacctagacttgctcctgcctaagcagtgcagcatatcccataatattacctgccttggcccttttcctgcttcagggcatcccagtaacaattcacagatggtcatctctttctgacaacgagaaaacaagcccaggagagcagggtaacaggtgagaggaactctaaaatccttgttttaacacagccaggtccgaagcccagatcagcttctccctgtagggaacgttgcagccatcttctctctgcagtgtggcctctgagagaaagggacgtgttaaaccagtcacctcaggagccaggaaggaagctggtggcagggacaatagctgcatatccctctaagccttcttgcttttgcagtttacctttcaagggctgcctcttcctgcctctctggaggccaagaaattctcaccgcaaacagcccagcccctcagggcagcaagccagaaggtgagggagtagcttccaggaaacggtggcatggcacgggctttcttctctgctgaattatggaaatgctgcctctgtgggatgcctcgtcccttcctcttctcagaccaccctttcctcatcttctcttccactttcctatctagtctcttttccctttctctccctgtagcttcctgttttgctctcttttctatatagcattgaattcttgcctccctctcttcttcaggcttggatgagaagctgcttgcttccccacccttcccatgaacccgggtgggatgccccgagtcagtctagtttatagggtttgggactgggctaaagatacctggagaaagctcaggatgcctaccctggccaagaagcctccaggtggccagtggtgcgccacagatgcgcttcctgctggagacaaagccagcgcagagggagtgttgggaagggacacacacgcccactagtttcatatgccgtgcccattaatcatgctgcaaagaacaaaaatcgtgggaaatcattaaaattacagatggctagattaagtaattagaatttaggctaaagcagatgtttgtaattaagtgtttatttcattgaatacaatccagattgtaagaactagtccatgagatcttaatggtccctgtcctggtattatttggggggggggggacagagtttaagctttcagaggttcatcaacaaatgggcccctaggaagatgccgggaatccagtctttgctgctttggggaggatgggagttacaggtgtgtgtctagaagatattcttgttttcattggaggaggagagaagggaacccagccacaactccctgagtcagaactgattcatcttaatttatacagagtctttcattccctgtaacaatttgcaaaacagctcaaaagaaaataacaatgaagaagcaaatgaaaatacaaaaacaagagaatagaaggtttcttgccaaacagcctgttgctgccaagagagaagagaggattttaaatgaggattgagccagttggtgggatttaatattcagaagagacagggacagtctaagcagagacaaaatcaagagtcaggcatacacccacacagacgggcagccggggcctcagaaggatgagcggatcaatcctgggaggagacagcaggaatgtctgccttcccttccccagtggacccagaagtagagacagggacaaagccttttgtgacagaagccacttttaactgaccgtggcccacatgctttctgaacagaattagtcaataacagcagagggagaaggcaattaggagaatgaagagctgaaccagaaggcaccgacgggcaggcagaaatggcaggctttattccctggcagctgggatctggacaaaagagttagaaggaaagagactggcaactctgacagactagatggagtgaggggaggaagttctcaggagggaggacaatgtggtgagtgccctagatagatggctaggagcctacaggagaggggcatctggtggcagatgaaggactcaagggaactctcctgggggtacattgagctccaggatacagggagttaacttgaattagcccaggctcagcttcagagaagacccaagaagtgtggtgtcctcagggacacttgacccaactgaaggctgtatgtaggtagagatgagataggaaccctgacaattttccacccacttggtccctgccacagtgtccccaatttgaattgtaattacaagaaggatccgagtgatcatgaaggccctggagttggagatgaggaaggaccctgggagcaggcacacactgatctcccagcatttggataatatccggataagaacatcagctggggatagggagatagatgtttgggcaaagtgtttgctgtacaaacaaaaggacccaaggttctaccccacataaaagctaggctggtgctaccagtgaccgcagtattggggaggtggagacaagaggagtctgaggacttgatgggcagctcgtctggccaattgatgagtcccaggctcagtgagagacccccctgcctcgaaaaagaaggaagagggggatagaaggagacatgcttgtgaacacaggtgcacatgcactcacacacacacttgtgcatgtgtgtacatgtgcacacacacacttgtgtaacacacacagagaaagaacacatacacttgtgcatacacatgtgcacatctgaacacatatgcatgtacatttgtgtaacacacacacacacacacacacagagagagagagagagagagagagagagagagagagagagagagagaacatcagccaaggaaacttcactccagcagtgagagcgcagcaaccatatggcaggaagggagctgatggcgtggccggcttcttctgaaatcatgcatggtcccccagaaaccaatgcacagcctcaagaagaggaagagacctcaagaggggatgagttacagacctctctttgggaccctgaacaacattactttgagagacaggagatccctgggtcctctatactgtaggatgctctcagtagctagaagcaggaacccaattaaaatgcagtgtggtatcacacagcagagcaacacttgaggggaaggtagctggaggcccagaccccttcacccttgaatcggtcacctttggtgtcacctccatgcccagcctagtggtaagcaggcatcacatccagaaacagtactatttagagagagaaggaaaacagtatcttctatgagacagaccgggcattgggatctggatacccttgtctgcttagacctcaggtcacaggtagatctaagaccaaggtgcacagaggaagtcagatggagtcgggaagacagagacttgatggaggtagcaaggactcaatggcttttctgagtatctatgtagactgcagagatgccgatgtagattgatagggcctactatctatagcaaggtctggatagaagtagaaagaagcagcaatgagtgggagagggagggagggaaaatggggggaggggtagagaatgagggaaagagtgaggggaaggaagagaggctacactggctaagtaatgcagtgcaggtgaactccgattgtgggctgccctctcctgacactgtgtttggaaagactccccgacatcagcacgctcagtgcctattagagactgcagcccttactgtagccatttagggaatgcaaaaatctatccagcctgctttctagccttgtggcatcctgttcctcctgttccctaaggcccgcccctgagcactgccaactccctggatgtgagattgtgctgtgcgggccccacttgcagaaatgctcaccctgtaactgatgacctttgagatttgtgagaccggatgctgcctcttttatggatatgagctgtccctgcctgaggtttggcaaggtgttcaggatcactcagcatccaaaggaggggctggagtagagctaggctcccaagttcttccctttgtaccttgcttctctgatgctgtgtgacctctgactggagggctgtggcctccctccttccaacagtagtgctcaggaagtgtcccggagcctggccagagagaagggaggattaagaactccactcactacacatgggatgctcttctccagttcctcccaatgctgtcttctgatgagcaagagggctgggcagggaaagaactgattgccaggcatcatgcaaccatggaggaactagcccccccccccgcccccgccccctagcccctcggcactctaaccccctggaatctcagtattatttctccagggccttcttcctgccttcccgggcttttctcagccctgtggacaatgctgaccacactggacaggacttcatttcttgtagaggctttgtacatttgaagctctgccttggatggtacactcccctgggacaagtcagccgtgcttctactctctctagccacccagccctcttggcctttcccaccaccaagactgcaaacattgactttactcactaggcagatgtcagccaagacttaatccaaatcaagctatctcttgggggctggagagctggcctagaggttaagagcacctggctgctcttctaggggactgagatttggttcccaacacccacagagtggctcagaactatctgtaattccagatccagggcatctgaaaatctcttctggatttcttgggcattatacatacagggtccacagacatacatgcaaagagatgatagagatagagatggagatggagatgatggagatagagatggagaaggagaaggaggagatgatgggagatgggaggagatgatcagagatgggagatgggagatgggagagggagagaaaaagggagagggaggaggaggtggagtgaagggggagggggagaggatgcatttggagtccaaagatgtaccttgatgcttcaagccagagcagcctttgtcagtaggatgtagattgcaaagccttgatagcagacttggaccaccagcagaagtaggtgagaccaaagggaggggtaggcagagggctgtgaacttatttgtctttgtgtgctttctctcttccccctctttgtcctcttttctctccctgctaccacccggtctctccgcttctcccagttgtcctcagccctgctgtttgacgctgtctatgctgtggtgacagcggtacaggaactgaaccggagccaagagattggtgtgaagcccctgtcctgtggctcagcccagatctggcagcatggcaccagcctcatgaactaccttcgcatggtgaggagcggctgaaggcttggtcctggccagcctcaggggtgggatgcttgatacagggctatcctggtgggtcacagccctggctaacacatcacctgtattgagtgggtcataggttcatttgttcccaattcttaacactcttgataagagcccatggccagcttactcccaacacaatagtttttaaatcttaagctagaaaggagttctgaattctgctgcatcctgtagttgcccctgtacagaccagcacatctgggaggggaccatgaggctggaatagggtccctcaggaggctcagcctgcagactcctaccttgatgcttgattttcccaatgttctctctccagtcatgcttttcattcacagagaagacatctttcattagtgagagaaggtgtggaaggtcttatatttttgcagcgagtcaggaataccctgacttcctgtaggtccaggctcagcagattcccaaaaaaaggaagatgctcataacaacctctcccctgcccacatgcctacagaacagggagagctgaatttgaccttaagtctgtgtggtggctcctgttggcttacatagttggtttggggttgctgggtgtggacccctcttcctgcactccaattctgtggcttcggagtggatgaaagaggttttccatacactgtgaagtagcatggagtagcaagttgcttagggcctgctctggcggggcctatttggtgctgtaactcactctctcttggacaggtagaattggaaggtcttaccggccacattgaattcaacagcaaaggccagaggtccaactatgccttgaaaatcttacagttcaccaggaatgggtttcagcaggtaagcccacctatgctgccaaagtgttggataccccctctttgcccttttctctttctctgcttccagtggcctccagatgtcaagtatctccccaaatagcagcctgcatccattctgatctaggctcctggactgcagtcgccacctcttttctgggtcccacatcagcccgcatgggctcttccagttgtataccttgcagagggaggagacaagggggtgtcacttagaaaggagtgcctgggtcctctacactctctgattgttctttttctgggagcaacggaaagtgtcaggggacttcctccaagcctggaaccccccctggactccaggggtaccaccgctaagacaaagggtgaatcccatgtgggtaggatggctctttgtgttgggatagcctgccccttctcctgctcttctctagcccacccctcccatgctcccctgtcttcagctctctgtttccatcatctcagggacactatgcccttcagagtcctttgcttttctgtatggttcttccttttccattaaaccctcttgttcccctctctccgtcttctaccagaggatacagactctgacaaccactccaagtctctctaaacatctctctcatctccatccctgaggcctctccaaggcagggaaggctggaaagactgagccagacagcaattacagtaggaagcaggcaaatattaaagatctcctgactgccacagtggttggatgaaggaacatcccactgtagtactcatcatttgctgtagccacccttccagtgaattaggaagacctgttagctttatcttcaccatcagcaacattatggtagctactcttatatagtgagcacttaccatactccttctgccatggtaagtagagcatgtgtttgcttatataagcctacaaagtagacacttttatttaccttccatctttaaaaaataggtactttgtgtgaggtatatgtgtgttcatgtatatgttcatatatgtactcatatgtatactcatgtctgggcacatatgaagttggggttcactatctagctctaaagcttcccaccttattttttggtgataagttctcttattgatccagagcacactcattcagctagactgactggctagcaagacctggggaccctctggtttccgcctctcccatattgggattctagcctcacaccaccatgccagttctttctgtgtgtattgggcactggaacccaagttctcacgtctgtaggtaaaatggactgatttatccctctttctatctcccaaatgggtactttgtatgaatgccctcacttgtttgtgaagtttatgactgatttgcccttgaacaattaagtcatgccataactggtttgggatccatgtatgtcttgcctaaagcccaagaccttatggtaaattatgtacaaagcttagcaattgccaaatgtgccattttagattctatctcttggggtctgggaagggaggcccaggataggacccaggaacagatctggccaacgggtatccagggtgactatcacagaagcatagaacatagaagcctatctcacctgtctcttgccacaccatctctgcatccaagaggggacttttgagcttacacgggccccagagagctctcagtgatgttttggagggccagtcttcttggaagagaacagaagagaaagaaggaacccagggaaagggagatggcctccgaggcctgatgatgaatgtcagcagcacctcgggctctagatgggagctgcgtgggatggtggcatttctcacatctcctcagataggggtatggtcaggtcggtagctggaatcatggggtggttccttcatttacccagcagatcttttatggagcatctgctgtgtgtcagacatcacgctgggtctggggaaagcagatgtagcctttacactgagagagctcacagtctggtgagagtaagtgatgtagaaaaaaaaacagagagaacgagagctgcaatttgggactattaaactcaaatcatgccccatggcttaccatccttgactgagaaggctgccagcctctgggaaaattgtcagggagacttttccctgagccccaatctttttgggggatctgaataaagagcgttcattcactctttcaagttgatacctgttgagtgctgctgtctcccttctaggtaccggtttaggatgagaaagatctgcttttatgcaacatatgctctagcaggggacagatgacaggccaaaaaaaaaaaaaaaacatatgtaacattatgccagcctgctaagttctctgagacaaatacaactgggtaaagagtcccagtgtgaagagcatagcatcagaggagtggttagaacaggctgctcaggctgctccagacacagcccagagagccccggcccagcccagagagctccagcccagccctgagagctccaacccagaccagagaggtccaacccagaccagagagccccagcccagccctgagagccccagcccagcccagagagctccagcccagcccagagagccccagcccagccctgagagctccaatccagaccagagagccccagcccagcccagagagctccagcccagccctgagagctccaacccagaccagagagctccaacccagaccagagagccccagcccagcccagagcgccccagcccagccctgagagcctcagcccagcccagagagcccaggcccagccgttgcaaacctcccctggacctcgattcttccccacagtgatccaggaaagagctcacttcctgtgcctctttcatggcactctccatctctctgtccactcccagttgacagatagctgatggggctggatgcctctctgacttcattctgctcctgtcccagctgccactcatgctggctttggggaggagctgggggaaggagggtgaatatagtcaaatcacattgtatgagtttctcaaagaactagcaaaaacttgtattttccaaaacggatagaaatcagggctggagagatggctcagtggttaggagcactgactgctattccagaggacccaggtttgaatcccagcacctacatggtggctcacaaccatctgtaatggcatctgatgtcctcttctggcatgcagatgcaggtgtacatgcaaatagagaattcattatccgaatacacaaagaacataaatacatctttttaaaaacttatagaaatcagtattaaaaatatatgaaggaatgggggtgggaggctaaggtcagtggtagagtggctcccccacccccgccctgatttccaataccaccagaccaatactacagaactgcatagaactgagccctaagcaagcatactgacccaattagtattacacaccgataaaattaactttattggtgagagccccttcaggatgactttcagaaatgcatcggaaaggcaaatggaacattgaattgttttacaggacttttttttttctgttaacatgtttttcagtaatgaatttttaaaatatatattttataatgaacatggaaaggagtcaccatcagcagccctcccccccgccccccccccccggtaccatttccagcccagcctggccaggacccaggacccaggactctgcctgtcttggggctttcttcatgtgatggggaccgctgcataagcagtgcccagtagcggtaagcagtaggcctctcaaacacaagtccactgagggtgacccaccaactttgctttatgaggtgcatccccaggctccacggctctgcctttcatttagttaagcacgatgttctaggaatctgtcagtttagctagcagcatcccccacccctgtgattagcatgatggggtgaccacaggctagcctttggcaaatactgtgctaataagagagtggttctatgagcagagttattttgttggtgtggcctctctgtgccctatcccgttgttttgagctaacactgaatggaatatgccacacaattgaccattaaaacgactgtcgttttgacctttggctaccctaaggaacactcagtcctgactggacttagaaagtggatagtgagaatattctttatgacctcggcttttcagcgagtctggaggctgtccagctgcttttctgtctgcttcaggtgccgtgagcaccaactggaagccgtgtgtgatgtgactcgtgcacagatgcagcgtcccagcgccggtccccaggtcccatcccaatcaccacccaatctttgcctcttgacgggcgtccttccctgcttattgcagggtgaagaaatggtttaaggagggataactaattaggcttctctcccaggacaggaggaatgtcagtacctctgctccaatattctcccagttctttccaaggtgaaagttgttgcgggaaaggatttgacaaggagccagagagaaatcgatgcgagtcatctgtggtgctctgtgcagatctcacctcatcctgaggatggctctctaaggtagaccagcttcatcaggaggaaactacaagctcaggagacctgcagatctgagttcaaatccacggcacccacgtgaaaaagctgggtgtgtctgtgcaagcctgtaacccctgcactgtaggacagagacagagcttcctagctgatcagcctcactgtaatgtgaaagcgacttcaggttctgtgagagacccgctctcaagtcagtgaagcagagagcgctagaggaagacattggatgtttttctctagtattcaaatgtgtgcataggtgtacatataactatatgctcatatgcatacaacacacacacacacacacacactcacacctcaccgactcctgtcaagaacctggaaagactggaattacattcaagtttgtctaactctaaaacccatgttctggcctcttctactcctggtttcccttcccgcccttgggtacctgaagctctcatcccgagctttgcttctggtatgttgctccgctgcccgaacctgactgccaccattgattctagcaccctgctgggatgggctttctttagtaatgacatcttttcatttggctttggttctgttctttctctcctgtctgggagaactactattaagagctggttttgattatttagaaagcaccacgcagggactcagtggtctataattggtaaaatgtctgaaccaactaccatattccctgccggtggctgattaaaggattttttaccattttaaaaatagtctttcagaattccgacttttttttttttttttttttaccattttaaaaaattactattttgattctgcatggagagtgtttgccatcttgggagcttccactaccgcacatttggaggaatgagctccttatggtgtcctgtagggggcattctgaaccatctccccagtatttataggtatgagagtcaatagtactgcctgagtctctccctccacgtcccaaaccacagcgtttgttgtcgctgccccccatagatgtgcagagggctgtaacagtggtgttgtctctcttcctgtctgggaaaaatcctccttgaaagaagctagaaggaaaaggaggaagtctttaggagaccgttaatttccttcatttaacttagtctgaagatcagagacgactgtgagcatcccttgagcaacgttgttagtgttgtaataagatgagcatacctttcatccaaggatcggaaatggcttaacagggtctaattaagcctttggggtttgacatccctaactaaagatgcagatctgcctgttcctcattggttcgttgtgtatcccaagcagggtgggctcagttttctttccgtgcgtagtaacccctcatatttggtctcacaggatctgaagatgattgaaaatagctctgcctggcactgtgtttgaatggctatacttatgcgcaaagctggctctcctgacatcataataatagcccacatttattgtcgcctacatgatgtactgtgctgggtggtgtacatatatatttaaaatttttacattcttttatcagcctggcatgaaagctgttctgtcatcttgtaggtggaaaaacgaaggcagagagattaaaaaatatatatatatccatcttcatcaaggtgggaaatggcaggctcaagagcccagtttgggtcaagcttcctcatcctcagagtccaggcctttccattatgcaatgtttacctagaatgtgggggccgagaacatctttaagctgcttcattaatcttctaatgcagttcatgaaaggtttgtgtcgggacacgtaagagacacgcaacctgtctgtgaggcccatctgggctggagaattagcaacgtctttagagatatcagtcagactcttccaggtacttgggtcaacctctgtctcctaaccactctatggaacattccggaatagtctgcttcctcttccttgccagctcctcagatatgtaaaaacagattgcttttactgcactccttcatttttccattccagaattagactaaaaatttcctgtaagatctactctttgtcataggctgggaatgctggatgaaagagccctactccacttaagagctcgagatcttagggggctgaaattgcagcccgcaattgccttagagtactctgattatctaccacttattttacccttcgctgagcagtgggctgtacctgttcccaacagaacatggcttaccactctctcacggaggaagaaccaggggctgttggcgctcttcaatgcacaaggctgcggaatggatgcacggagactgtgggggtccatcagtcacctcagactgaatcctcagttctcatttcccacattagctggcttcctggcatttatttttcaaatgccccattccttctgaaccctgggcctcggggtcatttagttactctacttgctgacttcccagtaatacactcggccctccgtgtgtacacttttcatagagactagacccagtccagcttttcctgagacagctgaaccatttgactccatttctatagaaatggagaaaccgacagggctggcctggagagtaccaggaaaagtaatgtgagcagatagccttattttccaaaacagagacaagctcagaattcaaagggctcatttcaggaatgatttcaacactttcctaaacagaggcaggaggaggacggcttatccaaggaactcttgcaagcagcgaactctactacccagagtctttagaaggcaacccagagccaacttccttaagatcctgaaggaccccactcgctgccacaaagtcaggctccttccatttcctctttctggctgccatctttgctgagagcagcccatgcagaggcaggtctgccccctccccccaggaagtctgcgatcctcctgtgttgccaattgaagtcctggctctgttgcactcgtgaggggcgcagaagcagcagagattcttattacagccattagcagcagaagccacggggaagtggttctcctctgaagataatcggagcggacctgctggtggggttcgcaaccttccccacctcccgacccctgtcccccacttcaaaagcaatcaaatatagagcaacagaaaagcctctacatactgcctgtcagtgagtctgcacttcatgtagtggctaaggaacaatatggaggatgccatggtcttatagagaggtcttgcccaggtctatacctttctccccaatccctctgacttagctgtctctgtgacagccgagtccttcctgtcctctcaagtgaacagccattgctcagatagcttgccagtgggagaggcagctctgagaagcctgtgattgtcactgtctaatacattttcaatttcgaggaaggagtttaccataaatatgcagatcctttgaagctgtctttgctgagacctggctcagggcgctggagccgggtttgattgctggaaatcagcagcctcgagtgccagctccccagctgggggacagacctgtgagaacaggccagctgtggagcttgcatgggccacaatcccccagagacagctctgcctttgatgaggaaactcggggctgcagctcctcataggggggaggtggcccagggatgcttagaaggtgactgaaaagtcactcacttctttttaattaagaagccaagagagagggaattggtgtggagtttgaaatagctgtctcttagaatggcatcagttcttaggggcactggtcagttaggccaactctctagaaaggcagtgacttatgagagtttcatcgggtttgaaagcccttagtgcttgttgagtgaagggtgtggtccttccagtgactctgttgtcctctcctttcctattagtctttctgcccaagtagtcatggatgatggaggtcttggatgtacaggcagcctcagagtcacacccaggcctacctcatttctgacatgaaatgaacccagaaggctgtccccgccatccctactctgtcagtgtcctcccttggctatagcatcctctcaccaccatccttccaagagtggggacttgtgagccaggcccactcacagcagggagtgggtgtggcagtagatgagagtctcaggactcacagggtccagagaggtgactgcaggagccataggagtgtgccctccaggtctcagggagctcagagccaacagggccatcagagcccccagacctgtggggtttctaaagccacttgcttcctttttaagtcaggagaattccacatgccaagcctcttacaggcaacagtgtttacatgttttagttaaaagtcccctggaatcactgactcatctctcaccctctccatttttcctccactcagtccagctcccatactccggaacaggctctatctagaatgccttctcccagaagagatgttctggctgttctcctggctgcccaaagggggaaagggcaaggagcagacgagctggcttttcgagtagtatctcaaagggcttgtctttttcagcttctctggtcccctgcacatttgattctttcccccaaagcacagggactcctgcttatcggctctgctgaacaattcagcagccgcggaagcttacaagcttactcacacatcagccagcaagcaaattaagaggtacttacagtgttgaacagggggctggttttgggcagaggagcggggttttaaagtgccgcatttgaaatctatttcttgtcatgtgctcgatcacgctttttccggagatcagcctggggaagtctgccagctcctggagacacttcctgcgccccttcagccagctcatgccagggggagctggaggagggcgatttgataattcactgtcatgaatcagccagctccttcaaacgaaaagcaagccagatctaggagcaggcatttggggtacaggcaggtgggccaggagaaagaagcaaggcggattgtggagggagcttacccaaggaggcaggcaatgtgtgcgactagaaagactcagggctgactcccacactccttgttcctaacttcgctttccacgtttctcctcagtaaagtcaagaacatcatgacttctgctgcttgggtatcataaaattattgaggacaagatgacctgttgttcatagttgtactctgagggttctactacactgtgcagtttttaatcgtgctgtctcacttggaaatgtctaactatatacctcactgtctttgctatattccctataatgtcccagacattctggcctggttcagggcagggagaaggacacagccttggaaagggaaggctcaacatgtgggattgttcctattgaagtcacacaaccctggaagagggcatatgagtagcagcctatgccaggcaggcatgcctggctgaaatcagttttgccagctggctcttacctaactctcttcttctgtcaccaaggacttttctctatatgcctttagcttactctctgaccttcagccccaatttggtggcagtggatggatgtgaagatgagagaatccaaattatggctacttctagaagccacaatacaccaaaggcccacagagtatgatcaacattgattagacagaagcaacagacacccccaaattacaaatcctgcctcttcaggagtgcagtaagacctaagtaaaagctctttgctacccacaagcctgcactacatccaacaaggggtgagggcaagccattctcagccacaggctgagagctccgaagccacagtgccgtcctgattcagcaccagggtggagagtgaccagcttcctccagtctagatgctttattgaaagcactggttcagttggcacctgggagtcagagctcagagccaaggaatcagtgccgctgcctttccacgccacttcttagctgctgagttgaacaaatgaagccggtatgggctggccgtcatgttctttggtcaactttcctcagatggaaagtcttttgcttgcttgagcctcctgagcccttagcagcgcatgctgacatgcttccagtctcctgggaggcagagaagagtgagggggtcttcctgtctgctgactctgccgtgtccttgtcatgactcagtgtgaggaaggccagggggtcgtccccaaacatcttgggaggttttcagttatattagaaaaggaagccaggcatggtgacctatacttataattgtagcactcgggaagtaaggcttgaggactgtgaccttgaagctatcctgagtaacaaagcaagttcaaggctagcctgggctataggttaagaccgtctcagagatacaagggaaaaagtgtctagagattacggttgagagagtgcttaacaggcataaaattcctggttttctcctttagttccacgtaaacaggcatagaggcacatgcctgcaatactagcatgtggaatgtagagagtcaggaggcccagaagctcacagtcattcttagtcacacagggagcctaggctagtgatcctgcctaggagaaggaggagggggaggaggagnnnnnnnnnnnnnnnnnnnnnnnnnnnnnnnnnnnnnnnnnnnnnnnnnnnnnnnnnnnnnnnnnnnnnnnnnnnnnnnnnnnnnnnnnnnnnnnnnnnnnnnnnnnnnnnnnnnnnnnnnnnnnnnnnnnnnnnnnnnnnnnnnnnnnnnnnnnnnnnnnnnnnnnnnnnnnnnnnnnnnnnnnnnnnnnnnnnnnnnnnnnnnnnnnnnnnnnnnnnnnngaggaggaggaggaggaggaggaggaagaagaagaagaagaagaagaagaagaagaagaagaagaagaagaagaagaagaagaagaagaagaagaagaagaagaagaagaagaaaaacaatacagcgcattaggatatagacaaaagaaacttttaaacttgtccaaacaggtagaagacccaggcattcttctgattctgctgtgggaggttttatgactgaagccctgatagtttagggagtccattaaatctttgtaagtgtcagtggggtgtcatttgtcatcagagccaacacaggtttcatgaataccagagctcctcttgatatgattcttacctgtcactacattctccaagaacagccaaagttggggcttgtgggcaggaaggatggtggccaaatcccatgttacatcccagaggctggagatcatgactagaaatctgagcgcatcctggtgacagccgaacagcccagcatggacaggtctaattgcttctcattatttgtgagatctggatttgcacatttgactgcttggtgaaatctttttttgcaaaccccatatcaatactcacaacaattttacagacatgtggagaggcaaaaatttgactcattcaatgtgtgcatctccagctgagcttgaatgtggcaatgttctgctgtgtagtttcagcactaatattgtcaacaagtgtctttttcatggactattgagtgcttgtgtgtgtgtgtttcccctagtaatttttctgtttaaactaacccccacaatgcaatgcttacattccatcccatgttcctatgcatgagaaaaattgtgatgtgctctacggagacaatttatgttccagaatcagccatctgtattaggtgaggcagagatgcacatttgggccacacattgttgggttgataggaatgctctggcggaagctcacaggaaacttacttatttgtcctgggagcagaggtttgctagtccctccttgaatgtgtgtggcagctttatataagtcagaggagcaacaaataatgagacccagccacagagagactcaaccgggagacaaaagcaggaatgagccaacaggaatttctgaattttcctgcaggccttttctccacattcgccactccatagtcctgctttttttgcttgtccaaggcccctatttgcggccttgccttcctcctggttgccctggtgtagaaatagaacatagatcctgaagactggatggcataataaaagccttgtagaccagttctaactggcctattgcaaacacatcctcatttaaatcttacttaaatgcctcacatcagagaactcactaccttcagggacaacatattccatcttgggaagccctccctattagaaagtctttccttactggggtcaggtgtccttcctcccaaaggctctgccttttgtccttgtgtgtgtttcccgagtcctcacatctcttccatttgcccctgactacctttcctggaggaaatcttgttataggatggagaggttctttctgtcaccactcatgcatgttaaatggccccctgtttcacctttgtgaccaggtagctgcacttccactgtcccctctgtggtctctcttaggccatatctctctccctgtctttctcccaggttcagtcccatggcacttgggaaaaccacatattacaattctttgagttggaagaggccaggatacattattctttcatgatggttagcagaagtttgactcctgcctaacttctccacaatagcctgctcgggctttcctaggctcttttctgcatacatatctcagactcaaaagcaaggaaacacgaagagatgtgggctttcaagtagaagatggcaaatgatgctggctaaagtcacggttcaaatatttgctaagtggttgactatatatcgacagccagagaaatcacaatatcctgcgacagtgcactacagtacaggttctgcctgagtttgaatcttctcaaatcttagttttcttatctgtgagatcgggacagtagcagaacctccttgaagtataacaaaatgtttagtccagagttgtgtcatggaaggaatgccccaaagcactgattcacaaatgttctaatacatagcctttaattacaaggagtgatcaagactaggagtctatgggtatcagctgtatacttattaaacatcacttaccatctacagactctgctaggtgctgactatagagaagtggacaggtaagcattacaaattcgggatggtgtgagtttgcatatttggaatataatttgcatgcagggagtcattcaggatgcatgcacacctctatgcataaccgaaacacaaatgtatgtagtattcattacctctgccttatgaattcccccttctctactccatatagagatctcactttttaaatgcaggtgttggtccactcaattgatttcataactcacaaatggattgtagccagcttccaataagacactgtattagacaaactaagtggaagtgttggaaaggctgcgttgtcctggatcttcctagttcgccctgtactcgtttttgatctcttttcatcggacgcggctgctgtcccagaattctagatttttgcagcattctcactccactgctccattgcatatctaggtgtattctatggctgagcaaatcaggcctctggtggactttgacaactccgtttgttccccatgttaccccagctctcagtttgggattcagttcatgaccccaacctactcttgtgtcatataagctgttatatgtgtagagacattgggcttaaagctaatgaacatttgccaggtgccattatggaggctgatatcattaatagtttgagctggtgtttgttttgtgtatatacatgcgtgtatgttttgggtgggtgtacatacaggcatgtgcatgtatgtgtggaagccagaggtcaacttcaagtatcagtctttaggtacggttatcctgtgggtaaggatagagtttctccctgagacttggggatcactggttagccttggtgcctgagcagcaatctaaggatctgcacgtctctgattctctggtgaatataaaatgctctgccccttgtaggtttgctgaggattaaatgagataaagttcctggtgcatttgttcagttatatctaattgagcacctatgagacacgaatgacaagcatgggctgccgcttgagttcttcaaaaacaaacaaaaacaaaaacaaaccaccaaggatatatatgagaatccacatcctcccatttgctgagatgagccattccccagccccttaagctttcctctgtcaggttgtacacctatcccaccaagtctgtggaactctaaccatctcaggtcatccctgggatcccctgccgtggtgtcctcccacacctgagtgccacgtctccatcccatatggagaagcttcaagccagtgggtctcaaccttcctaacgctgtgatgtgagcctttaatacagacccccaaccataaaattatttcattgctacttcataactataatttgctactgttgtgaattataatgcaaatatctgatattcagaatatctcatatgtggccaccaaatgggttgagattcataggttgagaaacactgctctaggcactcacggcttcgcgtattttatcataagcatccttcagagtgtgaacttgaacttagaactgtaattttaaaaatgattatgattcagaacgggtgagcctagaaagaaaagaactggaccgtaaagaacttgcatttgattggccttgactctgtcacacctgtgaatacctctgataagatccccataagtggagaagggtgagggaaattaggctgatcttgggtagcaaaattgatttccccagaccacacagtaaatgactggcaaggtagaatctgagccccgatcccctgacttctgatcacctgctgtccccttacatacatagtcatatgctgtctacccatctgtggcttatggctcagcaaatgccttcagctgcttaccaggaacactgcacaatatcacaccaaccagcttgcagttactataatgagaaccggagccaatcaatgtctgaagacaaaggtgccatctgagcacacagtactgcaaggtttagtccatggttcagtcctgctgctttggttccagtttggtccatcaaggcagggaatgtcacgtggaacaaagctgttgacctcatgaccatggtcaaaacgttaaagggagtgaggaggtagctagagctcctacttggcttcatggcttaaaatttccattacttcccaacagtaccagctgtaacccacaggtccttggggttcactctagactcaagctgtggcatatgtgtagattctgtcattcacttccattccacggatgagtgagctcaggtgggtcctttcggttgactccagtcaggactatagtcaacaaacaagctcactttgtttaaagaggcatgagggaaggcccaggctccaacctcaatatagcctacacctgttctaagccaatcagcaaagcaacacatagcatctgagttcaagtcctaatttgatccctatcggccgttgatgctcagcaagtagcttgtcatttctgagttttggcttggctaatttattcaccattaacctcgtatgcatgtacctacttcaagcatttttttaaactgtttctaaagtaccgatgagcctgcatttctcaggtgtgaatgatgacaggtttgctacacagaagcaggacaatttatgaaaggaaaccacatgggccggggcccagcaagcaaagatcaataagtatttgaagcctcttactccggagcggggcttagggtttcatcagcccccgtagaagaagctgggtcccagtggtgcagagtacaaagagaagctgtctaaatgtgcacaaactattaaatgttctggtgctgtgcgcacctccgcggatgggggcaacgatgtgagcaagtcccttggtgtctaaaaactgatccttttttttttacctacttaaaaaagaacaaagtggtcaaaagacaccctgagcaccttcaggcaggaaggagtgggctgtgagctccagggctcctggcagcagcagcagggaatgcaagccatcaagctgatggttttccaagtccctaaccctccagaaaaggtcctgagggcacctatttgacagttgagaaggaaagtattgggcagagatggggagggccttggtgaagtttatgcaggttctgccaatgccaagcactgcactaagccagttcccatggttacagtcttgaccccttctaaccagataatgcagtggttaggagcatgggctctggtgatcgagaaagtctgtttgaatctccaatgtggtgtttatcggactgtgaccatggagactttaattacctaactttgctggcatgcagggctttaaaaatctttaaaatgaatataaaatggtctgccccttgtagatttgctggggattaaatgagataaagtttctggtgcatttgttcagttatatttaattgagcatctatgagacatgaggcaatgagccaagccctggggataagagggcgggctaaccaagccacttgccttgttcctataaggcttatgccgtagtaagacagacaggcagtcatcagtgtccagtggacagatgttcaaaaggttaagggaagagaagacaggctttctggaagaagtgttcttcaaacagaggcttaaaggaaacagttgagaagtggatgagggtatgcaagcattttctatgacgtctagagggtgggtgcttggtctttgcaggaacattactttgcaactctgcccttgtgaatgaaagcactaaccagatgtgcagaagtgaataggccaagctgtatgccaataaaactttatttgcaaaaaaaaaaaaaaaaaaaaaaaaaaccaatggttgaattaagcttacaagccaagatttcccatcccctgtccctgaactagctgaatgagagttggaggcaggaggtcatgtggctgggagaactctgggccaggaatgtcacatacagggagtggtgatagaaggacatgacagtgagcaggcatggagggtcttgtaggtccaacatgctgcagtatggcttcttgtctctgtgtctgaatcaaaatggaaaagatctgtagggttttaagcagaggctgctgtgactaaagggaagattctgggggcattgctggctgctgctctgtaaagaccagaacagagaggctcacaatgtcttccatatctcagaagcttcagcaagagcatggaggcccacagggccctgtggtcccagcattagaccccagcatagttaggtctcccgactccaagtaacattcattaatttctgagaggtgaggcactgggcgggcccttgggatgagggcagagcaaggcaaggagcagcagcaaatgcctgtggtcaggccctggacaagcactttttgtagtgaccaacttacttatgttgactgagagtcacatggcagatcaaatcccagtgcctggtgtgcattcgaagacagtcatggcttctcaaaggactgtggagagcttctatctaagccacagagcccaccctctagaaccctcattgccttgcatgcccctggtctaatctttccttccaccagtccactgctccttccagaggtgttaagtcctgtcaactctgggaggacagggcctcagaatcagtcatcctgctagaagcaagaaacaacagcctgcccgccatgcggaaagaaacacacacctggagctttaaatagatccctttaccatggtgaggaattgtaagcagccagcacactgcaggaatcctagggcaggacagatccacatcatgatgtctaatccagcttcctaatgcctgtgccacactttaaggtaaaacccatttagttgggctggtgagatggctcagtggttaagagcactgactactctttcagaggtcctgagttcaattcccagcaaccacatggtggctcacaaccatctataatgaaatctgatgccctcttctggtgtatctgaagacagctacagtgtagtcatatacattaaataaataaataaataaatatctttaaaaaatatttagtttaggtacccttaagaatgaaataagtatttttgaatacatgattaagacctgcaaaatttggtgcctaaaggaagaagaaaattattaatttatattgatctttatctctaggggatctgggttaaatgatactttctatacatatgtaattccatcccatgttagttatatttgcctaagttttcatgtttggccaagcatctccatcaaaaagatgtttctttcaataggctttgagtcaggatttagaaagaccacactttgtttgtttgtttgtttgtttgtttttgaatttgagatggaggtctcaataaatagtccatgctggccttgagtttactacgtactccagggtagcctccaactctcaacaactctcacctcagcaacctgagaactgggatgtatctacatttgtttgcacagctgtgatcacaatcaagcattcagtaggtcttatttagttcataattttttcacttatctatcccgtgaattggatacactgacttagcaggactcgaatctcttttctgatagagtgagatgagatgactctgtacctgagtgtacagcatggagcctgtaggcagagtcagtgtctgctacgtggagaaaccagcctgcgtcagctgcggagagtccgttgtgcatgccttcctggctctgggcgctttgtggaacgtgtgtgtgaatattgactggaaatgtttacaccacagaagttggtaaaatctaggaactgggacctcttataccaggagtgccagttttgaaatgcctcctcaatgtcatgggtgtgcccccatcctaaggctttgagtctcggtgcccttagttagtcccagggtcctgttcatcactcaattgttctttgtgctctgcaacaatccagccaagagtcagaacagctttcagggctgcttaaagcctagattgttggtcctatccctcgatttcctcactttcttgtggtggcgctgctggtctgaaaacggaagtctttagcacgtgcttaatccgtctaataagctaaaatcgaagtgtggagcactttgaaaacacagaagagactgtgtcttttggcctcaacaatggcactctaatggatgctgactaacacagtacttgaactaatcttaaaatccctttgaggcagcaagtgctattttaatccccatcttacagatgggaaaagagactctgaggcattagtaacctacacaaggtcacaccattcataagcagagaagccagggtaaaaaagaagtcctccgacaagggggcctcctactggagggtgcagatgaagctatatgctcaaggaccagatgggactgaaatccagcattatctccacgtgctcagctgtgcacacaggctggaccacatcagcacaggtgacagaggtcttccttgagttaagatgccttaacataggggctagctgtggccctacccagatttgtgccttccccccctcccttcactgtagcctccagggcctctgaaactatggaaaagcagagcaagcaaacaagaggcagaggtgtaatctgaagtgaactgaagcctctgtgtgtgggggcaaaccagacaggtctgctgaaagactggggggaggggggtgccatgggggtggagcaaagcgatttggctgcagttagaggtacaaatcttgtgttgggagagtgacatctgctcacccttgcacatgtgtggcatgcgtggtgcccagtaggtggggcaattagcctgtatcccagggcacctggctctaccagctttccccttcccactgtctttctgcaattagattgctccagttaatagctgccacgccactttgttggagctgctgggtctattaatttctggaggctaacatgggagtgggtgggagactcctttcttgactggagctcagggctaattagtctatttgccaggtccccaggggtgaagtcttggagggtccattgctgaggctgtcatatctggttatggaaaaatctttttcccccacagctgttgtagggacctgattcgttgcttgagcatggcaaaggggctggggctgctttgagcaggtggcctcgctggtgtgaagtggaagtccagggtgacaacaggttgctaagaagctcagtcttgtctcaaacatcagaatgttggcacctagcctacttggttttacgttcccattgcccaggtaaagttcgttccagcctagcagaccactgagaaccaattatacatgtttcaaagacaggaaaacagccccttggaggagagagattcctactggatttatggagtgttgagaccagggagaagaaagttatgcttttaaggtttgtactgggtggccgaggagcccctgaggccactccctgtttaatctgatttgctcagattaaaggaaacacactagtgtcctcactaaaagatgtctacagagttgggaaagatcagagacttaggctctaaattcaaacctgtgccacagctaccatctgtggccttagaagaggagccattaagcccacctgagaacttctcttcattagacagaaataccatgacacctccaaactatgatggaggacttcaaagaggtgacagaatggtgtacataacacaacaggtgttctgtaattattaccgccccccccccgtttgaaaatctcacaacgtgatcatcatcttcttacccttgtccctgtagagagaagaggggccaggagtcagacaatgatgtcacctgacatgtccctttgggaggcagtgggagcttcagaagccccaagggagctcatctgttttatgcccatgctcagccagcaagaataaagtactgataggcgacagtggcttcctctgcttccaccgccaggagcaaggttctgggctctgagcatgcaggatgctgatgtggggagatccaccaggaagtaaatacgcagctaaaagtctcagaatgcagagctctgtggcttccaggggaagattcatctggggtttagaagcacggggtttaggattcaggcttctcttggctgatgggctgtgggttctcagagaagctgggtgagatctcttattgtatagaaaacaaagcacatggggtctttagaaccactgcagaggtggagagagctgtccctcgtttatggtgacatccttccaggggtatggagaagaacttttgcttatttaccctttgccacaagtaaggctcactgtcatgacccatgggttcatgtatggtcctagaaggccatcagagatccaatctggcactccaaggtggtcctggggtggaccatctctttgcataaaggcaggttgctggcttctccttactgtgactcctagttctcttgttccatggagtaaggatgaaagcaatggagagctaagccttcagtgttgttcgagcatctgaaggcaaactcagagcttacctccagggggggagcaacaggagcaactgcagagcttatgggaatttcccagggaagctgctgctggtgcctaggagagagggccacgcgcatctctgggtatgcaggcagccatcagctatctttcatggatgcaaagcccaactaactactcagcaacagaagtgacttgtctggagtctagccatcagaattatatgggatcaaaaatatgtgtattgtatatgtctgcattattcatagacttttatgtccttgtattctgtattgtttatttataatatatttatgtaatataaggtctagtaaaaacagtgttctcttccatcagaccctctagagattgtcagggtgatggaatagtctgcagtaatataaatatatactcaaaaattggttaagagtgcatgatggttcatgtaagcacttgcaaagtcaaggcaggggtattgccacaagctggaagtcaaccaaacatgattaaaagggtatatcttatttgtgcatgtatgcatgtaatgtatgcatgtgtatgcttctgtgtgtgcgtgtgcatatctgtatgtgtgggggtgtgcacacatggaggccagatgtctactaaagatgctttttctagctcttttcacatgagtttttgatacagggactctcactgaatctggaacttgccaatttgtcttgactggctggccagtgagcctccaagttcctcccaccacagtcttcctagggctatgattaaaggcgcaacactgttgtgcctggctgttttacatgggtgctggggatttggacacagagcttcacacttgtgcagcaagcacatctgcaatagagctctctccccagccctctgtgtaaatgttcctttaaccacaataagataaaaataagacaaatagaggacaatttaaaaacacagtaaataaatggatggaaaaataacatttatggagtgccaggttaaatccatcctcatgatgcccaccagaagcttctgttattattctcatttggcacagaaggaagcatgcctaggagcgcagaaatatcactgaggttacacagtgggttttatgttcctcgctggaatgggaactatggcatcaaaccggtccatacatgatatctgggttctgagaagggaggcgaacatttccatttttatttctagctggaagagccaaagctctgggggaacctcacagggaggcagaggatgaaggagactaggacttgacactgccttcttctgactcattcactcagccatatgcttaaatgtacaataatcatttagcttcctgctcctgtagcaacataatttcatgtaggctttccggtaccaagaattgaacctggggcatcatcactgagctgcattcccaacccgggcaagcaaaaaggtccactacataccagtttctgttcatcttatatctatcctctcgatcacgcttttgtttatttgttaagatagagtctcaccatgtagcccaggctatccttgaacttaccaggtagcccaggttaacggaaagcaatccttctgccttgaccttgcaagtgcagacatgagccaccaatatttttacctcaagcaatttttaaatgtacaaggatacatgctgccattcttattcttacctagataattgggtttatccagggtagaccaaaggaggcttgaaaaagaacacatttccctgtccctctgccccactcccttctgctatcagaacttctctacaaccatgctatactcctaatttctctatttctctcatctcttccaagtctttgatcttttctgtcttcacttggacatcccctttccctcaagacactcaatcttgtacggtgtcccccagttctggtctagcctattgctcctctatatctctccccatccttccctcttgccatctacccacagtagaccactgtcctctgctgctctcaagtccagcaacctgcagccggagccgtcccttcctcaagccttcccatcctctccccccttggtctcctcagattggccagtggcatgtggcagagggcctcagcatggacagccgcctctacgcctccaacatctctgacagtctcttcaacaccaccctggtcgtcaccaccatcctggtaagcggggtttctcgggcctccagctgcagctcccgagggtgcctcctccccaagctcttgcttgtgggcttcccagggaacagaagatgggaatgctaatcacagcgcagaggccaatttatgacagtgtaattgcactccagttgctgtttcgtatggaaatgatatctgatgagctgctgagcagctggggcagagggagagagaccacggtgtgtgaatgcctctccccagggatctgggtggctaggagagctgcttagaatccctagaaatgggacctttctacataggtgagaccagctggatccagtactctgagatgattccgtcttcaccagcagcccactttgcttggtagctgctatatccaaaaccatccccccacccacccttaagttgacacctagatgtctgtggacctccatggcctttcctttacttccagacagtgacaagagagttctcaatgaacccataagttgaccgaccatctgcctttccacttgattcatttctattcagtaattaccaagtctacctcccaactctgtcccctgttgtgtgcctggcactctgcttactcataaataccagagatgagtatgtattggcctgtatcttcaaagaggttatcattgagcagatgggctaagtcaactattcacagccaaggtcttaccatcaccactggccctgaagacttcatgtttcaaaagatctgtcaattaagccaactacatgttaagcaataattgctttgttcttccccactctgatattaactaatcaagagggtatttccccaccccacacagcatctcaccagggaaagataactaacaacatcacattgatattctttcagccccgagcaaggcaatgcataggccatctgcacaatctaacccctactaggtaatatgtgtaaggccttcaaatatgtctatttctcttggcttttttttttttttttggaaaataaaagaagcctgtagtcccccattatgactttcaggaactcctgaggcccaggaaggctgggctgagatgactgatctatcataaacagagtggacaaaaaaaaaaaaaaaaaaaaaacagaaaggggtgggaagccagagccccgagatgtggaggaaagagccctgggggaaggcagcaaagcctgagaaagcatcatttgtgatgaactccgaaagacaggaagcagttgcagaggaaaaggagagcaaaggagagtgtggttaggtgcttagataatgctgagaaacacgggctttcctgagaatggtcatgggttgggaaggggaacgcgtaatccagaatcaagagtcctcagctcgtaggatcctgtccagtccgccatccatccttcccttcattgggagataagacactgaatgtttccgtttgttcatccaagggatatttattggcacttctatatgcttggcactcttcaaggtactcaggaaacatcaaggaaccaaagacaaaaatccaaaatgtcaacaaatattgagtcacccttactggaaggtttgggtatattttcatagatattgctcgttgaacatccctaatgagaaatcctagactctgaaacacctggtagcgtcctgttagctccaaatgttttagattttgaagtagctcaagtttggcatttgagttacagatgcttaacctgttgtcaaactgtgcgttagaaggtagcctgggtgcaaggacaggcagcatcaatttccgggtggtcagaggagcctccttaaaggggcggcatccaagtggaggcaagacccaggggaggagctacttacttcccccatcccactgccaggaaacagctggagagaaggaaggaaaggcaggtcccaggtctgagcctctctagcgcccagctcgtcccctgctcatccagctgagaactgggagcagcctaactaagctgtggtttttggagggaagttaggacagtgcgtgactgctaggccctcccttcatcatcttttctatctgtggaactccttgagtctctctccttctctcagtctcacagtctagtccagagttcagcctgctcctgtgcatctttgtcaccagtggagtcctcccaggctccccttccacttgctaagtctatctccccatgacactcataactgtccagtcatttccttccttagtttgggttctaactacatcatgcacacataaccaccatatcatgcatcactccgtgcagcctcggggcccagggttcctcaggtccccacacctccatgaggggatgctgttcccgcccctcaggaagcctttccccagctcagaggtcatcgttactctggagtctccctgtgtgactcctgccttttctgcccctggctttctccacacccctctgaccacacaaatttggggcaggaggcaaggaacctgtaggatgtgcttcttgcctgctcacatctggaatctgactatgctagaggtttctgctatgttgaagccagaggtcgtcttcttagatagggaagttgctggtgtgtgtgtgtgtgtgtgtgtgtgtgtgtgtgtgtgtgtatttgtgtctgtgtgtctatgtgtgtgtgtgtgtgtgtgtgtgtgtgtgtgtgtatgtgagagtgactttgtatgtctgtgtgtgtgtgtgtgtgtgtgtgcatgcacgcgcgcgtgtacatgcacacgcacgcacatgcccatgtttatatgttcagattaacatagaagtccttgagaagttggtgctggcatgatctgtgtgaagttagttcaaaggaaacctgtttcctgtgcagatgtgggtgaggtgacctgtccaaaccagcaacttttactaggaacaaaggtgctaatcaggccctgtgtgattcagcaaatggtgaacccgagtgatcattccataattcaggacatagccatatcatcttacatagccagggacacatggggtcagccacagcttccatttccagaacctattttctgtgctgggtccagtaatgaacacatagctgaagtgtcactttcagtgagccccgggccggctggtcctttggctgtccagtacttctcttccctccaagttcagccctgtgaacttgagagtagagtaagtgaaaggacaatttcatgatatttattagattaactaaaaaataaaaataaaaatctcatactagagtagaaccccacagcttgtgctgtccacaaggcagagacccttctcactcataatcagcaggtatcagggggtgacaatgaccccgctcatgccacacctgggacacacccagccttgaggtgtgaagaggaagacattgaatgaatttcacagacaccttggcctgagcctaggggccattctaacaaatgcaatggtgtcagaaacggtgtgactccaaggtccgcatgagtcagtttagctgggacgggatggagatgaatgtgtggtggagaggtccttgagctgaggacagcctgtgtggtaggcgaggagactaactcatctcattgtcatgaccacggactccatcacaagtcgagcccacagccctgacataaacctgatcctgatgggacacacagcattgcatattcacatatgctcaaactgctcccccccaccccatatctctcgtctgtctggccctccatcactctgtgtagaagccccctgtggcttgaacagaacagataatcagcattgcacatatccctctgctgggatgctcagctgtttctgtggtggggcctccataattgctgtgtgcatctttctctactagtcacgtctggctcctgtgtagctctgcagacccacactcagcacatacactgagcctttattcccacatactccctgcatgactcaggctggtacccagcttacctcttctctgcacctgcatgtgcaccatgcccaaggcctcttcccagctttgtttccacccagtgcttcctggaatttgggggcacaggtaacccccaccccctgtgttctaccttctccaacctccctgatttgcaggaattccttgtcacctgtcatcacatgacccctattccctcacctcttaaaaggagccatcatcacgctgcttaaagatattaccatacaacagggcatcacagatggcacattcttgggcacaaagaggtatgactttgacgtagagaggatccttgtgaggctatttgatatatccacctcccaccttctccagttggttgtacacacctttattcatttacacctggattcttatagtcccgcacaccttccatgcctacttggaaaggccttataaccaagactcagcagcagcacacagctgtgctcttttctgagtgggaatgggcatattgtccttcttctgtcttctgcccctggactttcaaaccccttcattcctcagtgtcagcctcatcctttctaatattagttcccttgaaggtgtggttctccatcactcttaccctgtcctgcattagttctttcccatgatgtccgacattctccctgcttccaaaccactgccctgtcttacccttacccacatgtttaacctccattggtctcccccctcctccagaccccatataagctaccttcattccaagcacagtatgcccccaatcttctttcctgcccagccatccaaggtcaatgtgactccattactggtcattgatacagatgtcaaggatcttaagacccctgtttcctgctcctgatgcacaaccaggcatggagtggacctcctatgaatttatattcttgtagctttctccagtctggcccgagccacatgtgctcaggactctgtcatatatcacaacagagcgtgctccttgtcagcacttagtacttttttaaatcacagttttatgtcttcaaaacccaagatgttcctccattctgtctcatctaatgtgcaatggcctcatcccacacctgggcccatgcttagcctttttcatcattctcggtttctccacctaacccttttggcataaccataggccacttacactggagacccttcatgggccaccccttcttacatggaattgtatctaagcatgtccttccctggccccaacccccaccagtgtttccacatctctctgccgagagcctgtgtggatgtcccttctctgtggcactttctccagacatctaccagagtgacctgcctgcttcccacaagcgctctctgccttgcagtacatctcttcatttatgtgcatggtcttttaaaacttttatacaggattttaccatgtagaccaggtggactctgaccttacagagatctgcctgcatctgcctcttgagttctgggattaaaggcatacataggaagcctggcttttcttttcttttctttctttctttctttctttcttccttccttcctttctttctttctttcttccttccttcctctctttctttctttctttctttctttctttctctctctctctctctctctctctctctctctctctctctttctttttcgagacagggtttctctgtatagccctggctgtcctggaactcactttgtagaccaggctggcctcgaactcagaaatccgcctgcctctgcctcccgagtgccaggattaaaggtgtgcaccaccatgcctgacttggcttttcttttaaaacaatatgtacttgaatatttctttctgagttggagttatttcttaacatgataacctcaatttctagctttgtgtgtgtgtgtgtgtgtgtgtgtgtgtgtgtgtgtgtgtgtgtgcagatgatatgaattcattctggctttctggctaagtaatatgcccatgtgcctatattttctttatccatttgccttgtctgtatttttacttagcctgccatcttggaagtatctttgcatccttagcaataggtctgtgcataaaagaagaagtgggcccaggggcctgggatggtgggaaaggccagatgataacttataatagcataaaggggtttcaccttggctctatgcagtgggactcatgtgcgttcctaagaagagaatgctcctgaaggagtactttggggagtgggtagaatgggtagaagagggcagctaatcaccacttctaaggctgcctgttactcaagctccatcccttctcctatcccctcaagtccctgacctcctgtgctcagccctccccatcccacatggctgcaatgccagggctaagatgagactgacagctgcccagttttgctgcaggaaaacccatacttaatgctgaaggggaaccaccaggagatggaaggcaatgaccgatatgagggattctgtgtggacatgctcaaggagttggctgagatcctacggttcaactacaagatccgccttgttggggatggtgtttacggcgtacctgaggccaacggcacctggacaggcatggttggggagctgatcgctcgggtaaggagtccagtggtctgtactgggaggtggggtaggagggtgctgggggcgtggtatctgctctctgcctcacatacttggtcagtcatacttatcttcacctatccatcccagaaatctttagtgaactgaatggtaaaaatgattgctatgattcttattccagggttctccccggccagcactggagcaagttggatttggactttgggttctatttttagacgatccctgtgttttatttgtttactctgatggttttgttggtcaatgacacacccttatccacgcttggatgggccctgggagagcagaggacatttccatcagctgactttgatgtgtgggagatggaaagagaaatgtggcaacctcgggaaactagggctgaagtgtcagagatgtgggtctctatgacagctttcacttgttacttcttatgttcttttccccattactggtgtctgtttacagaccaagagccaaggtataccagcatgtgctgtcagttttccgggtaaatgggtgacttgattagatttcaggtcacttcagcatgccagtcttctgtcaggttaaagcaagggcacaaaaagttcttctgggtaaaagatattgttgtccttgtagatcaacagctgtaggacttaatgaaagcattgctaattcactgtccatgtttctacattgagttttaatggccaggacagataaagacgacggaatgcagacagtacatgtcttggtcctttggaggcttgagctctcatttcctctctgtgatttcaagggcaacagcagcctccatggccttccatcttgactgatggtcacgggccctccatgtaggatctccgatctccttggaccattgctgtctgcacttctcatatgagcagtctgaaggactcaagctgaatggcttgttaagttacactatattagatagtgctgggattcaagcccagatccctttcctcatggaatgataaccatgtgctacatagagagaggtgttttcttctgtgacgatggcctcatgaggttatactgtctggtgacatcacagctgtcttagtttgcatgttccatatgatggcagtctcataagattatatggcccagtgacgtcataggtgtctttatgaactctatgatgtttacaccatgacagaaatcacctaacagctcatttctcaggacaaccgtctccaagataagacttctatgactctaataagactttaatcctttctatgtgccaaacttaggttataagataacatttttaaatccctgtctttgaggctataaatactacttagattgttgaagcagtagttactgtcagggactacaaagagttctatgtaagcgagagcggtagaagaggtgtttaagagctaatcagagaggatgctgaggccaggtcaggcatcccagacagcagcatcttcagggtcccagcaggataaacagcaaaccccaagcagggaattatgagccacccagagggcctcagttcagagtgaacctgttcaaaagtaaggtcttgcttgcagactgaagctgggggtggaaggccagtaggtcagcaaaagcttcagcaaggccccaggatgtgatgggttgaatgagaatgactcgcatagatttcttggtccccagttggtggaactgtttggaaaggattagggggtgtggctttattagaggagatgtatcactgggatggggtttgaggtttcaaaagcccatgctattcccagtctgcttgttctctctccccctcccctcccctccccctccctctctttctttgtggatcagatgtgagctctcacctactacttcagtgccatacctgccttcctgcagccatgcaggttataaactctaacgctcagggaccatgagcccgtattaaacactttcctccataagtttccttggtcatggtctctcctcttatggcctctcctcacagaaatataaaagtaactaggacaccaggggcttggagatgtgaacacaccctttatgaatgcagaaaggcaatctgttcttctctgcagtcccagacccctttggaacacttgtttggcaactttctcatgaaggctcagcttcgcagttagcccacagcaggctggaatttcaagccttttctttgcccctcatcaatgtccttggtcaccttgaaccaagctctttagttcttcccaggctgcctggtgtctggcaggaagacttcagggatggaggagtcactgaacagccatctccttattagccccctaatgagctgtgacatgggctgcagagaaggagaagatcctgggatgcaagggcatgcatctacatactgagtgacttggacaatcagacaaggatcttaaaattcacccgagcttgtcttccaacaaaaacagtgctgtgttgatctcatcaaaactcagggacatggtatagtatagctagtccattaactcaatgggcactcatttaatactttccactcttctagacattggatatacaggagaccacataagtgtgacagtgactgtgtaattcctatagctagggagcgaggcagaaagtcgtgactaatcacatttgcatatatttgtggactatgttaagttcaagggaggcagagtacatggaagtttgagagaatatctaaaaagagtgtatcttatttagagagatggggaccctggtgagtgttaccttccctggggagatgactggcctaccctctagagaatgagtagtgactgtctgggtaagatggaaagagcttttcgtgtaacaaggtgtccgggtgtcactggggctgtccctgcacagaaatgggggatgtcagacatcattatccccaggttctatcaaagctccccaaggatataggagatctatatccagatatttcccccaagcagtaccaaaacagaagctggtcctatagtattccacgactctgtcggggttactgaacatctacactggaggagaccttagaggaaatcagaccaaatttctcttttacacaaatgaggaagtggaggctcagagaagtcaagttaattggtgcaggtagtaagttcacaggttgggttgcctaactacagtgctcatgatctgggagagcgcagaccttggtatcatctgggtataaacaaagatttcagcatctacttgccagttgtgtgtactaacgtcagttattctacccttgctgcttgctgctttactgtgaccatgtccatctctaaggagccttttgtgaaaagttacacacacacacacacacacacacacacacacacacacacacattcacgtgtattgaggaaatatttgcattgtcttttgcgagcctctctggaaaacagaaactaagaccaaggccaaagcttactgctaatttccaagagtgtaattccaaggaagcatgaggaaagggtagagattacccggcagaatgggaacaaacacacgtcagacagagtgttagagcaacagccactcgtggctctgtactgcagcaggtgcttcagtcctcaaggccagatgaaactgttgctcagcaagcagtacacagctgggagaagagcatccgtcatcagtcccagctcacactgcctgcaactcatgtcctgcaacatcagctgtggaagcactccttgagctgctgaccctaggtgccattagaggacttggatactaagaccacaaaggcagagctgaagggtaggatacatctgagggctgagctggtgagttatgtgagtctgaaccatgagacctccctgtctctaagtctgcctgaagctgaggagccctgaaggtttagttaccaaggggtccttcttccccacatatctcagcagtcccaggaagtctcaggactagagcccaagcacctacaatgtttgcgaaggtcaacaagagcagactcgggcagttgagaacacaaggatgccagggccccaaccagatcacccctgccgagctccctctgtggggaagggaatggccctttgtaagtcactaaaatgtagctgctataaagtcacctttcaggagggatgtcaagggacttatctgggacagaacaaactcaaggataagcagaaggtggattggcccaggaaggtgttctgtggccattttggcccaccaggatgaagggtatttgatgtccatgtacagggctatcttctacatcgccctggacatgaagctaggtcagtgcagttgaaacttcagcagcaggggagatgatgtgatatcaaaagaaatccacacagagggcttgggactctactgagtctcaagacttatgaagaaaagactatagcagctacctgtgcagctaagtgagatggagaaacaggatgcgtcagtctttatctctggcgatggtcttaaagccctggccagttatcacgtcctcgcacaagatatttccggggcacatggtgcgttaggtgaagaagagctttcaaggactttctgtatatgtgtgtgaaaatcatcccagcatgcctttcatgtagatgccaccagcgttgagagtagtgtattgggaatgaaagaacagggactcacagaagcaggccggagggccagcaccctgctgggattaagtctgagcagggggacggtggctgtgtggagaactgtaaatttggatttgtcttgctccagtcagccatcctcgggccctgcttggagaaaggtaggcgcgttcatcagaggaagcacccccgcccccaatctaacttcatggttcagagcaaaacaccctgttggcatgcagccccatgttgggcagaatggcacatttaggttcaaagagaaaagagctttgcaaggcttagattcaaggctcataagcctgggacatcaaatagctcttaccaatgacattttgacgaattaagtgtaaatgaagctgaaatgccttgttccatctcctctcctgggaagggactttgccagagacccgaagaggtggctgtccgtggcctcaatccactgggaagattggccagagacattttgctgaactgaaagaaaattcaaatagtcccctgagatcactctgcaccttgaagccagagactattttaactgcaaataggtcagagaatggtactcagcattctttaacagagagaaattgatccagggcccccagatgagtgttccactcattctttacctcccctccctccagggcagccatgatgtggtgagagggcgcccattttgcatcaccctccccgtgaaggttggctcccaacagtcgggcagagatggccttgaattataactccacacttcactcattcatcaaaatgcctacttcctgtcaagaactgcttaaaaatatgagggattacctgtaaaaggtctggaatctattcaaagagttagatgagaaagcgaagaattactgtacagtgtgacatgtgatatattaataatagctgtaagaatggcgacataggatgacaaaggctgacacattacatgtttctaacggtgatggggaatgaacctcgtgcttgtcaggtacacactctaccactgaacgaaaccctcactttactaatttcaactttatcttttggggtatttggtgttatgtgtgcgctcatgtgtgagccagcatgtgtacctgtgtgcatgcgtgtgtgtgtgtgtgtgtgtgtgtgtgtgtgtttgtgtgcatgcatatgcatgtgtgtgtgtgtgtgtgtgtatgtcagtctttacctaaaatgaagctctgtttgagacagggtccctcttgttcacccctgcatacccaaagcttgcttgcctgtgagctttcaggtggtgtcctgttcccacctccctcctctctgtacactaggattatagacaccctgctgctgtctgccttttgatttggattcccagataggcaggattgcatggcaaacatttaacccactaagcatctccccagatccaccaggtaatgttttaagtgttcaactgaccctgttaaccagatccccaatgtaaccaaatgtccagacgaggaaactgtcacaaaacagtagaagaatttgggtatcgatagctctggcagagtatgaaccagtttgggggttggctcagggaaggacacacaaagacaaagccagctcagtagagtagaagagccactgctcatctgaagtccactggctgtggtctcagatacccgtctgaacctgcaagtgcaaaaggaaaaattccagaaataaattgttcgtaaattctaacttgtgtataactatgaataacataagatgaatcatctttcttgcccagtgtatcaacactgtatatgctacccaccccttagtcactgtctatcaaatacgacaatactggtattccagttgctgtcatctccttattttatttaataatgtccccaaagcacaaaagtagtgatgctggcaattcagatgtgtcaaagataagccctttcataaaatacttcccataggtgagtgggaaggaaattctcaacttaataaggaaaaaatattgcattctgtgttgctaaggtccacggtaaggatgaatccccagtgtgactgtggggggggggcggataatgaaggctagttttgttcttgtacctcaagctgcagaagttacagacatagtgtgtgatggatgctcagtgcggacgataaaacatcgtagagcttggagttctgtcctgtttcaggcatctgatggatgtcttggagtgcactcctctcagcaaagagggcatcctggggaggtcaagaaggatcatcttcatagaaaggacactctggatgtaatggatgctgagattcatttagtaccatgctcttggctccggacagccataatcaggcataagaagagccagagagggataggttatattccagagccagttttgatggggctcatgtgtttggatatataagctgtgctcagacaactggtgggtgctattgactgaagacggggcagtcagtttattggattcagagaggaatggcgtcgtgaccttagtccaggggttacttaacagggaagaggatggacagcatgtacacatcacttcattagacagatgccaggaatgcaggaagatggcatgaacctgaaggggaccacgctgaggatgtccaggagtgatggagagagtaggggagttttaacacttatatctacaacctagtaaacttggaggcatccatttcctgtcaatttgtaagcacgagttaaggttgatggctggcccagaaagccttttctagaatgattccttgtgtgtgcaaagtgtgactctgcttgcaaaccatgaccacctgggaagaaaggcagtccaggctgattctgcttggttcgttatcctcagactggggagttaaagggcccagacatgaactgcatcttagtcacaggtaccttccctttcactccatcacccaggtcctcctgggtgaatggtactgcctcatctgagttctctaaaggctgttgtggggtcctcgggtccttttaggtgtgcttgattaaaagccaataaaagcccttcaggtctgcgtggcctcttgctttcttctgaatggctgtgtagctgccagcatgcacagggctttctcagctttcccaccacgaggactgagggttttcattctgcagaagaccacagtggggcctccagggccacagcctgctatggatgggaggcccagcaacactctctgtcccctggttttggaggaagtccatccatgagttttcagaacttttcttccctctggtttcccttgacattgtcatagaatagaatagggtcatgtctgccccagacatatctctccctagcccatatctaagcaacaaaaaaagaaagaatgagggaagaggggctggtatctccaaatgccaagtaagagttccagactctctgttccatttatcacaggtagctatgagatagggattattaccctgtttcacaatgaggacataggaacttgggaagttctgcaattaacccacatccagacacgcgttatatgatcagagcttagaccaacgccctcttcaatccgcaggctcaggctcttcccactgcgctatggggaacatgagaatgggtaactgtgacagagaaggtcttgggtgaagagttcttatcctctgcatctgcctactaggatggggaggaaggaaatcagctggtccaggatcataagcaaggaagctctcggggatctgtgtgagagtgacatttgattgacacatgcccgtaacctcgtatcgagaaagtgaggtattgtggtctgaatataaaatgtgcccctcccccagaggctgatgtgtttgaattcttgattccccagctggtggtgctgttctgggaggttatagaacactggcttgtggggtaggggtgggctttgaagatgataagtggactctgcttgtggtcttcttagcttctgattcctggaggtgagcagcaacagcctcacattcctgcctcggacctttccagccatgatggactctagtctctgaaactgtaagccaaagtaaacctccttcccgtaagttgcttctgtcgggaaatcaagcatcatgggtggttctgttacaagcagtgaacccacaccccttcccccacttcatgcgggggtgcacacaccattaaaggcagaggggatggagcctcagctgactcgtgtttggaagcactgggtcttgcttttttttatgggagttctccaacaggaaagggaagggaagacgtttcatacaaggttccctaaggggaaagtgatggaaagaccaaagtctatcacagcacaacgcgagtgtaagagcagaaagtcatccaactagaggcttgtctggcggctccttgagagaaagcttggttggtcaccctgtgcaagctgacctccttgtgtaatggacgtgggacgtgaaacactgtcaaagcagcattgggttggcaagacaaggtgccaggtgtcatggggcaaggccttctttggcattctaggaagaacacttgctagaattggtgggtctatagcaactggctgtcaggccaagggtcagacaagaaagctttctggggatcagtcagcagactgacttggcacttggcagtcatctgtcattgtagtaggctcttggtgatcagatcaggggttctggctttggaagcttacgggtgaggtgaaatagaggtagaagaaatatttatcccataaacaaaatacagacaggtgtaagtacctgccagaaaagtccaaagtgaacaattctgaacgtgatatcttcataccaccagagaatacacacagcttgactcctgacctcttagaaagtgggcggggccctccctttcccgggacagtggagactgaggcccagagaagacagctgcaggttcaagggaaggcctcagggtctcaattatgggtctttagatcccagtattgcttctttcccactgaaggtgttgattgggaaaacctgaagtgggcacgtttcacttcggtttggagctatctcagcagtttcagactgggaacttctccaaaccccaggggcacctgggagatgtctcagaagagtcacttcactgggattatttctgccttccccactgagtgccagctgttaaggggagaacagggtctgtagaggaaatgagaatgtgttaattaaggtccccaaattttctaagggatggcttgcagctacacagagagatggacagcagaggactgatctgggacttgagtaagaaactgtctcctgtggacagttagggacagttccatcatggcttcttctaaggatattttggccccagtcctttacctctgtgacagaggtgagtgtgtcatctggatacagaatattctatgtacttagaatattctagtctgaggtcacctgcgtttttgagagagctctgttcagcatacagggacttagcctctgccttagtcaccaaagccattctcattcaccagccagttttgggaattctgcttccggttgctcctcagcctgtctcagaggtccctaagcctggtccctggactcttttccttaccaagtagaatgcgattcttgaagctcggctcccactggcctgcttatgcactcccatccttagccagccaatattacctgcccctggatgtatgacctaatcttggttgtggattttcctcctatgaaagtgcctacagcttgtgaagcctgatgcccaaaagtctgctgggagagcccactctttaatattcatattactgccccgattccatggggaatgaggcccagtgtataacacgaagccatagcatgagatatatgcaaagtgggatcacgtaccaaatttatgggagcagagaagagagggactcattaagctgtaggagccaggcaagactttagagcagagctaatgaaaatcatagctattgtttattgaatacctagtacctgcgggtattctttatgaatcatttcctctctaccaacaatcttgcaatataaatattattattcatatttcacaacaaagaagctgaggttaatttctgcttaccagagagtttacctccaagtcacataaattgactgtgaactggaatcccagtctcactgatgccaaagtccacgatggtcattctcacacactgggatccttccagtggatgttatcgttagcttgggccttggcagagaagtgagactttgacaagcaacaagagggaatcagttgcaagcagaggaaaatgggcagggtctgaaatccagagtatttaagggccataaagagtacagtgtgcctccatcatgtttgaaggctcatcaatagcttggtgtgatgctgaagaggaaggctggtaaaacccctagagatcccagccaggagataggactgtggctgggaagtaatggagagacaatagagcttgctaaccaagggctgacaggatttatgtaggggtgaactctagagcagaggttctcacaccatggcccatcatgtatcagatgcatcaacaccatcttgtcctcgccgaacatccaaattctcacgccttacgtagactttctgaatgagagactcggagtaaaggcatcaggctgcaagttaatggatccctggcgttgttgtgatgcatgtgagaactgctgtttcccagtctatctcagctcgagaacccctggtacccaggactggtcaattggatggatggcttgggaaagaatccgcagtcctgaatggagatcatggtagcgatggattcaacaagcattccagatttagaatgaactgcgcttggttttcgaatgagtagagagtaaggaagacgggtgacgactccaggcttactcccgctctgttttggatggcagggagaactgtcatggtatgctcagagagatgttgtagatgcaatgacagaaagtagatggcatgaatacagcaagccagcaaggtgggcgaggaagaccagcaagccagcagtgctcagccttagttctattccaaaaccctcgtcgtgaggtggtggtggtgagatggtaagactgtgttcaccaccccttaccccattccctccaagccgcccaccagtcttcatcagctaggagccatgtggacttggagaagtggctacattcattacttctctcagcactgtgacaaagtccctgacagaatgccctgaaggagaatttattttagttggttgtgttggtgaaaggattatggacagactctatagcagtaggagaatagaaagtagcctctcacatcctagcagttcgggacactgtgagcttggaccaggaccagaggcagatataaaactttccaggccagtcccctgtagcccagttctgactgaacgctgtcagagctgctcaaatatactgggtttcccttgcccagtgggagggacctcggccattaaacctgcgacagtggctccctgctctgtccaacaggcagctcctgcccatccctcacttccccatgaatcccaaatgtgccccttgcccggtccttgccagggctgctgggactctgcttgctttttgctctgcttggtctcgctggctcacgggttcaggacagaatcgtgctatgctccaggagtcagagccacacactatttttcttgctgtcctgtgcttgtcagaaacacctgatgtcccccccacacatgccagcatgaagtcagacttggattggtggcaccaatgccagtgacacctataaaagcagtcgtcccccatctcacaagacaagggattgtttcttgtctttccatgccctcacatgggtccccagcttcatgccatgcctctgcctccatctacatatgcatttgctatccgggcaggagaaataaataaacaaaaaaggctaggtcccttgaggaggcagcatgtggtcaggtcaatgaattggagctgctaggaaaagcacaattggcttctgctaggcacgttcctactcaaatccaggagacagcctgagcaacctgctgtgtcccagactgcagtggaatgtggctgccagagagggcacagatggaagagcaagaccaagggtgtgtgtggtcagcaggaacggtaggcatgtgtgcacccagggttagtctcgccaatattaaaagggagtccgaagggtaggaggaaataaagaaaccggccgctcttaactgcttggtcttggaaaaccccctcaggagtggcccaaatcagaggccacatagcctggcactcacaggaatagacagaggaaggatgtgggattccagaatcgaaacccatatctcaataagagcagtggagtctattgagcaattatcggtgctgagccttgtctatcccctcctccaatcttcacagcaaccctgggaaggattcatgctctcaggggctaagtgactgaccccagggacctgacagccctctggcctactgccaggtagaaccgggggtagatcacacgtgctgctgtaagcatctcggactcttctctgcttctgagaagactccactcgggtagggacagtgggttctggagggtatggtgacagccgctcctctgggaaagcccagaccctgtccccccctgcaggctttgctggatgctcacacagttggcttcttggggcttcgcacagtctgttcagttgtttagaccagatgcagaatctgggctgactccatccggctgcacacccaaacccagttaaaattccagttgttcactttgcctcttcttgctttagaaggcatgcagatgttgagcagaaacctaccatacctgaatgatacctgaatttacctctccccaccctgaagtcaacaggggagggtgtggcacatttaagggacagctacacagtcttcatttgtctcactagccttcatttgtcttacctcagagccaacagtgtaacatgtcacatttgtatctgtttcacttgggcaaacttgttactttaaaagaaaaaaaatggggttggagaattggctcagcagttaagcgtatctactgccccaaaaatgaagaccagaattcagatcccagcatcacgaaaacaagtagggtgccccattaacacctatcagcctatcttcaagtgggacagagatgagggaggtgtcattgggcttgtttccccaggctcagagagagacagactctgcctcaaagaaacagggtggagtgtgataggagagatcactcaagactctcctgggctctgtacaagtgcacacaggggggcacacggagacaatcacacaaaaagaaacaaacaaagctgatccaggtttacagagagatgtacaagctatgaatcagcttgaggaattatgacaaggggacacaccactgtccttatcaacacctcaaaggtccccttttcagctccttacccattctgtctacttttcactctctctcaaagatggccgctagtgtcaggctggccatatcagtgttccctcctgatgagccaagtagcccaggaacccgtttctgagatgaggctgctcaggaagttattgaaaggaaagaaggtcctccagggacccccatagtctttagaggggccctcagggaggtctctggatattttctgtggcgctcccaggagttggatactttgtttcagctaaccaaaacagtcctaatgacaagcctgtgaatcacaccagtcctaattacaggcctgcggagtaggaaggaggtgaactatggtaccacaagctgccatcctgtcagggcaccagagcaccagaggagcctgcaggagcttgcctgggcccgcattactcaggcctggatctcataacatggtggcacaaggaacacacagttagtgtaggaaaggccactcaccgttaaggctgcagtcctgagaagtgatggagcctgtgagccttatcccatgtcagcctccccaaccctgtccccaaccaccatcaccactacctcttagaccctaacaagcagggctgggacagcagcaaaaagggagtggccacaggtggggatttcgtgtctctaagcacatggccttgttagagattagcatctccacatggactggatgatctcagtaatgggcacttagatgtgttgggctggggatgtagctcagatgcaagagtgcttgcctgcctagcacgctggagcctccacgtcctttctcaaacacgacataaactgggtgtggcgccacacactgtaatcctgttacctgagaagtggaggagggagggtcagaatttaaagccatctttagctacatagtgagtttgaggctaggtttggttatataagaccctgcctagaaagaaagggagggagagagagagaagaaaaagtaagaagaaacaagtgtattatcctgaaacctcaaagaggcttctactttcattccctgagcggtgtgaattggggccattcttcagaaagccaggagtggtgacagccaccatggtggcaatgtgaggaagtcatcgccactgagactcaaagtctggatgctgtttcctttccacgccactatgacaaaaacagtctgaggtgtgcatgatacatatcgattttcccatcatgagatttctttgcactcttcagaatctacatagaattttctaaagcaattaggttaataaatggaattaaagttaacactttaagctacagacagagtcatagcagcactctctcccgtggcatgtcctattccaggtcctgtcctggctgctttctatgtgcttcttgatttaaacttcgcaatatattcgtggaatatatcttatcactgcttctgttttccgcatggggaaactgaggcacagagatgccaagtaaatgacatctattgcatggccagtacctagagcctagaggctctatcctgagccagtaaactctgcttaagttgccctcattgggaactgagctgagagactccgtgcttggctcctctttgaggtttccgcccttttgttcctcgatcacatccattcagcaagcgcttcctgggtgctaagcaaaggacagacacttctgtagacatagccaagactgtaaatgacaggtaggggtcccttgtctcctggaactctcactcttccagatcaccggtagcttgatccactagcaagatacttttagatcatggccctcatgtaatgaagatgaagcaggataatgagtccaagagggctgggagtggcccatcacatgggcatccagtgaaggctagagagatgcctctgcatggtaaagtgcttgccatgcaagcaggagtacccgagttcgaacccttcgaactcacataaagctgccatggtagggtatatctgtggtgccagtattcctatggtgagatgggtggcagagacaggaaaattctggaagcttgaagcctggttagcctgacacacaagcagtgaacagtgaagagaccatactagtcaactttctgttgctgtgataaacaccatgaccaaaaaaggaatgtgaggagacaagtgtttatttccacttaccacttccaggttacaacctagcatggagggaagtttgagcgggaactcaaagcagaaacctagaggcaggaactgaagcagagaccatgaaggaatgcttactggctcacttcatggcttgtgttcagctaactttgataaacagcccagacttgctgaggaatgacaccacccacaaggatgggctgggccctcctacatcattaacgatcaagaaaatgccctcacagacatgccataggccaatctgatgcaggcaattcctcaactgatatcccctttatccgggttcgactagggttatatcaacttggcaaaaaaaaaacctaacctgcacagagaccctgtcttgcgatttggaaggcaaggactggcgcccggagttttcctctgacctccacacacttgccatgccactcatgagcctgcactcacacatggaaatgcacatacacacatgtacaacagagagagagagagagagagagagagagagagagagagagagagagagagagagagagagagagagaggaggcagagggacacagagacagagagggacagggtgttcagaggaaataggtctagtttgaggcagagcattggactgtatgctggcagagctttggttcaggcacatgtctatctgagcacaaacagcaggaaggagcacagtgaacagacacctgtcaggggacatcaaaagttaacactgtcttctcagtcccccccacccagctcagaccctgtgccctatggcttcaccctcaagcgacgagctagccccttctccccacagcccgcaatcattcttccgatctgtcctcgcaggccagtcaccgagccctgtgcccagccaagtaaatatttcatagggattttaatttaactctaagggaatccatccaaccctgagaatagactgtcacctcaagaaatagcaccagggatgacttggacctagagatgacattgccactcccccaatgaatgctaatgggtctctggcatctgcctcccccagcaccactgtgacaggctgggcacagtgagcaggcgtgtgaagagtggctggggctctctctgaatggaagctttccggggagcaggcttagggaggaggttgggagaggtgagaaaacctgtacagatgactgaactgagcataaattgtgtgtgtgtgtgtgtgtgtgtgtgtgtgtgctagcgcgcctatacaggtgaccaaaactagacacaattgtattcccttatccttcaggaacagccaagagatgggctccctgtctaagccactgggcagggacacgcaacgtttgcggatgccatgtgactgctaggcattttccctgaccacccctggtgggtggcgtgggcatccatcctgatgatgcaaacaggacgctgtgctattatggagtgtaagtgatgacttcccaggcacacaaaagccagcagtggccggccgtgagtccctggctccgtcagagtccgtgcctccctgctctgagactccagttccctgggcatctgcatagatggggatggcgggagaaaggcctgcatgcagcagatgaaaagattgaaagacagaagtgtgcagattctcatctggagtgggtggagatgctttgctaattaacctggctgagcagcagagaacttggcacggagagcccgggggtgggggtggaggggcagcttcagcacggagcaggccctgtggttggctcctggcttagcccagacctgcctactctgtcccttccagaagtgtaattagcaccctgctgacaattgctctggccagtaaggacctgggttccctgctaatgctatcctggacattaggggttcatgattagcgagtggggtgtgcgccctctagtggggtttcaagtcacttgacctgatgaacagagagaggcacactagactctgccttctctccttcagtgactgagagagagatgggagggctggctcctgaaaagatgaaaacttcgaatggtcctgaggatgggtggtgttgatggctggatattcacatgttgattatgtaactggattcagagaggaatggcgtctagactttggtccaggggttactcagcaggggagaggggagaggagagaatacacatcatttcattagacagacaccagtgttcaggggaccagtgagtggacactggttgcacaggcaggatggacgatgtggctgggagtctcaggaaacttgccttttctgccccttttgtgggatttgagggagtatacatggtctctcaatataaccctagcaatcctggaacttactctgtagaccaggctggccttggacatgaagaaatccacctgcctctgcttcccaagtgctgaggttaaaactatgcatctagcacacccagctcacaggaaatgtctcaagaaaaagcataaaaccaagagacttgaaggttcactcatgtaattccagcacctaggaggctgaggcaggaggattgtgagttcaagggcagccttgtgatacatagtgagatttttctatttaaaaacaaaacaaaataaaacagcaacaacaaagcctcactgtcatggtgcaaaggtgaatttttctagaaaagaaaaaacaatattaatgaccatttgttaaagttatactatatgctaagcactgtgcttccagtacagagtgtgcaatttcccttagccttaagggatccctagttggccattgttattgctaagcaccgtgcttcactcacaagatgtacaatcttaagtagccttaaaggatcccgagtcagccattgttatctcatggtaaagtgagaagtgggcatggggaagccatgagggtttactaaagtcacaaggccagtctggtctaaaaagcaagttccaggacagccaggattaggttgagagattctgaacacttactgtcccaacccagaaaaacaaaaacaaaaacaaaaacaaacaaacaaacaaagagcagagaaagctccacccacatcggccatcctgcctgtcccctgagtactggcatctgtctaataatgaaatgatgtgtacacactgtccaccctcttccctgttcagtaacaactggaccaaagtcaagatgccattcctctctcaatccagttacataatcacatgtgattatctagtcatcaactccaccagtcctcctggcagtgatgggcttgaacccagtttagttcgatgacccaggcttgtgatcacagaagagaggcatggcctcagagtcccttcccttctggatgtcatagagaatgtcagcccctttctccaaccttacctggccttgattgaaatgttctgtgctcttcagaggcaatctccccagggatgagggcttttgggatgctcagcaccatcctgttctgagcagcattttctcccagagccttacagaggtggagatgcaattacagagttaagtaaagggccatcaagaaagagaaagaatccacgggagcagcaggcataagctaggcccaaagaggcatagggagccgaggtgcaggggcacaggacttcctggagcagaagctgatcagagacagctcagcaggagttgagagaatttgtaaggtgctgggggcggggcggggctggggcggggctggggcggagctggggcgaggatggggcggagctgggggcggggtacaccatctactgttccagaggttcataggatatggagagtgcctactttccaattggcaattgtttccccacagatacccaatgaatgggatgacatgaggcctgagagggcccccacatgggtcacacagaagcacaaggtcattgtggctttccacaatgccagggccctgctagaaagcctgctactcactgtgggctcagctgtgtttccttttgagctgagctccaacatcatgttcagcagcagcctcatcaccaccatcatccaacaacagatgtggaccaggcccatgctcacaacccactaatactctctcactgacctttcccctgctgcagaaagtgggttctgattacccccacttgatgggtaagcacactgaggtcaaaagaagtgaaattacttgtccaagatcacacagcaagagttgagccaggcctgtcccacaccaaaggctcagccagcacctactgatatgatacaacggcaccctagtttgtatagcctctaggctcctccatgcgatcatctctcttgattcgcctattgtctgcacaggcagacattaaaccttgtctggaaccacatgactaagtcaccatgagttaggggtagccttatccatgcctcgggaaaagtcataggttggggaagcaagccagggtactaggagacccaatgtatgccaagagagaggattttgcacaaaatggcagtggctgttttaaaatggcagccaaggtaactttaccagctttgtccactgtgggtaggcaggctctgtgactgccaacagatgtcctcatcatcagggaagtaccgggggagactgtgggctcaagcagcctgagcagacaggttcctactgtgaacatgctcttggtcctagcccagacccagatacccacagaagccaaagtgggctttgggctttgatgtcaaacaggggtctgctttatgatccccgttaacctccaaagagacaaagggtggtggttttggaagtcacctctaggccagcccctggctggcccaaccacataaattccacgaacatctaggagataaaaggggacatccctcagaggtagcttacaaaggccttcatagaacacttttcaatcaaaactaagcaaaggagtgaagcctggtgctcatggggaatacgtttaaacacgtgtgtgtgtgtgtgtgtgtgtgtgtgtgtgtgtgtgttctcttttcctgtctctgatctcagcctgacttttggcctggtctgttttcccaaccataggaagccagggtcaggtctgagccccacagttatcttcccaccctttctggatccaggtttctatagttgctgcccatcctgggatccagactgtgtcctgggcatcgtgtcctcatccataccacacaatgccattctgccagcattacctcctggggcagagtggggaccagttaaaggaagtcacgtgacctcgagcagggcagaaagcctaggattgatgtctgggaaagccagggagctccctactggacccttcccgttaatggttaaggagaccattcctgttgaagaaaagcttgccaggatcacaatgaggctggggaccagctgtgacaagatccagatcccctcatctgccatccactgctccttcccatgggaagcataatcctttgccccccccccaaggccccagacaggctgccacgtgcccatgttcccctccaccccccagcctccagccttagactccaaagcagtcatgtagtctcaacccccttgcttgttagtgtgtcttcatggcacattatctcctcatctgaaggctgctttatagcataatgtctttttaactaaggtaaaagaaaatgaacacacatcttttggaatactctgatcccacgtgatcgtggctggcaccccggggtgcgctgaagccaaggtagataattactcttctatactgagtcaattaaatataaaaaacagccgccaccaaacctcttgcctgtttcttgctgtagcttgctgctgctgctgcttccctgccccccaacttattccagcctgaggaaaagggaagagagatggggtgagaggcaccgccaaatcagctttgccagccgaaaggcggtttttctatgtggggtccagtttggggaagaaatggcctgtatgtgctgggagcatgctgttcccacctacacaggtggaggggagaaggatgtagcccatttccggcgctctgtccatatggacatatggattgctctggcattcatcatgcctttgttggccaacataaataaacttgcaaaatgatttccaaattgttacccaaagtttaccccttttacagaaaagctgagcgtggaaaaaggaaatccggggtcatcgcgatttactttggttaattgatttggagttctgagaagagaaatcaccagagaaaggaacagatgctatgtttaccccttgactgttttttttttttttgtcaacttaatcattttgaaaattttaattagtgtatgtgtgtgtgtgtgtgtgtgtgtgatgagtatgcagcggcatatgacaatgtgtacacaaaagaggacactggtgtctgactgtatcagtctccccttactgctttgagaaagggtctctcactgaactggaagcttatgttgggctcagtgagctcctgggatccatctctctccacccccatcagtgctagggttacaggcatgccttgatttttatgtaggtgctatggatttaaatctaggtcctcacactcgcacaagcactcttacccagtgagtcatttacccagtcccaatcttaatctcctgtatgtgtgtgtgtgtgtgtgtgtgtgtgtgtgtgtgtgtgtgtgtgtgcatacatggaggtgaggtagaggtcaacttcaagtcattcctcaagaactcttactcaccttgatattttgaggcagggtccctaactagtttggagctcaccaattaggctaagctggccagccagtaagcaccagggacgtacgtgggcatagctgaaggcacattgagattacaagtgtgcctcgctaataacacagtcttaagcatggatactggggatccatctcctatctgcacgcttgcacagaaagcactgttggtcacgccatctccccagccccttgttgtcttaatgttcacttcagttgctttattctaattatttcaatgcgcgctccttcccgctcaggtctcaggcagagctatgcccctactctacaacacacccacgggtgtagcattgcccctgcaggcctctagactgactttgttgttctgaattcagctcaccagctgaattcaagtcagtatctctgggaggctgaggttctgaaaggcccaggcaagcctctgaagagtccccccgccccacccccgagacggagatgctgacaatctactaatcaaaccccactctgtcaccaagggctgattcacttggtggcagtcatcaacactttcagaaataggaaacgagccgctcacttttccccttcttcattaaagccctcgttcatctgcactccggtttctttgaaggatggctctacttgattagggtctaagtttgctaacctttgctggggcatgaattgaggatggggagactgacatgaagatgttgaaagtgaaacttgataggttttctcttcctgagcctgagtcacatcagcatttaaattgggtactatccattgctgtgaccaaaagcctagcaacaacttaaagaggagtccatcacagcgtggtaggcggggtagcaggtgcttcggaccatggcaagcactagaagctgagagaggcagatacagagacacagagagagacagagacacacagagagacaaagacacagagatgcagagagacacagaaagagagagacagagagtgagacacagagagaaagggacagacagacagacagatagacacagagacagagagtgagagacagagatgagacagagataatatgtccctggatgccaaactataatcacaagccccaccattcaggccctgtcttctagctaaggctccaaatgtcccaaaaggttgtgcaacctccctaaaccatagagaccacatgttccaacacaggagcccatgggtgggaggtgggggggagattcacatctaaagtgtaacagtgtcctactttctttgcaatggtttggcggtcatcaaatgcctgtgcacatgtatgcatgctctgggtattcaaacccactcaggactcatggctttgtggacatttcaccttttctccctgttttttttttttttttgatgaaatacattgcctgagtgataaatgtggctcttaactctttggtcttaaatattaaaatataggttagaatcaattgctatgaatacagaatccgaccacaaagaatctgaccctgagctctgggaagaaattcaggagttcacattttaattggtccaatgggtggtgtggatagatataggtgaccccagaggttgcatttcgagcattatgttaaagaatcgctgtgaagaatggaaccctctcttcactgtacattgtggatgaggctatatagtcctagataggcacattgactaagcttgatcaattctttacttagggagagtacacactagaacctagtcctggctctgggctttcccagggccccaggtattggcttgcagacaataggagagggtttcttttcatcaggatggatttaaattggatccaaggaagaatttctgatagagaagaatatggaggaagtttgctcagaaggtctcttttcctggaacgtttagaaactgtatctgaacagtctgattgtcttctcccatgcttgaaacttacctatgaattcagaggggtctaccaataagaaaacatggatcccagcttccacatgggtccttctgagagcgatggtttagatcctgatagagccaagaagcctggtcagagtgacacctcctctgcggtgacagcctctggtcctacctcctctgatagtttctctctatgtcctttcagaaagcggatctggctgtggcgggcctcaccatcacagcggaacgtgagaaagtgatcgatttctccaagccattcatgacgctgggaattagtattctttacagagttcatatggtaagagacttattttacaagcatttatgccattaaagttatttgcatgcaaacaccgagttacatggtaataatggatgactcacagaaatatttagatttcgagacttaaatgcaaatgcgctgggctattttttcttccatcagctgcaggaacttacaaatagaggagatggaaaagtcgaacttgggagctttccagccaagatggcttctgtctctaaatagggatggccaagagagccacttggtacatagtgtgtcagtgactggcttcagttatgctcttccaggaggtagggactaaagcttagataagtgccagcatgctcagggctcctctgcctccagggtccactgtattcactctgaacattgtaagagtgtgggattatgggctttgccctctgttgcttactggtgctgacaaatacaaagctggggtctatacctgctaaacccagccatttacattccttctttctttgcttttacttttttaaaggattttttttctggctatgaaaagcatcaaatgaatacataggaacaccacagtagcgagccaaagatagacatggcatctgagtgtcttgcctagtgaaaagatcaggaaagagtcattctggctgtgggccatcaatcaaatggatcatcactccgtggccagccaacaatagaaacatcctcgcttccattattagaccagaatattcttcctcgcctccttcacctaaactacctctaggtgtacagctgtcatatagatttccctgtattctagtcattttctgtggtcataatttaactgtcacaattctccaggatgtaacctgacgccatgagtcactatgacaatggctctcatttattgagtacctctgtgtcccagtcaccgtgaggtagagtctagtataggaatgaattgtgtccctttaaaatgtgtgctgaaatcctaagccttgtacctaaacatgtgccttatttggaaagagagtcctttccaatattatgaagagttaaagataaagtttagcaggagtgcccacaagccctccagcctgcctcctgggagaggagacccccgagtgtctttgcagcttcagcctggttcacagaaatcctgctttagaggagaaacaagttgccaatgggcgtgtccctcttatgtataaatctgaatttcccctgggaattggagagggtctttgtagctatggccaggtttctccaggacagaagtcactatgctgcaagaacatgtccagagggcttgacttagcagatatatgctgttctctgctgggctacctggctgggaaaagatggccagaagaagagataggtgttgagtgttaagctctacagagagagacaggacagcgaggactccattagaaccatgcagctaacggctctgtgccttgtggagaaaagaggctgtgatcctccgaaaccatatcctcccttgtcctattgtgatgaaagctcccacttactgagagcatctgtaccccagacacttgtgggtacctgtgatgtggactctggtttgatgttcaattgtgtcctcttcaaagtacatgtcgaagtcccaattccacagacccatacacatgacctcactgggaaatagagttcttgccggtgtaataaagaggtaaggtaaaggcatactggatttggataggtccttgcccaatcactagccagcatcttgcaaaatgaagagaatttggctggatgaggtggggcatgtgttaatcccagcagtagagagtcggagacctttttgggaattcaagcaagcccagtcctccctacctagcaaattccaggccagtcacacttacatagtaagtgttgtgtttctaaaagccaaggatatgttttctagggctctgaggtacgatgtgatggaaggaggtacttcagcgggtggtacccatgctgaagcatccctccccgctgagataccagccatacaaagggtctagtgtagattagaatttatttagggacgtgggaagaggagttgagaagggagtggaggtagagaaagagaagggaccgaggactgagggagggagggggagagagagagggagggagagagagagagagagagagagagagagagagagagagagagagaggagacannnnnnnnnnnnnnnnnnnnccaggaacatgtggagggggaggggagagagggcgaaaggggtcagagagagcaaagggggtcagggagtcagagagagtaagagaggggtagaggctaactggtcccttttatagcaagccaggcctacctggctgttgctaggaaactgttgggcggagtgaagaaggaatgccaacagtaagactttgctttaagacaattgtttttgaggggtcgggggtttggacacagatgcacaggggagaaggctgtgtggaatcaaacacagaaaccgcagggcggcatctccatgccaacgagcatcagtgatcaccagcaaccacacaggttaggagagatgagaaccctctcctaggggcttcagagaaagccaggctctgctgtcacatcaatgggcttctatcctcaataactgggagatgacacatttctgtcattgtaagcctctcggttgtggactgtcttggccatcccaggaaactgacacagttgggctgtgcttattttagaaatgaggacaccggatatgatctgtttgaaaagtaggtcaagggcatatgctaggtattcaagaacatgctaaccacatgttagtaagccaaagacaaggtgtaagttcagcctcactcactttaagtagtcagccaaacacccgtacctgtgtggtctttggtaacttcctgcagggtacgctcagcccttcccattggactgttctctaagagaaagtggacgagtactaaaaccccatctcacagagcaggaaaccaaattcactcctggggctatctcaaggagaggctaggactcagttctctctctccgtgatggggatctggacttccagcaagccccatgtctccagcttcctctcttctttctctcttgagctccaagagggtttccaaaagaaatggagacatgcatcctttcaacatactaccctgctctggccagctgtaaaaacccaatcaggctatggccttgatttctccattaatactgagggagctagaacacagcggagacccgttgacctacgggcagcactgagatggagggacacatagctgggatgctcatcacagggcacaacagaatcaaatagaagctctatccagtactacaccttagtcaccaatcctgtggacatcctaaatgagatcaccaaccaaacattttctatcacctacctcacaaatcagcagctatgttagttccttgcagtagttcttgggaaattaagtcttgtatgtcaacttgcaacactacagcttctccagatgtgtgaccaaccattagtccacgtgttttttagaaaagtcttttagagtcatggtgacatctgtaattattgtctagaactctttgccataaagatgccccctaccaacctttgcctttgaatccttccagcctcgccccatgtatctatgtccaaatttcccactttagaaggattctcattattgtcccagggatcacctttttttttttaaagatttatttattctattatatgtaagcacaatgtagctgtcttcacacactccagaagagggcatcagatctcatatggatggttgttagccaccatgtggttgctgggatttgaactcaggactttcagaagagcagtccgtactcttaaccacagaaccatctctccagcccctacggggatcaccttaatccagtatgattttatcttaactctccataacattgtcaaggactctattttcaattgagcttgcgtagtcacatatacaagtcacgggagttaggatttcaacaccattttgagagggacacaaacgaaccccaagaatgtaagatggcctttttcaattagtttaatgctataagaacaaaaagagaatttctaaagaaggaattgtgtcccaggccaaagcataaatatgcctcagattctagcctgttgatcttttggacttataaactcctacagtcatatgagctaatcctttaaaatcaatctaaatatgatagataggcaaatgaatgcatggataggtagatagatagatagatagatagatagatagatagatagatagacagataatcaatgtataataaatagatgatagataataggtaaatagatacattcatacacacatacacaataggtagatggatagattgtttagtcaaaattctactgcttgggaagagacacagtgactatggcaacttttataaagtttaattggggctggcttactgtttagtccattctcatcatggcaggatgcatagtgacatgcaggtaggcatggtgctggagaggtagctgagtcttacagccagactggcaagaagcatgaacagaacaagacaatgggcctagttagggcttctgaaaccccaaaggccacctccagtgacacagttcctccaagaagctcacacctcctaatctctgctaagtcatgccactccctaatgcccaagcattgcatagatgagaatggggccatttctattcaaaccacgacataaatatacagaaaattgatatttagatgataggtaaggagatagacagacagacagagagacagatggaggacttatagatgatatgatgtgatatgatatagctataggaatatataaatatgtatgtacctatactccccccatcatttctgtttctctggagaacctaactgaccagcacagtctatcagattggttcagaattccccctctctccagccctaccttagaggctctagtatgccacatagctgctcagaactaatttataatgaggccaaactgagtgaagaacgagttctggcacaaacaagttacactgagcagacctgacagtttatgcatttattcaacaaatatttactgagtacattctgcgtgtgaggcactatgcttagaaagttccagaaactcaactggtgagagaacattcctaaattggctgaagctgaggagagctagtaagaatgtacgcagctgtgtcaggatgctagcatctgccaggcggagtctgccaccagagccctatataaacctacacagagatgctgccttcaaaagaatagtgccaatgtgatgaaattaaggttaaataatgggtgtttactggtttgtgaattttctctgattgatggttatctttgagcaaaaatatagctaatttgtcctcatttataatctataagaatctagaatctctttctcccatatctataaggtcacctgactaatgagtaattgttaccagaaggtgaacatctgcctgcagtcaaatctgtatgcaaacatcagagtacttcactcagtacaaatgcctagtcaagagctgtttttattcatttattcatttttaacagaaaaccatgaaatttgtatgtattcacagggtaccttgtattatgtgtttacattgcatagtgtaatcccagttaagcacaattgcaaagacctccggagagttatcagaatggctcagtgtgcacagtgcctggtgtgcaggcctaaggacctgagttcggatctcctttgacccatgaaacacctagtgtaatggtgtcatctgtggtggtttgcatagaatgcttcctaaggctcatatatttaaatacttagtcaccagggagtaggacagtttgagaaagattaggtgtcatggctttgttgaaagagtgtccctgggagtgggcttaaaaagcccatgccatgcccagtgtctttttctctgcctgctgcctatgcatctgcttgtaaagctctcagctactgctccaacactatgcctgtctgcttcacactatgatgataatggactaatccccatgaagctctaagcaagctcccaattaaatgctttcatttctaagagttatcatggtcatggtgtctcttcacagcaatagaccatggactaagacagcatctgcattccattgctttggaggtggaaacaggtagactacaggttctcgtggtctagccagtctggttgaaacaaagagttccaggtccaatgagagactgtccccaaaacaagctggagtaggagaaaagacacacaataacagcatctggcctctgaatgtgcaagcatggacacatacatatacacaccatacacacactatacaaaacacactacacacatcacacatacacagtacaggtacattactcgtacacactacaagtgcatacacatgtacacacacacactccagaataataaatggtggctagcatgtttctgaaacttaaagatgatcagaaacactttatgaatttccaacacttttccaattgttttgcatataggtcattaaacattcattaggggatattctctttattcctaacatcacagaataatgtttctgttcagccatctctaagaccaaaataagaacattccctgctaattgacaagccagctcaggagtctggctttggcatgtctacagttgaccctttgaactctttgtaactcttcatccctagcacccgagtcaccatgtctcctgatgtttctggtgcctctccatcaccttgactaaaacctctgtcttcatcctttccctcccttctatgtccttgccttcttccctagctaatgccactctaactctagactcctctctgaactccagcagcatgtacctcttgcacatggctacttccctctacctggatggctaatagagacaactcacaagctgttccagacagtagggaagggcttcctttcaataggatgggttaagttgcatctatggaagaacattctaacatagaagactattagcaagagcatttgctgccctgggatatttggagaccgaatctgaattgtctccttcagcaagctggttcctcttcctctgtctcagctcagataatgtcacctcattcagtgacctgagctgactcctctttcttcacccccaacagtgctcaaactctagataatctccatttttttctgcttctctctaacctcagatgctgttactagagtagcttagagtgtccctaatggaaaagtatctcctagtcacttactattacaaccaaagaccacaggcatcatcagcattcactaagaaataatggtgagctttctttccccttgtcttcattgctgcctttgccctcttcccccacaataaaccccacatggaactgtaaaaaaacaaaaataaataatggtgaagattctggactctaggcctgctgttgatgctggatgggacagttattcagtatagatcacatgcacctctgttgcttcatcagtagaaataaatgagttgtcctgtgcagattaaatgagaacacacatgcagtgctcccagagcagtgtctgctgtgtgcacaaagaaatgttcactattatatgtactaaatacaggagaattgctcctcacttcattccaggcttcatgctgcagcctgaaagttgattgcttgattgtcttacaaatttaatcatatcaacctcacactcctgatcatttaccagctgcccaatctcctagcatggcatgcattacaatagcctcccctcacctccttatctaggttcacattcatcttctgtcccgtcaacaacagaacaaaatcatcactgcccttctatacccagctcaaatgtcatgtggtctctcccacccaaccccctctcttctctcagcagctgttatctattctacactttcatgatgcattcaagttttctttctcatcttttaacaagaccccagtatggggtataataaggaaaagctactgttttgtcagacaagaattttagatattacttttgatttggaaaatgtggtgattctaaacatatagtatttcttgataggcacatgaaaataaagtgggaaggcgagagagaagagtgaaggccctaaacagtggccctgtggtcagtgagcaccatcctctcagtagaacaacactgagccccagaaacccaatttatgctagggaggtccagtatgctagtatgcaataaaaaaatatttttttatttctgttctttatcccaattggtcttgagacagacattttaggcagcccgctatatcatccatacctgccacttgaacttattgttctctctggcaatgtctacacacccaacgcacagcacagcatctgtatttgttacttttcttcccgctgtgacagagtccctgacaaagcaactaagaagagaaaggagggcttattttggcttctagtttgagagcacagtctataacagcagagcaagcctggcagaagaaatgtgagactgctcatcacattgtattcacaatcaagaagcagagagagacagatgctggtgccttccttctgtctttcctattatcatctaagatccccgcccatgagatgctgcagcccacactcagagtagggctttccacctcagctaaacttctctgagaatgcccccacaggcatctgcagagctgtgtctcctagggggacgccaaatctagtcaagtggctagtgaagaatcaccatcatcacactatccacccgagaaagcaccaggatcgatccttgcctgggaccagatgggattctaagccatgcactcatggttggacctttagaatctggggtggcttcatctttgatgcttcaaagttggtagtcatgtgacaggatctgggcggagttcaaggcgtatgagtcccctggcaaattaactcatttctttttaatgagaagtttggtgtttagtctagtagtttatctccaagggggttttgttttcaagagttgtaaggcactgatgcgcactgtgaattctcaactatgtgtaagaagaggagagaacagccaggaaaaaaaaaacgtatttgacagagtatatcttgtggccttctgtcttttttccccctgctgcaacaatttacctcatgacatttttgctcagactaatattaaagtaagtttgtatttctcaagcactccctgtctgttgtagcaaggtaatattggaatttgccagaacccaacctgggatacaacatttggcccatttaacccccaaatgggtaaatctcgtttaaataatttcatgttggcttcttcagggaggttggattgatgtctaagatatagcatgttgacgcacggcttttgatttatgagacgcttccacacaggctctcgttgagtgcagcagtgccagagacaggtgggatggttttgaatgcatggattaggaggttgcaaccctgcaaacctggtccttcagtctgcactgaagccaagtttcctgtctccaagtcccaaatactgtcaattacttgtcccatcctatagtacgtctattcctcccatgtagaggacatgcattgactagatgcttgttcaaggctctttcctatctgaggactcaacatgggagatctgtgaagccacacaaggtctctagccagcctgagtgccttggagagggaagctccattgtcttttcctttgctttgctctcagagtcttttccctcannnnnnnnnnnnnnnnnnnntgtgtgggggtttgaatgagaatggactcatgggctcatatgtttgaatgtttggtcctcagctagtagaactgtttggggaggattagggttatggtcatgttggagaatagatgtgtcactggaggtgggcttgaggttttaaagacccagtttgtctgtctgtctgtctgtctgtctgtctgtctgtctatctctctgtcacacacacacacacacacacacacacacacgcacacgcacacgcacacgcaggcacacacacacacacacacacacaggcacgtacctgtgctgcctaagttataaagctctcagttactgctctggtaccatccctactgcatgccaccatgctccccaccattgaagatcctggactaaccctctgaaactataatcaagcccccaactaaatgcttccttttataagagtcaccttggttgtggtgtcccttcacagcaacaggacagtaactaaggtagtcagcaactaaaaagtgagagagaaataaatgtcaaatggagctagggcctggcattttctgggtgtgttatctgttttccaggccggccagtttcatctcagcaaggctgtctaggaacagggaggagctctaagcagtcagcaattcacttctaagttattactctgttataaggtggtcaaaatgaatcatgtccatgtccctaaagctgagtaacttgatagcacaacttgccattagaaatatggacccatggatagtcattgtaatattggctgtttatagatggagctcactcaggagctcaggttgtcatatcagcattgttctcctaacagtcacattcatccttcctgtgcatcatcatgttctgcttttatgacagaagaagaaaaacaagatgcccagagatggtgagtggcttgccaaggcctgaccactcagtgagtcaaggttaaggctagaatgggaatttgggtgtctccaagcctgatctctaagcagagaagtaagaatagatatgtgcatgtgtgagatatattgacaaacagctttctaggtgttttgtatggaagggaggtagctgcttgcttacttcatcctcctgggcttaaaggcagagtgcacactcagcctcactatacaagacacatcctacagattaaccacatgagcttttacaatcatacataacttcctctgcctctcccaggctgagtgcctgatactcttatctccttcccttttcaaccttagaggatgtgttactgaccactgaccattcctggcgcttgactatctaacaagaaaccactctgcaaactgctgttacattctgtagacactccaaagtacatggaatacatgacacagatcatatggtaacccctggccagtgacgtgctggagagatggggcacagggaggagaagaagagatgacatcactggtgttatgtgcaggaaaatggcgtcgaggcacactgccctcccacagttccaagagcagctacctcctgtctgcttcattctttgggaaagctgaaatggaacttagttataaggattggaatcagaagcagccctaatgacacgtgactaaccccagtactcacgaggaagagacaagaagatagtctgtagtcaagagtaagtttgaagtcagcttgagctacacagtgagttcaagtctagcctagactacttgtctcagcaaaacaaagcaatagcaacaacaaatagaccactggtttctgagatccatccttctaggatgaaggctgggttgccctagctgcttccctcaagaaccccggagagcccttctgattcatgtggtacaaccacaggaacatgaagaattcggaaaagtgattgtggccagatggccatctcctccctcaagtatctttatcctgtgtcatcatgggacagaaagtagtatttctggtccactaggggaagatatcagtataaaaggaagacccctcctctgtcatacgccatccttcctttcattcctgcctgccattagagaaagagagagagagcagtgtgtggggacatggacacacacacacactccttactacatcttcagtcctcgaaataaccctacaaagtcagatttattgttactcctaagttacaaagagtatatagatacccaggggttaagtagcttgcccgccgtggttgagcttgtatctaactagaacaccaacatatacctggacaatctgactgcggagtcagcatttttgtttaccatttagtctgctttgtctggccctggtgtccccatgcatttggcttcagactttgggaaggagagtactttctacaatatcattttccaacacacagaaattgaattaatagatgtttaagaataaaaggcagcactgacatatgtcatatgagaagatccactgccaccatacaattcaaacagcctccacagtccaggaccatgggctagttggtggccaatcctttagagctctcttatcactaaagaggccagctgtggtagggtcagattgaagcacagtcaaaaattcaaggcaactgcttctaattttcatcccaccagcaggacctgtcctgtccttgacctccacagcacagatctatggctatggctgtatggagagagatgggtacataaaccattacttatcttcattcagaatggttgctgtcacctaaaggcactggccatacctgcagtctgcagttatattgatcgtctaagtcaatacaaatgtctataaaacaacagtcacaataaatgatgatgaggatagataaatacatctatgagttctttaaatgggtaggattgagtaaatctggattctcttggcacggggtagaaggcctgggattaattaaggagtttattggagcgagttacaaacattaagagttgaacaagacttgatacagctgccatgagaatggagcagcgcagcgtgccgatggcacagcttgatgagtgagtaccagggaaattgaagccatcaccaatgatctgagtgagacacagcttccctgggccctggttcttctgtctgtcagcatggaaactcgtattgaaatcaagagcgtatagcgaggtactgagtttttcggaagagtcgctgtcactgttacacatcttttgggttcagtagaagctggtactttgaaaaagtgcctatggcatgtgaccatagtctgtgccaagtcccagtgactagggtgtcccttgggaaggaagcaatccgaaacatccacataggaaaatgggttagcattcagaatcttccaaggagcatgcttcctttgcagttatctcaacagcatggctcagcctaaacccagacccacatctccaatggctgcccaacccttgctcttctggtcagtatcagtcaatcattggtgaaatcagaggctgccagtgtgacaggccgctttcaagtgaggctatgtctacctatgtcttgtttcttatttgtgtgatgtcccgcaccatataaaccaagcctctaggagtttgtctcacggctctgcatcatttcttatcaaccctaaccgaatatggcagctttaaatagtgctgccattttcctcgggttcacggcttgtgatacaatcaggtatagatttctgacatggaacatctaatggagttcagattcagaaagcagcaatgaaagattttttttcccccttcctggctgtctcacacttgaaaggcacagaataaaacagttttaacaggtcacatagaattcatgtacatttatcgagaggcagtctgcaaccaagcgtagccccgagagtggaccaagctagtgatttctactgcagtacaaaagtagcaaaggtggtcttctttgagtccttcatcacctgtgtgggttcttcacactctgcatctttctgtgtctgccacgggatgctagggcgatgagtaagacagtcagcctgtggtagacattgcaatgaacaaccgtggacccagcttctgttgcccctgaaccccttgtttcttgttacaagattgatgtaatgatgggagcaaacacactcatgatctggtctctaacctgccccccttctcctgttgctgctgctgcttctgcttctcctcctcctcccccctcctctttctgctaatgctgcttctccttttcttgctcctcctcctcctgttcctttccctcttttgccgtcctttgcctcttcttcagactcattttcccaaccagcctgatcaagcgtcctctgaacatcaacaaccattcatgtactgggagaaaatgcccttggattctccctggcctgtgctatacatggaaagaaaattattttcataaaggcttcctaagaggttctggtaacattgatgaaagacggcaggtctcaagaatgactgcctataagcagggcaagtggtaaagcaactctgtgtcccttttgtgccaggggaaagtaaaattcttccctagggcattgaggatgctcctcctggttctctgagaggaaatgagaagccacccataaaagctgaagtcactgaggaataaggctatgcaggtaccatggggtcactcacacagaaagctattgaggcaggcactgcatataggtagtaggtgctattatgactgatataactttaagtgtgaaagcagacctactcatagattggcttaaggtgatattgacttctagttacatccacagacttcctggattcctgagatcataaaaattacagcatttccgtttcgaatggcccttagacagcatctagcctggtggttttgtagtaaacagaagaaataaagctgacagcggaacgtggctggagagagcacaccccacctgtagcggcaacctctgctcagctcctgtgccgtcagaccgtctagggcagtggttctcaaccttcctagtgttgcaactctctaatacagttcctcatgctatggtgaccccctgaccatgaaattatttttgttgctgcttcataactgtaattttgctacttttatgaattataatgtaaatacctatgttttctgatagtctcaggcaacatctatgaaagggttatttggtgccccaaagaggttgtgacccacagattgagtctaggtgttcattctgacgtagggtgtttgtttcctttacgaagaaaggaacacagatgtgtatgtgagctctcttcaatgaaagacgaaacactgtagggtaatggagcaagcctgcagctttcagagagtgggtctgatctagcccagctttagctgagaccagacaggatcaggcaccagacgccttgacaccgtctttcacattctttcttgtgagacgtggtgggaacttggagctgattttcctttcctggctccaacttcaagagttgcaagcacatcaagctatgaggggaccggatggtgacttcgagttagaagatgtgtctctaagtcatccatttgccatggcatgactttgggtgcatctcttgggctttggtttcttcactaggaaaatggacaaaatcgtctgaggggccctcaggactttgtttccattgtctgaggacacttggcaaagcaaaaagccaagggaacaagccatattaacactctcaggagaaagatgcagacattaaagagaggtgctgaggtcagacccctgtacagcaacttcacctcacaggtcctcctgagccccaaggcagtagtcgcaggtgtcaaagggctggcagacttactcagcacaaagcctcgttattcctggaagagacagacccacactgctctttgattcatcactagatcggggtttacaaggtgttgggctacactatcatctctggcattgttagaatcacccagagtctccccagaatgctaggtccaagccagtgctcatgccctgccctgcccaaagccattttgactatgtatagtgaatcttattttcatcttcattttcagggacgcagaccgggctatttctccttcctggatcccttttctccaggagtctggctcttcatgcttctagcttatctggcggtcagctgtgtcctcttcctggtggctcggtactcttccctttccttccctgtcctcacaccgccacctcgtgtccactctgggaactgcacggggcggggggtggtgggaggagaggatggtttagaagacctcgggtgccaaatagagatggcagagggactgggggcctgaaatgctctctgcccagctgtcaacctcacactagccgtccatctgcctgtgcttgtgttccctaccatgcacagtgcggacaggtttgcttgtctgcgtttgcttttgtattctggcctcctgcatccttgccacccgccccaacttggataggaactttgggaaagaggagagagggagggggcgacaggaagactgctctaattaagcatggtgcatttgggtaccctggcatccctccttgctatgatctgccctaaagtcctgaatgatgagaaatggagcttgcaaatccaaatagagttggggggggggggcggggacaagggggacagaggccacagtgacacaggccggggaaaatgcttcctctgcagaggttggctctgcctctgaaaacacagctgtcttggcaaacaaaacccacagagggtagcaggcaacaagagggtacatttgtgcccagtactgagttgggagaaatggtaaaggttaggggccagggaaaattaaccttcccttgtccgcagaaggcaggaactgttcctggtcatattgaaacactccagggtatctctaagctgtaagggattgtttgcccctgagctaaggtagcctgaatttcaggacaagccaccttccacctgtttaagtccccgccacctgctcagtttatcacaggggactgttgagtgggaatggagaatagcttagaatgagctagaaatccaacagaggctctgtggcaagtgacttcttgtctctaggccacagcatcggggccagatgatcctttggatcctgctctatctctcagagggggggtcttcctggggttgtgttctgtctatggattgggtgcccatgctctttccactcaagaaaggcaacaggaatgtattgagtcttacatgaccccagtgtgcctcttcttgtggtgatcaaaggctaaatcaaacggcctagtagtcttcaaaggcaccggggtttgctcttgtacaccacccacctctcttggccccataggcactgccactgtcaactatctgttgtcagtgacagctggcgaggtgcgggagcttgcgtgctgtctgacacttccattctccacttcgcagcgctgtctgctgctgtgtttaggaagctgtctgtgagatccaggctctgctgctttgagattctctttggccccctgtggctaaggctatatgtgtggacagttggctctagtggagtctgcacagctttcaagtcacctctaaggctctgcaaagggtcttagtgctttgttgctgtataaacactcaaaagggactcacctaaagctaccctgatgggctctgcaccctcctttgtggctgccacgcccatatactgtcccaaatctggcattagaaaataataataataataataatgacaacaacaacgacagcaatgacaacaacaaaagaaaatacattattagcctattgtggtaggaggctgaggcagaaggactgccatgcatttgagtctaacctgggctatgtagtaagctccaggccagcctgggctagagtgagaccctgtctcaaagaatgaaaatagaaaaggcagtaaagggctaaccatatgactgcatatttgtatgctatgcaaacctgggatattctgctctaaggcaatggtttgcgcatgggttccacggagcacaaagactcctgggagccttcagacacatgtggtcactgagaactctgaagccccagtgcctgttccttcagacaggttgtactttcacttccgtatgctgtaactctggttgagtttctagagcaggaaaattaaactccaggtaccccccccccatcagaggtacctcacagcgctaatacttgtacctttgcatctctaaggctgggatctaggacactgcatctgataagagggagtcagtggctgtcagtgtggatacggacctggagcttacaagtttttagtcctcatgcaactcacaggcttatcgtacaggggcttttaaaaacaggcctccctggcagttctgatgtagctggggtttgagacctataaaactagggtgagagtttttaagctggggccctatgggacccttggaacttttcctggtctccttggaaactcaccatgaaaaaacaaggtcccttccaggctgcccatccctgtgctcccaccttcctgacaaagccatcacctttagtcattttaaatattggagttgaacacctgagtttacttaagggagaaatgtatttatttgaaggattcaataaaaatagtttgtgaagcaccgacttctcaaactattgaaggggggtgagtccaacccacctcaccccctccacgggaaaaagaaatccaaggatccaggtatagcagaggaacagaggggagtagtggacccagtcacacaggcacagccaggaagatgagttgtgcagctttccagcaccccatgtctaccctcctcaccccagaaatatggtcttctctcctgcaggttgactccttatgagtggtacagtccacatccttgtgcgcagggccggtgtaatctcctggtcaaccagtactccctgggcaacagcctctggtttccggttggaggcttcatgcagcaaggctccactattgcccctcgagctttgtctacccgctgtgtcagtggtgtctggtaaggcccggcagcagacccagggctaggggattggactaaatagagacccgagaccggatggtggtggtgcataccctcagtcctagcacttggaaggcagaggcaggctgaactctgagtttgaggccaacctggtctacagagggagttccaggatagccaacactacacagagaaacagatcagccctctccaatggcaaagagagcaaccaggaagatctgccttgccaggtagaccctagcagggagctagctgtcttaaaagttcagagggtgatgggcaatgtgcatgtgggaggtggggtcagaggggatgaacaatcagtactatttactctatcttagcacctagtgctgtctctggggtctgcgtacagaggacaaccaagatgaaagagagggaggggaaggggaaggaggaaggggagaggggggatggggaggggagagggggagagagaaaggaaggaagggaaggaaggaagcaaaacaaacaaacaaatgaagagataaaaggaaacagccttgatggtctatagcaaaaaagcaagcaaacaaacaaaaataaaaaacaaacaaacaaacaaaaaatatgacctcttgacttgaaaactgactgagatagagtggcttggccaagagagggcatatgcagatttatgcaaaagagcctgctgtacagtccctgcagaagaagaagtctctgctctcccctcccagcctctgtcttcctggtcaaccagtactccctgggcagcagcctctggtttccagttggagggaggctttgtgcagcaaggctccactatcgccctttgagccttgtccacccactcccggctctgcatggctggcctgtccatctcaggagctgcaggaatggtcaagctattagattctctgatgggcaaaagattcaacattaggaaagttctttgaaaacttccagaagctatgtagaaatgagggacatgaagaacacatgtagtctagagagagaaacttgcggaatacaagtattggatcctctgttagcaatctacgataggtttgactgtcgtagctctcggaaattacagccttagttcccctgcctcctcctcctcagcctgtttaagccaaaggaagaggagatgaggtattttcatccttgattactagtgcctatgttcacacagtaggtctagaagtagataccagagttgtttcaggagctgggctagtagctgggacaacgatacccctttctgtctagagctttcattcgccttcatatggcaaatatggcagggtttaagccacttgggcaagattctcgcccactcccaggcattaccgagaagttactgagtagatgaacatacagaactgagctatctgtccccaagaagaggatactgtctcagcagagatagtcacataactcccccgaagcctaggaaagctaggcagaaccagggagggaagaggaacatccaagggtgttcatttggttccttttgggtttttccttccaacgggtgctctttgccactggtgtgcctgctgcatctaccatagaccccaccccaccccacccactgcacctaaggaatgccttcctccagagagttttagaagcccacaccctgcagggtgctgctctaaatagcaggcctcgaaatgactgagtcactgtgttccagagcatgtagctgcgagaggaactctgcaacaaagagccaccatgagagacctttactagcccccagtccacagcatcagcatgtgtctctgcctcctgagttctgagattattaaagtcaaggtttagttagtcccctgggagagtggaagatcagaagacaggacccccatgatctgccctggcctcccagccagagcaaaggacagaaaatgtcacattgctcagaagagtgccagctttacaactgctaacgtcctcagatgcagtggcacagccccagcaagtccctgggacagcttggcctgctctgggtccattgagctggctgacagcttaccctatgaccatggccctaaacatctgcatgtcacccaggaaagaccaggcaccagagtgtggccatgagcccgagagaagctcctagacagctcttcagccatgtctaccttcaaggtacattaactctgcttctcggtgtatccaggctgctgctgaactcgggcatggccctagggatggttacagtgtaaagagctgaagggggtgcagagagtgtgtcctgagtagggagggaagcctgccacttagagggccctacttgagaaagcatcagggaggtagtcagatgattttgaggtagtcagatgatttttatccgctggccagcctggaggcttctccacatttctctatctcttgtgttcatctagcatgttctagattgctggtcacaaatgacatagtacttcatttgctgctgccaggactcagagataggtagagcaggcatcattatcccatttattagataaataaacccaggagaaacccaggcctttccttgctatcatattggtgaccagaacaataacaaaataaaaaacaaccccaagacaaaatactccatctcccttgtggcctagcatataaaagtccattgagttggtggatggccctgttgtgtctgcctaggcaggcatccagccggagttcttggtaaccacaaaaaggacaatgggatttcttggtcttgaaaatccaactggcggctgcgagctgccgagtcccatgacaaatgctgtgcattaacatagcaatgtctgcatactgggcaaacccttgtgaatacggacgccactgatcctgaattggtgattctccagcctgattcgtggtgcttagatctgtgtctgagcccctaacacacaaggagggaggtactgatgtagctccagcctattgagcagatgggaaaagcttgcttaacctaccagactgagcacgctgccgttggcatataggctgcctgcattgcagaattattcaaatttcagatgaaattctagcgactccataaaacagtcttgtaagtctgaagcagcttgtccattgtcagaggattttccaatttcaacttctcagcagtccaaagatgcttttcacaagctcatcttcattgaagactttctgctgtcatggtcatagaagtggctgtgtacaaatgtatcagtatttatcaaggcacttcccagagcctctctctgcttcctgcagtgatcgaatagtgcatttgcctcccgagttgtaaggattagctgatgttaggatgtgaggatgttgctcatgttaggtattcagtacatggcagtatgcagccctgcactgagccctcacctcattcactgactcctctccgatggtccccagaccctcacgtgcatgggctatacctctttggaatgacaagtaatcacgtttcagaaataagaaataaaaatccaccgccaatttcggttcatgtctctcgacattgtatatcctgcatcctccccctccctacactgagctgatgtctctttcaaagaaagatactggctctcttctgcatcatagcagaactgaactcaggagcctcaccctcctggcaatgccagggcaatgatgcctctctggtgtcttcctgcataggtgggcattcacgttgatcatcatctcctcctacacggccaacctggcagccttcctgactgtgcagcgcatggaggtgcccattgagtctgtggatgacctggctgaccagactgccattgagtatggcacaattcatggaggctccagcatgaccttcttccaagtaaatactacacggctgcttacctgcatgggggagggcggaaggaagctgatatacgcgggcattcaagatcaaaacatctctgcccatctcattctctcttttgagcatctaacttagaggtcctcgaggggcctagtttcctcctattccaaaaaaaaaaaaaatttccccagaatgaggtctcaggaggattttgtatgaatatcaacctatctcatattgttgcacatgagcagctggtaatacttaagatggttttagaactaatgtgatgaaaccttctaaatttataatagtcctgtgtttgttttatgtgcactgtatgctgtggatcgagcttacagtcttgtttacattactgcattggatggagctgatacgctcatttaaattttaaaaagcgagttgggttttatagttagtacttagacaaagggagattaagataatacggggctgggggtggctccttgggtaacatgtttgctgtgcaagcgtgaaaacttgagcttgggtccctagctacccacataatagtgggtgcggtcatgcgctccggtaacccggtgctggtggtggagaagaaacacagacaagcggttgccagagctcactcgccagcaggatagcaaatgagtcagttggccccagtctcagtgaggagacccctgcctggaaataacaaggtggagaatagtaagacacccctaatccacctgtacatgcattcctatgtataaacataaacacacacacctgcgtacgcccacagtagtgaaaacagtgtgcctgtgagcagcgtttaggagatgctcagtggggatggcccagtcacttctcctagactgatgggttctctggagcagacacatttgggttctttggggatatcgccttgtaagtctcaggagaagcccctgccacagtctagtgttcaatgacagccacactgatggatcgccagggctgacagaagcaggccgcacagaatagcagttttcatgtgcttcgagagctccagggaaggtttcctcctgggggctcacagtgtctcaccaactaacatccaagacgctcgttttcacaggagacaggcccaaggcctgctgttttccataagaatctccatgcctgttggcatagggacagggaaggctttgtacaaacagagtttggatggacccccagaattctgtcttgttattattggtaaaacagaagacagccttgggtggtagagttgatacattggcttaggttaggtaagagacatccacactgcttcttcaggactgtctctttattagtcctgaatgaatctgtcccacactgagttagtcctgaatgaatctgtcccacactgaggaacaatgagggattaaaaccagagtttgaattctacttgtctgaagaggttggtgctgaaggaattctggagggtggctgagacagaaccagtggttgaccggtaggcagaactcacaggacaagtcccttcttcatctcctattaaaggcacaggcctctcctccattatgcaatagcagtgaccctcttggggtgagatgatagaaagaaagagatgccaggctgtgatgtggggcacacagcagaagggcctatcccgtgattctttgatgccctccattttaagccaatgtttcctttcttatttctcaaccttgcttccttctgatgttctcccagaattcccgttaccagacctaccaacgcatgtggaactacatgtactccaagcagccgagtgtgttcgtgaagagcacggaggaggggattgccagagtgttgaattccaattacgccttcctgctggagtctaccatgaatgagtactaccggcagcgaaactgcaacctcactcagattgggggcctgctggacaccaagggctatgggattggcatgccagtcggtatgcaggagagcgacaacctttgggtatagcttcctccaggcagggtcaggggagccaaagccactgaatgcggtctagaattcattagcctgtttccagaaccaacaggtttgagaacgactttaggtaggcttccttatggttaaaaaacaaaacaaaacaaaacaaaagaaaacaaaacaagcacgtggacttgttttactttccttccttccttccttccttcctcccttccttccttccttccttccttccttccttccttccttccttcctttcttcctttttcatttttgttttttttaagacagggtttctctgtatattcttggatgtcttggaactcactctagaccagattgactttgaactcagagatcagcctgtctctgcctcctaagtgtgtgtgtgtgtgtgtgtttgtgtatgtgtgtatgtatgtgtgtactgtgtgtgtctgtgtgttccatgtgtgtatgtgtgtctctgtgtannnnnnnnnnnnnnnnnnnnnnnnnnnnnnnnnnnnnnnnnnnnnnnnnnnnnnnnnnnnnnnnnnnnnnnnnnnnnnnnnnnnnnnnnnnnnnnnnnnnnnnnnnnnnnnnnnnnnnnnnnnnnnnnnnnnnnnnnnnnnnnnnnnnnnnnnnnnnnnnnnnnnnnnnnnnnnnnnnnnnnnnnnnnnnnnnnnnnnnnnnnnnnnnnnnnnnnnnnnnnnnnnnnnnnnnnnnnnnnnnnnnnnnnnnnnnnnnnnnnnnnnnnnnnnnnnnnnnnnnnnnnnnnnnnnnnnnnnnnnnnnnnnnnnnncatatgtgtgtgtgtctgtgtgtgtatgtgtgtctatgtgtgtgtccatgtgtgtgtgtgtgtgtgtatgtatgtgtgtctgtgtgtgtctgtgtgtccatgtgtgtatgtgtgtctctgtgtatatgagcgtatgtgtgtgtgtctgtgtgtgtatgtgtgtctatgtgtgtgtccatgtgtgtacgtctgtgtgtgtctgtgtgtatgtgtgtctgtgtatgtttctgtctgtctctgtgtgtatgtgtgtccacttgcaaacatgtggaagtcattggttgacattgaatgcccttctcagtcactctctaccttagctttgagataggatctctcattgactctggtgctcacagctttggcttgattaagccccaggatcttcctgtttctgcctcctcatcttcaggattacaggtgtgcaccaccatgcctccagttttacttgggtgctgaagatctgaattcaggtccttatgtttgcacagaaagtactttaccaactcagccatctctccagtttcctaattcgtaattaaagaactagttgattacttattcattcattcactattcagggataattctaactattgaagagtactggtgccccagcagactttagggcttgttctctttgtctcttgctttggcatgttggccatttctctgatgattaacgtctctactaacagagggaagaaggaagcactacaagcactaatcacctttgctgattgtacttcactggcaagattacagaagatgacgttcaaactctatgtagatttcactgctctgtctactctgacttggtgtgggtcattgagagtgggcactaatgtaccatgcatttactgggtgccatctggttttgtaagttttttggcttctagaacagtgctgcagctgggcttctcagagtacattcactttgccgataactctactaccagggaatcgggagtctcgttcagctgttgtgattgtgagggatctaagcatagcctttgggtgattctatgtggagcattgactgcactgctgtgtcaggctctcctgaagtaaggctattcctgaagaaggtgacaggcagaagaatcaggacatggggacattagcatgtgatagctctgatctttggcatgcagacttggtagtcacattgtacacccttggatcgatctgtccctgactggcagtgttataaactgcagaattcattcacaccttggaatataattagcatggtcttggagttgaggagacctgcctgtggtacctcagagaggtaccacatatctgagccttagttattcaagtaataggattaagtttctcatacctactcagggagtgtgggttagggctgtagttggttaagtgccttccctaggtgcctaatacttagccttcgttggggaatattagtgtcctcgttttccccatagttctctatgcagtttggtaaaagcagattgcttcttagaacacagattagaaagcaaccaaatgagcctgggtaataatgaaagtcctctctgaatgctgtcggatctgacacctgaggctgtgtagaccagaaactttactctgtgcactggccaaccttcatggactctgtttacagtcatattttccagtgcccattaatattacagattttgagcttctttgggaaatgtaatggctggcattttctttcaagatggtggggtagatcatgaaatgaacttggggtccaccttggtaatactttagtgactcaataaatttagcctaaatgtcaagtgcttcctttcacagggaacttgaccacacatagttgaggtgaaagagaccagctctagaaaattttatttataagcaagggaaaaaatgaagagaaaggcctctgtcttgaccctgtcatgatatcgttttatgagtattatctcacttaattggaccatgtgagaggtacactgcagagaatagaaattatccaaggtcacaaactagaaataaaagcctgggacctaggaaactgctcttcaaacacaatactttccagaatagaccacattgaggtatgagacccccagctagccagctcaggctagacagggtaaaggtgtgctgtagggcggttcatgttctcacctcaagtgaggctgggaacaacgttatgcaactgctgatgcactgtgcagccaattatgagacaagattcagatccctgaggctatactccctgccattattccagtaggaggaaagagagttactacagaatgcgtggcgtggttgggcccagggaaaagaagaaacccaaaaaggaaagatggaaatttaatcagatggctctggagcagagacagcaaccagggagcaggcatttaatcagatggctctggagcagagacagcaaccagggagcaggcagtggagccttcagtggcagcccctgggccactgagggattggatagaagtgccttgaagcagtggagtactgtctttaaatctagctagtgttagcctaacatctgtctacatctgcagggcaacttgctcatgtacttgtacactacaagtgtgtattacacgcccgttctacagatgactgtgcatggtcatccatggcaaaaaatacattcaaggctgcaggtgtgtcgtgggttcactcagcctagttgtgcctaaagaagggcagactctactctacagtcctgcagtctatggcccagaagcatgggtactgccttggagcttacccaaaatgcagaatattgggtcctgccctgaacctattgaattggaactttccacttaacaaaattcccaggtgattcctacatacattaaatgtgaaaaaccctcacttctgtgttcaggcttcttccttgtacccaagatcataggcattcccagaggtgcctgtctacacaggacctttgtaggaactggaaagcagactgggcaaccaaatcgtttcccaagtctcctaacagccatgtcttaatgatcacaggcctctacctgttggaggacattgagttttccttgaatccacttaagcccattttttaatgattagacttggatcctagaaccaaaactccttgaccatattctattggaaattttttcaaagaattgtatccaacagagagaagccttctgtttggtggagaagaggcaacagggatactgagtgattggcagggcagtaggctctggtgaactcagctatgagagctgggggcatctggtgactggcttctccatgcagaaggatgagaggatgccctggttaactcttctttcagtggttgatggctggttatgtaaatgattataaagtatactgagacaatagtcacaagctcctaagaaatgaatagatgtgacgtagaaagttgaacatttgactggtggggggggttgtgccacatgaactcacatgatggcttcctagagcctaacagtcacatctccatccagtttcctgagtgtcattgtgcagctcattgagttatgatagaccctctatttaaatttgaaagtgaaggtgctaggcacggagatgggtagcacaaatgtctgggaagccattactcagcccatcccgggtctttgatcataagatgaccatgttggtcatgtgacaggaaggaagtggaggagctaaggcgatgtaaaccagaaagccctcttttagcagagaagacggaactagaggagagtggtcttggagacaggtgccttctgctgtgtctgttccccaacccaggttcaggttgacagagtggccaggaaggatgctgggaaggggagcaccatgtgcctaggagaacaatgacatcatgccttgggttttcctttgactccataggctcagtgttccgggatgagttcgacctggccattctccagctgcaggagaacaaccgcctggaaattctgaagcggaagtggtgggaagggggaaaatgtcccaaggaggaggaccatcgagccaaaggtaaggaggaccacagagccaaagataagcacccttggctcttccccctacttgacagaaccaacatggccttgttatacagcccaaagttcaagcaatcacttgtaagatacgttgacaccaaagcctagattgggctgctaggaaccagacctatcccagagtcatttctgctataggcaccagtgtccccttcacacagagaccctagagatgctatgttatctgaatctacccctaaattccaatgtcattgtcaccagcctggcccatagctaagtggtattcttttctattgctgtgataagagatcaaatgaaggtatggtatcaggagcaagtaactagggactcgcagcctgaatagaaaacaccaaggagagagcaaactgggaacagcccattactttgaaacctctaggcccatcctccagtgacatcctttccccagaatgaccatacttccttagactccccagtgagcatcaccgaccaagtatacaaatgctatgggggacattctccttcaagtccacacacctgtcctcccttccctcctatgtgtcttgacagtggccagagtgattcatgtttaagatgcaaatttgaccacggcatccttctgcacgagcctttcaacaacttcctatctcactcagaataagtttcaggttccctggagtctcaaggcccaatgtggtttatcccccctccccaacactctctgttttatttctgaaactcccccaagcctccctcattctgcatctaacctggagccagagcacccaggctccctcagaaaggactcctttcccttctacccaaaccttttcctttcaaggctgcactacaactgtaccgtatctcctaattctttatttgctcactttctacttttattagagtgaagattttataagggtggggtttgtcttcccaaggccagcataggatattttctcgaaagaaagaaacaaagagaggatggttgagtgaatggatggttgggtggatggacatatggacagacagatggatggtaaataaaagaatgaacactacattggcttgaatgcaaagcagccacagactgtttgtgcagtaaggagtgtggagtgtccctgagcacccaggagagacaggtgagttctgattatgcacaggctcactgatgcctgctagttatttttggctagctcatattctcaacgtatactgacttggacactaaatcatccggtcacccttgcagtctacttgcagccttgctaaaatatgcaacagatttacctgtgcatgctcccccttcggaaggagtaggatgaaggagagcaagcacttgcctttctgcttggcatgagtgattatcccacaagacattgagagctactgtgtttctaagtgcttctatgtaggcttccatctggcaaggccaggtcttagggatatggctctaggaggctggttataaataatgtaaaagaaatcctgcctacttaggaagtcacgaagccatacacttcttgggatgctcccttcacgaaggctagagccacccattggggtgaccatgagtggacatggggcattggcagccctcatttgaatcccagctccacccattgctagtgtgtaactgtaggcatctgttactgttgctgagctcacatctgcatttgtgatgactatagaacccagctggactatagacttgctgggaaggtgagtcagaggttgaagaatactaggttctgttcataggaaggacccagagcatcccaatttattgctattattgttctgctctggaacgtgggttacgttactctgagaaacccaatgatggtctgatctgttctgttctgtatctacagaggactcatttccaactgtcagccagccaatcagtcatccaacaacaggagatactgaggtataatgaggtctgttgttcctggggaaaaaagcaagtcatacagccttagcattaaaggtcttgaagtttcaggaaagattatcaaaaagcctcagtattggccagactacagggagagactgggttgagtgttgaggggacagttacattttattctcggaagaaaataatgagggaaatacagagcaaaatgtcaggacatgcttacagattggagctataacaaagtagatttttgaaaatgcccagatcctaagcagacggataagcaacataaggaaggatagggaagccgagaagggcaatgcacaggggctgtgtggagcagctgaagccttggctcaacacacaggccagtttgaggaagctggctgtagatgtcagaggttctagagaaggctgctctggaactgcaagagccggtcttgtatgtggtgtcagaaattatttggagagcatctctgatcccaaaagacagctattgccttaggagacgcactgtctgaacagttcaaactcatggtagatgtgatgctgttgaagggtcagactctgggtttgctagagaagtattttggaaatgtaaacattttcttgttgtgggctgaaggaaaatgatcatgttgatgatgtaagttaacaagtaaacaaaacaaaacactcaaagctaccaggttctgcaaaaaaaaaaaaaaaaaaaatggataaaaggatggacttatcagggtatgttgggttctggcctattcctgtccaggagactactccatgctgacatctactgctagtgtcactcccaggatgagctgaggattgtaagagctacagagagatcttccagaattagatgacataccacaaacagggtagcggcatggggacagagggcagagaaagcaaaaggcctgaagtttcccaagttcccagacaagaacattggaaatctgggtgtaatgagtagaagaggagatgcccacccacttgctatgaaacatcgtggtcccttcccannnnnnnnnnnnnnnnnnnnnnnnnnnnnnnnnnnnnnnnnnnnnnnnnnnnnnnnnnnnnnnnnnnnnnnnnnnnnnnnnnnnnnnnnnnnnnnnnnnnnnnnnnnnnnnnnnnnnnnnnnnnnnnnnnnnnnnnnnnnnnnnnnnnnnnnnnnnnnnnnnnnnnnnnnnnnnnnnnnnnnnnnnnnnnnnnnnnnnnnnnnnnnnnnnnnnnnnnnnnnnnnnnnnnnnnnnnnnnnnnnnnnnnnnnnnnnnnnnnnnnnnnnnnnnnnnnnnnnnnnnnnnnnnnnnnnnnnnnnnnnnnnnnnnnnnnnnnnnnnnnnnnnnnnnnnnnnnnnnnnnnnnnnnnnnnnnnnnnnnnnnnnnnnnnnnnnnnnnnnnnnnnnnnnnnnnnnnnnnnnnccacccccacccccgccctggagaatgataaaacggcatagtcgggaggcctcgttgtggtgttcatggagaccaagtgttctctggcatagagggaagaacagacagaagaaaaggaagccatcagtggagtgaccctgcccaggtcgctgagcctcaggagacacctgggtcttcccaacctgccagcactaacttgcctttgcagcgccctttggcacccaagagcaagcactgttctaagagccaaggtgagggagcaggactgtctggaggacgttgcgcacatttctacgaaaaccacagtgtcagctgcccgcccagccatagcaacggaggccagcttcatgcagcgacccctcttctgccatggctgaaatccaaacaaattgttcaaagatgcttgagcttccttggccaagcaaaattccctcatgacttcttacaggccatcttggaagtcctggcccaagcgctgtgttttttctctggctaattacccattgtatttatctttgcctctaactcatggctcaaagaactcagacttggaggagcggcgggacacaaaagatctccttgaagtctttaaatggccaccaagaggtgagccgtggaagcttttccccttgtgtctgagatagcaggggttttaatttgctttccccagcagctcttgggtcatctttccttttatagtttgcaccagttggctttcatgtgtgcctaaagaaacgaggggactgtggaacagcagagggatggaggtgacaggaagtgggaggggggccttttttccccagagacctctgaaactgccagcaactgccagcactttggtctcaattaaaatgtaccagacaacacgcgggagcctaatgtaatccttttctgctttgttatcctattaaaatgcacaaaatttcaaagaaaaggaactgatgcttaccctacttttaatcgagcattacaactcagacaccaaggccgagaagaatcggaacaccgaggtaatgcctcctatctcgagcctccttaacggggccttatttggatcttgtaaacggaacatttccctcttcttgtcataacctcttttatctgtcccttcctgaagcttggcgaccagctaccttcctgcaaacactgagacataagatagtagatcctgtggaagactggaaataacaaaaaaggccaggttgcactctctctctctctctctctctcatgtattttatttgtttattttctcaccctgctccgataaaaggaaatcttgctagccattctcagatgccagtatcccatgcaaagggattggattaccaaaggcttcgcagaacaatcaccagacaaaaggtggtgggtgaaccccaaggaaattgaatacctttatcttgaaaaacatgagctcataatcaaggcttcagaggaagacaaatactccatcaggctatgaaaatcggggtcccctttcaagaatggcacagaggcagtgctgttgacttttggaagctttggataacaggaagtttgctgtctggcacagtgggaatgaaagcttgagacatcttagggagagtgggggtggggagggggaatgagggactctggggacccatccctccctttcttttctcagaaagcccagcaggctctcttccttctctggtttcttgggaaagctctgaaggtgagaaccgactttgggagtttgatagcaactcagagagatacttccaggaagcaccccacccccaccccagtggagtcacactgaacaaggggtggcagagaaactccagaggattgtcagaaaacacaacaagaccagaaacggagataagtggtgacctggccagtctgccatcaagaaatacagccattctgaaggccacactcccctctgtctggaaactgagccaagataagctgacacatcactgcaccaagcatctgacatcatgttttgcaagagagtaggggttcctgaagcgagcttgtagcttgtatgtagaatccctcacccctgccaccttggaggttctgggcaataaagccagttttcaggatgccagttaagttctatgcacatctactatagtggagggatcacagagtgaccggatttcaggagtggtatgaaggctgaaggctctgctttgaatctagatttgggtgtggaaccttgggcaatgaattttaattctgtacttttgttcccttgccaggaaaatggagccacaacttgtcaaaggcaactttacaagattaaagttaaaatagttttcaagggcagagttaaaatctttagcatgaaaccttgcttatagtaaacactcctaatgggagccttcatatttttggagcatatcacattgccatcagatttatttagaagttacccattagcgatgaaaagttggacagtccaagttctctgtctttttaatgtttttatgtagcaggaacagtgtgtctcttttctagcctgtctaataattggaggagatttggaaagtgggatgtttgagcttgtattgtggaccgtgatgaagtgtgcctctcccgtaattgcaaggtttctctaatgcgtcttccaatttgtatccttcttcctgattttcctccacctgtcttttctagaatctgccggttctaagtgaaagatgtcacggtgagggcaagcagaaatggcaagctttctccttcatagtgccatgcaatgcaaatggttactgggaaggtcgtgtaggtcactctatacactctaaaggaggagctgctgtttacagcaaagagtcccatggagatggccctgtctgatatgtccacatggctatagaggaatgcgactctaaaatgatagaaagcctcatggttccaagaatctatgtttgcataagatacttttggaaagtctgacactgctcagagcttagcacctagtacagtgcccagatcatggaaaatgtaccacaaagatttgttcatcagcatcaaagagaacatatgatgtcacttgtggagaccatgagtcttgtctgtcctttctctatatctgtatggtgtagctgcccctcacccacctacaaaccattgttccaaaagagaacagcatgcattgtgtcttaggtacagatagatacactgttacttggaattcagttaaaggttgggagcttcttctactggaatctcagaaatgattcttagctaggctgaaaggaaggaggggcaggtgggtgatttgagtctcttcactgcggtatctcctgatgacgtctgctccccagtcacattccagagacaaagaaaatgatgcatttcatttgggagctagtatttgtatttgtgggcaatctgtgagtgacaccagagctagtattccaccaaccggggatttgcgaggagactctgaatctatttgagctaatgtgtactgattgctgaaacacagctgaggctccggctccgggtgtcaggaggaaagcccagttttaaagccatctgtctaggtggcttatgcactgtcctgtgtactggagggggcagaaatagtgactagatgatttcctagtccctcttgcaggtgctaaggcatctggaagggcggccaggatcttgcaggctggagcaaaccccttcccagccccagctgatgaatggctgtgttctgtggaaggcattagacttctagggggatgactgatgacagtgttaagcagaatggcccagctctctgaatgtgcccctcccccctccatctgtttctcagctctcactctgccagcaatctattcttgcttctactttccaataacttcctaaaggcatggctggtatacaagcctcgctctgaagaagaggaagaagaggccactcagccaggagttagcacgctggagccaacacccatgattaacaggttggccgtgaaagtcgagaagctaggaagaaagactgggccatttggtggctcttggcctctaccagcatctcattaaatcctcagctccttctgagaacatgtctagatcaaagcagagttagagtcgtctgagtgcagagcacatagtcccttctttccctccccaactcatctaacatggggacctatgtcatggatttagccatgtgagtgttctgctgccttcagaaggtctggaacatctggctggagccctcactgagagtcgccatggtttacagttaccacacacacatttaatgagttcacaatgaggacccagagttttgtatactgtaggcctctatatctcagctgtctatctctttccttctttttttggggggggaggggtgggacaggcagggtatctctgtgtagccctggcagtcctggaactcactttgtagaccaggctggccttgaactcagaaatccatctgcctctgcctcccaagtgctgggattaaaggtgtgcgccaccactgcctggctatctctttccttctgatcttttatttttcttcattttgtgtgtgggtatatgtggtgtgtgtgtgtgtgtgtgtgtgtgtgtgtgtgtgtgttgatgtgttctcaggggtacaggtgcatgagtgcctgcgtgtttgtgtatgtggagtccctcagactggtctagaatcttcctttatcatttcctaccttttcttcttaaggttctagctctcaatcaagcccaaagcttactgaccccgctagtgtggctaggcaacttgttctttccaacgctggaattatgggcaagcaatcacagtcatagggcaatgatgcagaattcttggtatctggactcaggccttcctgcagcctcctctccagtccattctggtcttttatccacccccctccccccaaggcctggttcttcccaatgaatttagtctaatgagaaatctagattcataaacgtaactaccatgattgttgtgtgcacacaattagaatgatgcacagtgtgttattagtgaggtgcaaagacagaagagctgacagagttgtgtatgatcaggtaagccaccaagataaggtagccccgtgttcagtgataatggatgaggttagccaggatgtgtgtgtgtgtgtgtgtgtgtgtgtgtgtgtgtgtgtgagagagagagagagagagagagagagagagagagagagagagagagagagagagagaagaaatgctggactagttattttttgcgctatctattagcagataacctgacagacacatctgtggggaggaggaatttaatttgattttcggtttccaagaaatttcagctccctgaggagggaaggccaaggtacaggttctgtccactgaagctttaaagcagcgattcttagccttcctgatgctgtaaccctctaagacagttcctcatgctgtggtgacccccccccaccatgaaattattttcatatcaactttataactgtaattttgctcctgttatgagttgtaatgtcaatatttttggagatagaggtttgtagatggggtcatggtctcaggttcagaactgttgctttaagctatttgaagaggcccacattcacatggcagctaaccagaaagcatcaagagttcagtctgagtcagaggggccctagcctgctagtgacccatgcctgctagctgagctccatatcccaaaggttccacaatcttttgcaaatgatgccaccagctggagaccatgtgttcaaatgcatgagccttgggtaatatttcagacccaaagccacagaagtgcttgaaaagattcaaagtgcacagacaggagcaccagggcatgctgggaaatgcaaacaattctgtgtcgctagcagtgatgtcacagcatttacattttgaaaagatcagtttgatggagggtggagttgaacaggaaatgctactacatgcagagaaatcattttgaagtagatgcagtagtccaggcaagggttggggaagacctgaagcaggaaggagatgggatgggtagagagaagaagatcaagataaagccaaaaggacttgatagtaaccagtgcttgagaggcaagagaccaagagcaagcctgggtgactggtgaggttcaaagagggcatcaagcagtggttttatgaagagccaagaaggggggtgtgattgacagggtccagtgctaaggtgattgcagcatccagtgctaaggtgattgacagcatccagtgctaaggtgattgacaacatccagtgctaagagaggctgtgtaagatcaaggctgggaaatgcccctgagccagaaaacaaaacgtgggcagtgctatcagaggaacaagccactgtcacatgcaagggcagcaggtgatgccagcatgtgagagctaactaggattcacagaagtaaatccagattagtaaattcattttctccttcagggcctagaagcttctcaggtgttcaaaattatggttaaggtctgaaaagaaaactatcagcttcccaatgcacaaagaaaacttgcaaaattaaattaagacatgtttaattaaatatctccaaaatggaacattgttccaacttcattaatttttaaatttaatattcataaaactgcatctcatttagatgcaattttggggttagatttttctcattttacaaacattcccttctatgcagtgagggctgagaaatcacagtcaattgtcaattaactatttctttctgctctgtaaaaccagaagtgaagaaattttaggtgcatttggttgtaaaatgttgggtgcattttcttccacctgccttgatgtgggatggagttcccaaatgtatgtgttcagagtgtcttaaaatggtactaatgttgacagctgtgtttgaaggttcacaaagatagaagagagagagaggaagggcattgggtgggcagaattggagtagtcaagggtctgagaagggaaagacatgacctggagagagacagtgaagagaggaagatgaaggagggtaaggggaaactgctggggagatggggaatgtaggcagggcacaggtgacaggtccagagaggagatgcagcacccttccagaagcaggagggaagagctcttctgggaggccctagtcttcttctccatctcagatagatctatcttcaagtgctggggttatcttggagtgtcccaacatgacccaaggactccctttacctgggcaggtggccatcctcaccatcaccaatgtcacctctcttagctgggctggctggagaatctagtgctttgagaagtcatgggatatagcagtgctccccccacccccgcctgcccaccgtctcaccactccttacccgtgggctggagcacccaccttcagaccacagccagacccttgggcatactctttctttcttaagagaccccttatgtctcatcccccaatccatatggattctgatattcctatattcaaatgtcttctgtccccagtggcccaggtgagataggctggtatttaaattaatcgaagatagtttcctcccccatttttaagatccctgccatggattaattgggatggaggcccctgcatcaattggtgcagagttggaagagctgacccatgaatctgcagactggagtgcatgatctgctaaaattatagcttgtgtgaagcctcaggaccactgaaagcagaccatcatctgggcagagaatgcagtatactgtattgcttgaagaaagtaaagaacagacatccttcgggttctttataatgagaaacccaaggtatcttgaaatggccaggtagcatccaattcctgttcctttctgtggagcatctcgtgtggtacaaaactggctcttcccagctatagcatagcccagtgccccatgacaacttaacagacatgaagtaattctaaagagaataggacttaagccttcctgccaccagtttcttaggtagaagaggcttttgatctattgttgtagtctccattcaatcaatgtgtttttggcacttctctaagtttggtttctccacaatcaaagaaagtatcaaattggctaaactcaccaagctgcaaatgaaaaagcccataatcattctacaaatccatatcaagatatctttagattattaaaattagttatgacccaattttaaagaacttaaaaatgcataaatgcttcttgtcttagttaaggtttcattgctgtgagcagacaccatgaccaaagcaacccttataaaggaaaacatttcattggggctggcttacagtttcagatgttcagtccattatcatcatggtgagaagcatagctgtgtgcaggcagacttggtgctgaaggagccaagagctctacaccttgatccaaaggcagccaggagactgtctttctcgctaggtggatcttgggcattcagaaacctcaaagcctgcctacacagtgacacacttcctccagtcaggccatacctattccaacctcctaatagtgacatttaccgtgggccaagcacattcaaactaccacactcccaaaaataacaatttgaaactagttgtaggcctgcctagctagggggaaaaatcacctgaaaagcttatttcaaacacagagttctggagccagtgagatgactccatagggtccctactgccaaacacgatgagctgcgtttgattcccagagcctacatggtagagagaggggggccttctgctgacagttatcttctgacctccatatgtgtgggacctatgtgtggcacctatgtgtgagtgcatgagtgcacacactgacacgcaaagaaatagaggtaagaaatgataacattttagtaagtttagtaagcttgtaagtttgataacattttagtcccgtctcccaagtgtccaggtctagaattatttcagggtttggagatttgagattttggaatagtgcctggctgggcatcccctgacctggaaatctttctaaacttctctgaactctaaacttatttaagcagatgcccgaaagcttcagactttagagatctggaataaggtgaccaacctgtaatacgctggcgctggtgaatgtgattctttttatctccttagatcccaaaacacattgtgaggatcacctagaagctttagagtttaaggtatcctggtgccaagttagattgggcctgcacctgtcccttaagacaatctccagctcccagcccagtactgtctcacggtttctcaaatcccctccattcgcagctagagctccctgccccgatttactgcaaccattgtgcttctctttcaaaggatgaatgaaatcccttccaggaatgagtctgggtgaccatctccaagactcccctctggctgtttaggcaaccttgaattgctgcagtgtgtcttcccctccctcaaagtaatggctacttcttgtcactctcttccaggcctgggaatggagaatattggtggaatctttgtggttcttatttgtggcttaatagtggccatttttatggctatgctggagtttttgtggactctcagacactcagaagcatcagaggtaagcttcccaaaactcccagtggcacaccggccacagcagtgtgcaacacccgggttctacaagcatttcagacagcacctgtggaatgctaccacacggtacacagaatggtgcagtggggaatattttagtccccagagtaaatgatctgagtacacactgtcacgtgttcacactgtcacgtgttcacactgtcgcgtgttcacactgtcgcgtgttcacactgtcgcgtgttgattgtgtaaccacagaaagggctccggattctccttggacacagccatcgagttactattgagaaaagatgtcttatgagcaatagactttagtatagtattgtgggttgtgtatgtgaaagcgccaggtttctcatgtaaagtatgatctcacaccttccattttgactgtgtttttgccgtgcatgcaaaaatcctcagagatatcccaacttgaggaacctggaggttcatttttctatcttagagatttttaataaatttaattctctagatgaggcttagaggataggttaatatctactttgcatctgtggaaactgtgagaagaatcaatgcttgcttccattggtcctcccttcctccctccctctctccctccctccctccctccctagagaagatgcacaaatccttgtgtgttaatgtgtgcattatgagacttcttttaaaaacaatgcattagcctatcagctctgctctggatacatatccttaagcccctctcctttaacttttgctgaggaaatatctcccgactgtacagacaacaccctggaagcctatggggtaccacctcctgggatacttggacatgacttcactcctgccagtcgcttggctgtctgtgctcagcttattcatctgccctctgctcctgcatgaagagagcttgatttcacttcccacttcctccaagaaatgaagagtagccagcccctgtctaaacacccccctcacctaaaaatatatgcatcaggccagctgctgatgctgctgtagctgggggtgtgacactcacagctatggcaggaactgatcctgccactcctcatctctaagactcttgaccctctctccaaaatccacgggtgtgcctagttgttccttttcaagagtagcagtgtcaccattactgtgccttatgctgtccttctcctgagctaaggacatttgatagcaggattgcttctcacttccttgtccccctctctgcccttgaccgtattccagcctggcttctctctacccctgctatgaagggcctttgccccattcattgcctgacctcttcagcaaagagcaaaccaaagggaacatgtcattctcagactctcttgtccttttaaggaacatgggtccctcccctggtatgtctgcttccagttcaagtcccctctccctttggccattccttaaattctgctaatgcttatgtattccatatgagactgattgggtgtgtctttcattccccatgagaccttccccatttcttctcctgcctttactatggaccagcagaaaccaaccattcttcagccaccccagcaccaatgtaaccctgacctaaagtgcttacatgccaatgccacaaggactctagacatggaggtacttgggtgtaaggactgcttgttatccctatatttccatggcaaatcactgtgtttgacccactgtagacagtaaatgaatgttgttatattcttgtcacacgaaatggatcaagcaggtggcaagggggttgttgccatagtaattattagaagcacaggggtttagtgatttgccgagagtctctgttagtggcagtgatgggtctagaatcagggctgagagcttgttcggccatattctatgagctgatatctgcagctgctttgcatggctgtttctccatagagcttaggcagggtctggacttacattgaaattcaatgactcccagactgctctgatagctaaaatgaaaaggaggctatattggctgtgtgtctatgggacaatatttgtcccatagacagaacacaagaaagaggctttgccatcatggtcccggagtgccactgtggtctcagagatgagaactcagccaagtatgcttgggttttggaattagaggtctaagttctaattctcgatagaatactcgttagtgggttctttacaaaatatataatatttcccgaattcctacctatatatcttcaaagtgaatattataataatattataatattagtaatagtaacaatagtaacacatgtttataattctttatccattggttcccagaccccaaaggctagaatggcccaagccctttgtgagtttgatacaaatgctttcctccacaaagcctaattaatgtgcaccatctctgttgcattcattgtgaacacacacaaacattttgctgtagaaataacaatgtgctcaaatatggagtgtgtcctagcctcacagggtgttaaacataatacagtgcttgtgcattgtgatgccttttctaaaatctggaatattctgcattttgagacgcagctggagccaagcctttcctattaggggaccgtggaccttcagatgtgcaagcgtttattccagtggtttccggggtacatcaccgccagctgttggcaactccattgaggacagttataaggaagtcaaggcttgtgatggcttttggccatagtagaactgtcatgttggtggagatgaaagagagaatagggaagaaaaggaggctgcttcctctcactgtatttccagaatgttcctttccagctcaaacaactcaatcaggcatggtgggtaaaaggcacaagcatctttggactaaagacaaactgttcatgacaatgttttcaaataccaggcagactgatgtttaagagagtgtttgttctaagtaagtttcaagatccaaatttccctgaggtcatcggatgaacttctcagtggtagaagaagctaagcagagtgggaggacgtagtgttggtgggaatgtgtcaaaatggcatcctgtctttcccaagatgctgatattgctctttgaaggtgaccagagattgggcatcatctggcagagctgttacatgaaggctgttggggggcttttgagccttaagcaggagaggggagaagtcatttaatctcctcaccggagatgagagagagcctcccatcactccatgcctatagacacaaggagactcaggaggctggttctgagtggctatctgtgacctccgctgtctcccccaggtgtctgtgtgtcaggagatggtgacagaactgcgcaacatcatcctgtgccaggacaatatccatcccaggcggcggcgctctggaggcctgccaccccagcccccggtcctggaggagcgccgacccagaggcacagcgacgctcagcaatggcaagctatgtggcgccggggagccagaccagctggcgcagagactggcacaggaggccgccctagtagctcgaggctgcacgcacatccgcgtgtgcccagagtgccgccgcttccagggcctgcgggcgcgaccgtcgccagcgcgcagcgaggagagcctggagtgggacaagaccaccaacagcagcgagcccgagtagtggcagcagcgaaggaccatggagccaggcggggaggcgggagggctaacattacaagttccttctctccggattcaagattcaatgactttacaaagcgatctgagcctgctgccccagcaggaggcggatctccctgccctgtggcagagcggcctatccgagatgagacactgcacccacgtggcagagacgctgtccctcgtgggcacaaggacccatctcctcccagagagcctttccctcacactcaaataagtggattctgggttgtggggccctgccgagagagcagtccaagaattgatggtgtcatcagttgaattccccctaggaaggggccattgtaccctgggtctagttcttacaggaaaaaaaaattaaactcaacagggaagttttcttttctgaatttgtatatttttgttgatgtccttttctttcctctcatggtttttttttttttcttttttctttttctttcctgtctcttctgggttctgttctaaggctcccttgtcttgtgcttggggatggaagtctgacctctctctctctctctctctnnnnnnnnnnnnnnnnnnnnnnnncccccccccagtgactggtgtttggtagtctccctctgcatagagagagggtgaaagtccatcaaacaaactttttaaatgcaacatacaagcaaacaaacaggaatgtaaccttcctggagatactttgaaattcccggggctctaaggattaatctggtttttctttttctttacccttttcatctctgaaaacagaaggaagaaagaatctttaaagcatgcagagtattgtataaggagaaggagatgtgtatgcgtgtgtgatttccccacaccttggtggtcctgacttccattgcaaggcactactcagagaagtgagagacagggcgcccaacgggtatgatagactcttcaactggatctgcttttagctgaagttggtagtaagttgcctctgaagccctacccacaaggctcttatgtattgggtcactttttggtactagacatgaaacctggatgcaactgtgtgtgtgtgtgtatgcgtgtgtgcatgtgtgcacacgctcgcgtgcctgcgtgtgtgtgtgtgcatgcatgtgtgtgtgtgtgtgcatgtgtgtgtgtgtgtgtatgctcctatacatgtgagaacctaagcatatatgcatgtgtttatgaaacagaccgcaaatagccaacaacctagttcctggaagagagtggagggttttagcccaccagcggccgaagaactaggaaccggaaccatgagttcagatctccgtgtggtcagtagttttccttgtgtgactcagagtgaattgtttgacctctctgctgcagcctgggagtcagcaatactttcctagggtatctcggaccggaccgatctgccctgccagtaggaggcttgcaaggtctgatgggaataccctctcaatgggagggccaaggctcccaaggagccacttggccttggtttggtctcaccacttcagaattccatgaagagctgtcattttcggatggaaagcaaattctatgcaatttctgatagtaacttagaaaactcggagactgggtgggggtgggggaggagacagctgccaccaacttcccactcctgcacctccaccttgagctgagctgatttcacgtggctcctgttctgaatgtcctaaaataaagacttttttttttttaaagatgggctgaatcccctggtgccgccttttgtgtaagttggcatcctgtctgtgccaggatagtttgttagagctgccaccccggggcccaagttgtaaccctaattcttctgggtccatataagagatgccctgctggtcctaaactgaccccttgctggtaactctgaagccttttttcatttttctctataactgcccagtggcagcaaattttgtgggacacttaagttttgttttgttttgtttttctttttggttttggttttttgccattccttgtggaaaaatacagatttggtgggaaggacatttgaaagctgactgccagcagttccccctcccacctcaccccacccctctgccatggtgtcacaactgatacaccccaccaccacaccccagccctttctcatgcttctgactccaggatccctcctaccagatcacatcttggacaggaaggtttgttttttaaactcgtttttatgagcaggatatcttgatcaatagaaactttttttaatggattagtcaagtaaatgttcccacgcatcatttgtgatgtctgtttcccatccctgcgtggagtaaggaggagactgacagcatcaggcagctttctttaactcccggaccgtctctgcgccttcctccagttgctacgtgcgtctagttgctaagcgcgtgcgtgaatctgctaccagctgtttctggaccttggtttgtctccacatttcattcatgggtcgttggccttctttcgcatcctgtgttttctatctgactctgtgtactatataaagcagttttttcttgtctgtttacctttcttcgactggaatatttacaataaaacaaaccctgaaatgttagtgacgggtgcgaggtgttttgagtttggatgcccgtgcccacagcccacgtataaaactccaaaggagactaaagctaggagcccactttctttcttaccctctgcctaccccacctaccagctgcctctcccgcttctcctctctgcctccctcctcctcctgtacttccctcttcacttcccacccccttcaccctttgttcagatcccagcaaagtctaggtggcttctttcagttttcaggtctgagagcctgagccaattcctcccctccacccatacacccctcaaaacggatatgcatgttaatggagttcaggtttgtaggggttttttgtcttcctaaatgcactttcgcagaatagtcatctactgatacccagggtaactctagcctgatatcaccccagattccactgggagcccgaagattacatcaattaaaatataatactttgctttatttcttttaattgctctacagggccccaaccgtcacaagatctctacttcagaacccaggtggggtgtaagttgagcatgtagaggttggaaaatcttttggcttcctctactccaatgctcatatgagaatattcatgctgggaacctgccaagtggccctcttattggttaggtgagaccgaaatatcatgctagccagtccatctgggactgctctgtgaaagttcattagtttgggattccaaggagtttaattttctttcagattccaaagaggacttcccattggtatacagggccaggatggagctatgggtgcagcttgagagagagagagagagagagagagagcagtctgtggccttcctatcttcttggtgttcacaaggcaaagtagtctgggaatgataagaaaggtctgattccctggctggctgtcagccctcaggttattacaatgaggcctgtttggagaatgcacagaagacatgctttcagaaagatgtgtctggaagctgaggcttcctatgaggcctgcccataagaaaaccaaaatcttaagaagctttcagctttgaagacttcttctgcctttcaggaaaggtaactccctatacagagagagagagagagagagagagagagagagagagagagagatgccagtccctaccaggaccaaactgagactaccctcagaggcaggcaacttgggggtcctctggtgtgcctcaaagattaacgatggcatgcttccaaaagacctgtcccatagagggggaaattccagtggagtggaggtcacctttcaagtcttagaaccgggtggtcaacaacttcactagcatttaagaacaaggggagagatatccttgcattgttgttagaacatgattagtcacatttcaccggagtctccaaatccaaagaatggatgtgataacccaggcatcaccgtgaggcagcccacagaatctgtgctaggagaggtaagaaggaagtcctatgaaagctgtacaagagataacatcctctgaccagggatggcaggacaggacccgtgaaagggcataagacagctgggcatctaatgtggctggagattaactgtgtgcatgcaaatgggtgacacgttcaagggaattagtgcacaggcccagtggctgaagtggtgacactgcagagtgaaggttggactgtgtgtggtccacactttatagagagccttgtttctcttgctggaagacaagataaagggtcccacctatcctgtgatatttctcacacccaatctagctttgtctcttggctatgtcagagaagtcagagggcaacagagatggaaggatcttgggatggggtaaaacttttccccacaggttgacaagtggttaggtagttcttatttcacaacaccactttagactctggcggagccggggaaccaaagaaacaaaaggcagagatccagtaccccaagaggataaaacttacctgtgagagaaagtggtgggcctggggagatggctcagttggtacgtgtctgccttttacgcatgagcacctgagtttgaggctcagaagccatattgaaaagctggggtgctggagagattgctcgcagtttgaagcactttctgctgtctctgaggattggggtgtgagtctcagcccccacaactgcctgtaactccagctctaagggatctgttgctctccactggcccccacaggtacctgcacacatgtggtgcacagacatgcatgcaagcaaaaacactcacacacataaaaaagatcttgggagatgaccacagcctagcctacttagtaagctggaggacaacgagagatcctgtctagatagatttttttttaattggacagcacacgaggaacaccacttgaggtggttctctgaccttcacactcataccaaagctggaaaattaaggcgttgcctcatgtgccttggagggaagtgtggttaattcaaactggtgaataaaaagatagctcttggttgccttggttcccttgtcttcgttcccacccacagccctgctttcggagggattctggctctccagtgatgctcatcatgtttgtctgccaccgttacttggagatatccaccgctttctccctcccaggcttctttaaattgtattggtggaattggctgtggaggcatcagcctcgccctgtgcaatgctgctatgctcagcagccattctgagctgtttatgaagagaatctgtttaaaattggaggacaggagtaaggatacagaactgaaaatgtggagccaatatggaactaatgtggaaaaaacccctcccatttctaacatacagagacattgaacggtgctgcctttcagcccattaaaccgtcctgttatccgtagcacatggagtctgcctggaaagttattctacttgaattgttccgattagattcttagtggcttttccattaaacgtacgagtcacttccgtttccgcatcatctgtaatcctagaataccttgtggactgagaaatgttttaaatcatgaaaacttgctgaaatgtgaatgccgatgcagcgaagtcacaggcaggcgaatggctcaggccatcgttacccagacactgtgtgtacccaccagctctcatgtgacaggactttcaaactagcttaaaaagcatcagataaaaatagttctgcaggagacaaagccgtgtttctttgcagattacccttgttttctataaactaaaacctgatgggtgtgtctgtgtgtggtatgtgtgtgcacacacatatgtgtgcactgagtgtggcatgtagatggtttactaaaaccatcaaggttttgccattgtgtctgtctgtaaggtatgtgtgactgtgaaatgtgtaacagtgttgtatatgtgttatgtttgcattctgtgtatgtgttagcaaatacatgcaattttgtgtcaatgtgtttatgaggggggtgaggtgtgagcttggtatgtgtggatagcagtttagcatagatgaataggttcttgtcagtgggtttaaaggggtatatgtgagtatgaaatgtgtgtgcgcacacttgtgtgtattgtccatgtactgtgtatggtttgtaaggaacatggtggtatgagagcatatggcatatatgtggtgtgtgagtgtgcagtaagtgtgacaatctagcacagattagacaagttcttgccagtgtgtcagtgtggtataaacgtgtatgtgagagttggaggtcagtgtttgtatgtgagtgtgtgtggcaacagagcacagtggtgctagttcatacatggtggaagacgacctcttagcacttgggcctttaccctgtgcttctgggaggcagagttgggcttccgacttcccacagctcagttcttacttaatagctttcggtgtcatttatttctaagctcaatgtagatgcagatgcatgcggcaggaggtatttcgttccctagtttcagttgagttatgccgtgcctgagctgacttcttaaaacctgcttgccactctcagcaactgaagctcacccaccgttcctccagcttgagtgtgccatgctacagagtgttctgtggtggagtgactgagcacccagtgaggagagggccagggcaccgctctccaccccagactcactcacagctacaccggttcctcacagaagaccaccttcaaaccaacacagcaatggacttgttaaagactgcgtgttccaactagatacaaagtccagaattcagagacacttaaattcagataatctgtctttttgcttaatgtgatggagcagccaagttgctggggctgctgttgtctgaagagaatccaaggctcttgttgaattcagcctcctgacagcttctcacttccctttcactctatccaaagatccacctgcatttatcttttgatgtcaagctgttcctcctgcctttgttctggtagtttctacctgctaaagtttgcccatatttaagccctggtttaaatgctatttccccatgagcacatctaaagtagagagaaccatgtcttatttccaccactctgggcctccctttatgactcctatggcttcctgcgtctcttcggcatgatatgtgctgtccctctccccacatccccctttcctagcaaggcctttaggagtgtggaaaaatgtgccttttgttccttcacaagggacaggattcctggcacatgcttgagtcccatgaatgaattcatgaatgaatgaggcaaatcagacagagagcaaatatacataaaactgtaacaagtgtgcgagtgagtggcagggatatgctaatgcacccttgattcaaagcaaccgagccaggagcagcttaataatttataacaagccaaagtgtgacatcattcattttcctggtcattcggtctgtggggagggcaagatgataatatctgcaggtggctagggacccacctgaagggtaaggggatatttacttaccggtgactgcttgtcttccacacaggctacaagaatccagtctcctgactcttaagcctgttctgagaaaagccaacttgctcctgtctcccttcctgaccccccccaaaaaaaatcccagatgaaatgatcaaaccttgggctgtggacgatccatcctaatggaagttcatcagggtggtacttgctcagaaacagtcttctttgccaatatagttgaaaccaacctggggccctttgcattcacaaggaaaaggtctacttcccctggtggttggctttaaaatgtggaaatagcatcgtggtttgaagaacagcaaattatagtcctagcaggtcaagtgtttgtaaggggaggtctggcccattttgacaagttcaagaaaatgctgcccctttctgattaagtgttggtgttcagatggaagaaaagaaaggctgctgaagaacctgcgccccacccactatggtctatagggcaaagcattcgctcctgtaattctccaagtagcatctccctcccttcctctgagttaaatcttattgtttcgaggctgggaaatgccacacccatagtcctgcaggcagggctgctaggctccaaattcagggttaagggcaaagtccttgttcttcccagaatggaatcagtccctcggcctcacttcctctgagctcacctgagcagattgttccagaaagggcagagacttggccaggggccacattagctcaatgtttcaccagcttctgctttttgctgatgataaatctctctgatctctctgactctgcaatcctgtttctccctgatatttttgcatttgttttctgtttcaattttcttctatgatgctcacaaatacatatctcttaagagatggcattggattagaagtgccattttattaaggtctctcacaatggtttttactattaataacagtgaaggtttatggcttaagtgtagctatgtcaactcagccaaggcagttatttagttgaagtgagcatccagtggctccaatactccctcccagccccactccagccccagagtaagaaagtcaggtccagtgatcagacaaaaataaatccaaggacaactgtgtacagcctctatagctctaaatttgccatctgacttaagtatctagaagaggctccagtagttggctgcttcgtccctgaccattaaggactacactcaagccattgtggttaaaaaaatgcagcgctataaatttgaaattataaacctttactgaatgctaggcgtatattaacagggaagggggacacctgtgggtacagccaagcagtatgaagatggatggggtcagttgggaaaggtgggagactttatctggtaaacttgctagagctgacaatctattttgctcaggggtgacaaggaagatcatgggtacaaagcaatgtgttcacctgtcactagaatatgtgagctagtgtaatcagatacagactaaccagaggataggtgattctttcttattttttttattttaaatactttttatacaatatagtttgatcacagactttcttccctcagctcctcccaaatcttacccacctctctaatttcatattcttacccacctctctgcccatctaatttcatattctttcttccttaaaaaagagaaatttttaaattaaaataaagacagataaataaacttaaaaaaatacacccaagtagacaaagctatcaaaataaaacaaaaagcacacaaaaaaagcatggtgtccattctgggttggtcaactactcctggacatgggtcctgccctagggtgtggttaatatatatactcagtgataccacattggagaaaattgattttccctttctcagcaattatccattgaaatagcttcttggtgaggggtgagactttgtgtcagtgctggtgttttgtctgatttggactcatacaggtcttgcgcttgctgctacagtgtccatgggttcacaggtggatcagccctgctgtgtcagaaagattctgtctccttggagtcacccatcacctctagatctcacagtttctctgcccccctcttccatacagatccctgagccttgaaggaagagttttacagaaaacatctcatttgagaccgagagttccacagtttgtctctgcctacacacagtccaattgtgagtctctgtgtgttaattaccgactactgcaagaagaaggtccagcaaggagggctgggtgatgctctgatccatgggtataacactaccatcagttcatttagcctaatattagtagtgttttttgttttttttctaggacctggcacctatctagtctcaggttcttggccactttagcagtgttgagtatgggttccatctcacggagtggaccttaaatccaattttttaagaaaatggctgtttacttttgtgtctctattgaacctggtgtcttgcagacaggcctctgttgcgggtttcagaactggtagctggcttaaactgatggtgacttttctgtctggtggcatgcacggtaccttccagacttgattcatggtgccacgagtgctcgtcagcaggagtgaagcttctggctggaccccagtttgctctctccatattcagtgatgtaatttatgtattcagccataggggcttactatcagattctggaagtaactaattgacttggcaatagtctgtgatgtttgggaggttttaccggacccatttggccaacgacttcacaaggtgtcacacccatttcataggcgattctgatattt

SEQ ID NO: 126 - DNA, 3225 bp, Mus musculus
ctgctatcttggatgaccccatggagtgcagcagaggggaacggctctccatcaccctggccaagaaccgcatcaaccgcgcaccagagaggctgggcaaggccaaggtcgaagtggacatctttgagcttctcagagacagcgagtacgaaactgcagaaaccatgtgtcagatcctccccaagggtgtggtcgctgtcctgggaccatcgtccagcccagcctccagctccatcatcagcaacatctgtggagagaaggaggtccctcatttcaaggtggccccagaggaatttgtcaggttccaactccagagattcaccaccctgaaccttcaccccagcaacaccgacatcagcgtggctgtggctgggatcctgaacttcttcaactgcaccaccgcctgcctcatctgtgccaaagcagaatgccttttaaacctggagaagctgctccgacaattccttatctccaaggacacactctcggtccggatgttggacgacacacgggaccccactccactcctcaaggagatccgggatgacaagacagctactatcatcatccacgccaacgcctcccatgtcgcacaccatcctcctgaaggtgggagcctggctggggcagctgaactggggatggtgtcagcctattacacatacatcttcaccaatctggagttctccctccagagaatggacagccttgtggatgatagagtcaacatcttaggattttccattttcaaccaatcccatgcattcttccaagagttctcccagagcctcaaccaatcctggcaggagaactgtgaccatgtgcccttcaccggccctgcgttgtcctcagccctgctgtttgacgctgtctatgctgtggtgacagcggtacaggaactgaaccggagccaagagattggtgtgaagcccctgtcctgtggctcagcccagatctggcagcatggcaccagcctcatgaactaccttcgcatggtagaattggaaggtcttaccggccacattgaattcaacagcaaaggccagaggtccaactatgccttgaaaatcttacagttcaccaggaatgggtttcagcagattggccagtggcatgtggcagagggcctcagcatggacagccgcctctacgcctccaacatctctgacagtctcttcaacaccaccctggtcgtcaccaccatcctggaaaacccatacttaatgctgaaggggaaccaccaggagatggaaggcaatgaccgatatgagggattctgtgtggacatgctcaaggagttggctgagatcctacggttcaactacaagatccgccttgttggggatggtgtttacggcgtacctgaggccaacggcacctggacaggcatggttggggagctgatcgctcggaaagcggatctggctgtggcgggcctcaccatcacagcggaacgtgagaaagtgatcgatttctccaagccattcatgacgctgggaattagtattctttacagagttcatatgggacgcagaccgggctatttctccttcctggatcccttttctccaggagtctggctcttcatgcttctagcttatctggcggtcagctgtgtcctcttcctggtggctcggttgactccttatgagtggtacagtccacatccttgtgcgcagggccggtgtaatctcctggtcaaccagtactccctgggcaacagcctctggtttccggttggaggcttcatgcagcaaggctccactattgcccctcgagctttgtctacccgctgtgtcagtggtgtctggtgggcattcacgttgatcatcatctcctcctacacggccaacctggcagccttcctgactgtgcagcgcatggaggtgcccattgagtctgtggatgacctggctgaccagactgccattgagtatggcacaattcatggaggctccagcatgaccttcttccaaaattcccgttaccagacctaccaacgcatgtggaactacatgtactccaagcagccgagtgtgttcgtgaagagcacggaggaggggattgccagagtgttgaattccaattacgccttcctgctggagtctaccatgaatgagtactaccggcagcgaaactgcaacctcactcagattgggggcctgctggacaccaagggctatgggattggcatgccagtcggctcagtgttccgggatgagttcgacctggccattctccagctgcaggagaacaaccgcctggaaattctgaagcggaagtggtgggaagggggaaaatgtcccaaggaggaggaccatcgagccaaaggcctgggaatggagaatattggtggaatctttgtggttcttatttgtggcttaatagtggccatttttatggctatgctggagtttttgtggactctcagacactcagaagcatcagaggtgtctgtgtgtcaggagatggtgacagaactgcgcaacatcatcctgtgccaggacaatatccatcccaggcggcggcgctctggaggcctgccaccccagcccccggtcctggaggagcgccgacccagaggcacagcgacgctcagcaatggcaagctatgtggcgccggggagccagaccagctggcgcagagactggcacaggaggccgccctagtagctcgaggctgcacgcacatccgcgtgtgcccagagtgccgccgcttccagggcctgcgggcgcgaccgtcgccagcgcgcagcgaggagagcctggagtgggacaagaccaccaacagcagcgagcccgagtagtggcagcagcgaaggaccatggagccaggcggggaggcgggagggctaacattacaagttccttctctccggattcaagattcaatgactttacaaagcgatctgagcctgctgccccagcaggaggcggatctccctgccctgtggcagagcggcctatccgagatgagacactgcacccacgtggcagagacgctgtccctcgtgggcacaaggacccatctcctcccagagagcctttccctcacactcaaataagtggattctgggttgtggggccctgccgagagagcagtccaagaattgatggtgtcatcagttgaattccccctaggaaggggccattgtaccctgggtctagttcttacaggaaaaaaaaattaaactcaacagggaagttttcttttctgaatttgta

SEQ ID NO: 127 - protein, 928 aa, Mus musculus
AILDDPMECSRGERLSITLAKNRINRAPERLGKAKVEVDIFELLRDSEYETAETMCQILPKGVVAVLGPSSSPASSSIISNICGEKEVPHFKVAPEEFVRFQLQRFTTLNLHPSNTDISVAVAGILNFFNCTTACLICAKAECLLNLEKLLRQFLISKDTLSVRMLDDTRDPTPLLKEIRDDKTATIIIHANASHVAHHPPEGGSLAGAAELGMVSAYYTYIFTNLEFSLQRMDSLVDDRVNILGFSIFNQSHAFFQEFSQSLNQSWQENCDHVPFTGPALSSALLFDAVYAVVTAVQELNRSQEIGVKPLSCGSAQIWQHGTSLMNYLRMVELEGLTGHIEFNSKGQRSNYALKILQFTRNGFQQIGQWHVAEGLSMDSRLYNISDSLFNTTLVVTTINPYLMLKGNHQEMEGNDRYEGFCVDMLKELAEILRFNYKIRLVGDGVYGVPEANGTWTGMVGELIARKADLAVAGLTITAEREKVIDFSKPFMTLGISILYRVHMGRRPGYFSFLDPFSPGVWLFMLLAYLAVSCVLFLVARLTPYEWYSPHPCAQGRCNLLVNQYSLGNSLWFPVGGFMQQGSTIAPRALSTRCVSGVWWAFTLIIISSYTANLAAFLTVQRMEVPIESVDDLADQTAIEYGTIHGGSSMTFFQNSRYQTYQRMWNYMYSKQPSVFVKSTEEGIARVLNSNYAFLLESTMNEYYRQRNCNLTQIGGLLDTKGYGIGMPVGSVFRDEFDLAILQLQENNRLEILKRKWWEGGKCPKEEDHRAKGLGMENIGGIFVVLICGLIVAIFMAMLEFLWTLRHSEASEVSVCQEMVTELRNIILCQDNIHPRRRRSGGLPPQPPVLEERRPRGTATLSNGKLCGAGEPDQLAQRLAQEAALVRCTHIRVCPECRRFQGLRARPSPARSEESLEWDKTTNSSEPE

(The sequence listing continues in the following parts.)
